United States Patent Application Publication US 2008/0229439 A1 - sequence listing, part 2

SEQ ID NO: 2794 - DNA, 770 bp, Zea mays
  Clone ID: TF_LIB4762-093-Q1-K1-C4
cattgggtacctcgaggccggccgggggatgctatcataccagcactaaagcaccggatcccatcagaactccgaagttaagcgtgcttgggcgagagtagtactaggatgggtgacctcctgggaagtcctcgtgttgcattccaatcagtcatcacccaccgcctccgccgccgacaacagcgtagtgtagtgtagttccggagagggttggggagagtagtagtgatccgcaatgtcgacggaggaggctgttgtggctgaggtcccggtgaccgaggtgccagcggaggtcccggcggcccaggtggccgaggcgcccaaggcgaagaaggcgcccaaggagaagaaggcgcctaaggagaagaagctttccgcggcgaagaagccggcggcgcaccctccctacgctgagatgattgtagaggcgatcgctgccctcaaggagaggaaggggtcgagctcggtggccatcagcaagtacgtcgaggggaagcatggcggcaagctccccaccaacttccgcaagcagctcactgtgcagctgaagaagctcgctgccgccggcaagctgacgagggtgaagaactccttcaagctgccggccaccgacgccaagcccaaggccgccaagcccaaggcacccaaggccgcgcccaagcccaagccctcgccgaaggcgaaggccaagaccgctgcgaagcccaaggcggcgtcgcccaaacccaaggccaaggccaaggccaagcctgtcgctcctgccgccgcgt

SEQ ID NO: 2795 - DNA, 1662 bp, Zea mays
  Clone ID: TF_ZmC2187_1
ggccaagccccttgggaagcccaagggggtgtcgcccaagcccaaggccaaggccaaggccaaggccaaggccaagcctgtggttcctgcccccgggtggcccaagccccgggggggccctcccaaggtggccaagacttccgccaaggcttcccccgccaaggcagccaaaaaggggggtgttcctgccaaaaagggctacgcaccggcggctcttaaaaaggtggcaaccccaaaaaaggctgttgctgtccgccccggccagaaagggcgtggccaggaaggccaaaaagtaggctgcctgccttgtcgctggcgagatccccccctcaattccgcctataaattcccctcttgcctggattttgatccaatcgtaaaattgtcagtagctttaaattcgtcggtagctccagcataagtgtcggtggtagttctgtgcctgtaaaaaccaccgcctccgccgccgacaacagcgtagtgtagtgtagttccggagagggttggggagagtagtagtgatccgcaatgtcgacggaggaggctgttgtggctgaggtcccggtgaccgaggtgccagcggaggtcccggcggcccaggtggccgaggcgcccaaggcgaagaaggcgcccaaggagaagaaggcgcctaaggagaagaagctttccgcggcgaagaagccggcggcgcaccctccctacgctgagatgattgtagaggcgatcgctgccctcaaggagaggaaggggtcgagctcggtggccatcagcaagtacgtcgaggggaagcatggcggcaagctccccaccaacttccgcaagcagctcactgtgcagctgaagaagctcgctgccgccggcaagctgacgagggtgaagaactccttcaagctgccggccaccgacgccaagcccaaggccgccaagcccaaggcacccaaggccgcgcccaagcccaagccctcgccgaaggcgaaggccaagaccgctgcgaagcccaaggcggcgtcgcccaaacccaaggccaaggccaaggccaagcctgtcgctcctgccgccgcgtcgcccaagccccgcgggcgccctcccaaggtcgccaagacctccgccaaggcctcccccgccaaggcagccaagaaggcggctgctcctgccaagaagggaaaggcagcggcggctcctaagaaggtggcaaccccgaagaaggctgctgctgctgccgccccggccaggaagggcgtggccaggaaggccaagaagtagtctgcctgccttgtcgctggcgagatccccccctcaattccgcctatagattcccctctttcatggattttgatccaatcgtaatattgtcagtagctctagattcgtcggtagctccagcatgagtgtcggtggtagttctgtgcctgtaaaaacttgggatagttgatcgcgtgtgatcagccgtcatgctcctccagtctctatgaacaagctaagctataatagtattttgctatcctaaaaaaaaaaaaaaaaaaaaaaaaaaaaaaaaaaaaaaaaaaaaaaaaaactcgaaaatgctatcctatgatccccgggttgttggcttattcacaagctaagctttaatagcatttcctaaaaaaaaaaaaaaagggcggccgcccccccggggag

SEQ ID NO: 2796 - DNA, 1294 bp, Zea mays
  Clone ID: TF_ZmC1022_3
cccacgcgtccgcccacgcgtccgcccacgcgtccgcccacgcgtccgcccacgcgtccgcagctctcggcttctctctctcatcggcacacccgagctcgcgccctccttccacgtcgaggtccgagtcctgctttgatggcgaccgacgtgactgagactcccgcgccgttggtggatgcggccccagaggcgcccgccgacgccccggcggcgcctgctgccgacgcgaagccggccaaggccaagaaggccaccgcgccgaagaagcgcgccagcccgacccacccgccgtacgccgagatggtctcggaggcgatcacgtcgctcaaggagaggacggggtccagcagctacgcgattgccaagttcgtggaggacaagcacaaggccaagctcccgcccaacttccgcaagcttctgaacgttcagctcaagaagctcgtcgccggcggcaagctgaccaaggtgaagaactcgtacaagctgtcgtccgccaccaagccgaatcccaagcccaaggccgccccgaagaagcccaagaccggcgctaagaagcccaaggccgctgccaagcccaaagctaagacccccgccaaggcgaagcccgccacaaagcccaagcccgccgcgaagccgaaagccgtagtgaaaccgaagacacccgccaagcccaaggccaagccagctgccaaggcgaagcccaagaccgccggcgctaagccgaagccacttgctaagaaggccggccgccccgccaaggcggcgaagacgtcggccaaggacacgccagggaagaaggcccctgccaagaaggccgctccctcgaagaaggcggcgaccccggtgcggaaagcgccgtcccgtaaggccaagaagtaaagcggccaagaaggggggcgcgatgctgtaaatttgatatcggagaggctcgggtacactggtcattcagtatccgagaccgatagctgaggctagtggcgatggaggactgtgttattactactataaactggtggttgtgtttctgtaactggtgaatgatcaagttggaagcttttagtctatcttagatatatcagtggatagtgttttttgtattttcgttttcttttccaatgtgtgttgggtcttgtggattatcctttttttctaatctaatacaatgaagaggcatgtcttttgaagcttccattgaaaaaagttactttttaacgattgttcagactgttttgtgcgggtgcaagatcctgtagatctgaattccaacaaaaaaaaaaaaaaaaaagcggcc

SEQ ID NO: 2797 - DNA, 1516 bp, Zea mays
  Clone ID: TF_ZmC238_2
ttgggaccctcgaggccggccgggccactcccgcgcgtctcccacccaacaacaaaacaagcctaatggcttcctctccatctcacgccactgcggttgcctacttgccctagaaccctcgccgccgcccctctttaggattcccatgtccctggtcgccccctgacacgcccgccccggatcctgcacccgaattccgcgtggaattccgggccgaaccgcctctctgcgtgcgcctccgaccaccaaactctctctctcacacgcgcgcgcgcgcgcacgtctgaggcggtttgattctccggtgggggttccttggtctcgaactctcgatttgctgctgatgggggtgccgaagcagcgctggacgccggaggaagaggccgcgctcaaggccggtgtcgccaagcacgggcccggcaagtggcgcaccatcctccgggactcggacttcagcgcgctcctgcgcctccgctccaatgttgacctcaaggacaagtggcgcaacttgagcgtcaccgcaggaggttacgggtctagagagaaggcaaggatggcgttgaaaaaaggcaggcgcgtggtgcctaagcttactgctgacccaatggatgtagatgagaaggatatggacaacgctcatgacacagtcattgatgtggaaccgttagcaatggctttcgagcccttgccacttttggaaagcccagataagtcagttgctaggctcgatgatctcatagtagaagctataaggaagcttaacgagccatctgggtccaataaggcagtcattgctggatatattgaggtaaaccaaaagtacagaattgcaccaagttcttccttgggcggaataagcactaaggtatcctcttctgaagggatgaacacagaaaataataatgttaaacggctaactaagcctcaagtggttgctgaactggagaagatgaaaggcatgaccagggaagaggctgctgcctttgctgccaaggcagttgccgaggcagaagtagcaatggcagaagctgaggaagcagcaagagttgcagaggctgcagaaaatgatgctgaagctgcaaaggcttttcttgatgctgtcattttgtcaatgagaaacaggaacgctgcttccatgatacttcgagcttgctgatccttcacccatgcagcacaccgatgttctgctgcaaagattttctggatagatgagtttcttgtatagccttatagatcatggcgggttttcaacagcttgctgttgtcctgtgctgtgcagccaatcgacaacatgataacaagaatgatcgagaaagtagtcttcatttttttttgtttcccattgtgttgctttgtaattaaactatagccttttcccttcattagttgatgaagtgatgtcgtctaatagaacaactgtagtgaaaagaaaatgtcagaaagccgccttagttaatgcaaattgctgtgatattatttttgcagaaatgattatatggtgacagcgtttaagatt

SEQ ID NO: 2798 - DNA, 551 bp, Zea mays
  Clone ID: TF_uC-zmflteosinte082a08a1
gagacaccaaagacatgtcatatactgttgattttctgcaaatttttcccactaggttttactggagtgttacacagtatattattgcaaaactcctattttctttacaggattttaaggagattatacatgatggacaactgcttaaggaggagtgttacaggatataagcagttactatgtacactcattttagtctacggttcctggtccacagggcttcttgggacgtgactgttgagcacgttcccacgttctctgtcctttcggttcctagacgaagggtcacgacccttgcctgtgtctcctccctagtaaagcatgtccagctacatgtttccccgttacatcaacggaaaagcatgttcctccacttgtccttcaagtccaccggtgtcctgccggtcaaagcctcagcattgttatctagaatatccctccaattgccaacaccatactcttcaacaccctttcttaaggtttcttcttcgaacaagctccacctccttgtctttctccgcttagtgtttttgtttccaggcggtggcaaa

SEQ ID NO: 2799 - DNA, 1039 bp, Zea mays
  unsure (1)..(1039): unsure at all n locations
  Clone ID: TF_ZmC38422_4
tttttatatgcggcagatgcaacagcaccacnntgcctctttttntgtttcacggttcttgtggcagagaggtcccctttagttgttcctgacttgttagaaattggttctgcaatccgcttgaaaaattgtccctttaggagatgctactctgctaccattttgagaatctattgacaagagctttacaggaggagtctcatccccaggagccttgctgataactggagatggagaagatatgcacatatccactcgtgaatgctttttcctggacttatttctgtccttcagcagttgttttcccaatgcttctacaaatgttttgaacctccgaggcttcaggtgcagctttgatgcactgcagctaaatttctcaagcagagaccaccagcgaagcatagcagcaatggtatccttggagttttttgcatcaagtgagaacctaggacccaatagcttcttcatgcgtcgaacaagacgataatagtaatgcctgacctgatccttgtttttactctgaacacggtgtgtaatcttgtcgaagtttttccctacttgccgcagtgcattgaagaaattctcctcctcttggtgtgtccacgctgcccattgtcgagtctgcttttttgcaggttgcttattgggatcggaagactcaggggcggacccggtgaaggacatgcgtgtgcacatgtacgccctataactggtaggtgttgatagccgaggaaggacccgagcacgtaggacggcggcggcggtcgcctagtagcggcaggagagcgctccccgcagcccgcacacggtggacgggagaagaaaaggcaggcggtgaatggattttggatgggagtcggaacgggaaagggaaacgttttgatggttcaagacgtgggttatgggttggaaaaatactcctatgtgggaatggggaatggctactatgcatcaggcaaaagaatgggtaatcgattgcaaaacgctactaccatttggtatggatcaggcaaacgaatgggtaataggagaccaaaat

SEQ ID NO: 2800 - DNA, 796 bp, Zea mays
  Clone ID: TF_LIB4980-057-A1-K1-E1
tcgaggccggccgggccggttttcaagaagggagaggagtgcccctagtctttccttgctttccactgaaatctcctatctgcagccatgcagttgctcaatcctggcctcagatgaagcccaaccattcattggtatataagtcgctacaacctttgcaatttcccactgcttcagaacatcgtcgaagaagctctgtgctaccggagaaggtgttcgtcgtcgtgcataattatacattccgcagacctgtaagctctgtgagtttggttggagctcccaggttctgcattgcgttgagatggggaggcattcttgctgctacaagcagaagctgagaaaggggctctggtcccctgaggaggatgagaaactcatgaatcacataacaaagcatggccatggctgctggagctctgttcccaaactcgctggtatgtacaatgaaatttttcttcccttggtcctcagttatcaactctcaatcctccccttctcctccctctgcatttttctcatttccaattgccagctgaaacccctcttgtctctcaaatacctatcggtcagttcaattatctaaattcgagaagacaaattgttgcagggcttcaaaggtgcggaaagagttgtaggctgaggtggataaactatctgaggccagacctcaagagaggggcattcgcccaagacgaagaagacctcatcatcgagctgcacgctgtcctccgggaaaggtggtctcaaattgcagcgcagcttgccagggagactgataatgagatcaagaatctat

SEQ ID NO: 2801 - DNA, 911 bp, Zea mays
  Clone ID: TF_ZmC42_44
gaggaggagcacaggttgttcctcctaggcctgaagaaatacggcaagggggactggaggaacatatcgcgcaactttgtccagaccagaacgcctactcaggtggccagccacgcgcagaagtacttcatcaggctcaactccggcggcaaggacaagaggaggtccagcatccacgacatcaccacggtcaacctgacggacgaccagccgccctcgccgtcccagtcctccctgatcaccagccagtcgaacgcaccagctccatctccagctccggctccagccgcggggatatgccaggtcccattggcggccgacgtcaagcgacacggtgccggaactctgcccttcagctcaccgaaccggacctctgcggtaccggcctacaggatggagtttcatgaccaacaaggcctgcagtgtggccctctgcatgatcagttgctcgccagccagagcgtcctgttctaggcgcggtggcagcccaccctgcgccatggatcgaccaggtgcctattgtataatacttgtggtatcgctgtagcttcagcgcctgtattgaagggattagcctttcgggagcataacagaaaggagatcttcatttcatggtggtccataatttgttggagaatgtaacaaaaagaacgccgagaattcgatgccatggtattttcagactgttgctcgagtggtacggctggaaatgtatcatgcatcctatgaagtggacttgcattcaatcatggatgatcctatgaagtgtcagttaaccttggttgtgaccatctgattctgctgctgtctctgaagatggtgccttatattgaggccttcagagttcaaaccattatgtagtgtccagacatatttatccgtagtaatcagtttgcctattggtgcctgcc

SEQ ID NO: 2802 - DNA, 359 bp, Zea mays
  Clone ID: TF_LIB4744-001-R1-K1-D4
gtttattggttgatggtgcaatcccatacccctatcgtcggagaacccagaatccaccgcatcgcatagacgagtagagttagatttatgctgacgtaagatggtgtgcatccggcacgcgaccatcgaagacctggtggcgatgcaggcgtgctgcctgatgcggctgccgggcacctaccagacgacgttctactttgcgggcgggccatctggcccgccctgcccattcatgcacgtctgctgcggagcgggaagcgctgcctcctgcggtggatcaactacctgcgcccgaacctctagcgcggcaacttcaccgccgcggaggaggaggccttgatcaagctccacgcctcgct

SEQ ID NO: 2803 - DNA, 3305 bp, Zea mays
  Clone ID: TF_ZmC720_1
gtgcagcaggaaacgcaaaccggccaccccgcccgcactcgccgccccatctcttccgctcccgtcctctccgatccatccacgacgcgggaaccagcctccgaacagcagcttcccgccgccggcccccaagcctctgcgggcgtggttgcgtctccgcggtggcgccaccggagcggctcttgcgtccgagaggcgccctcgtgcgcgcgattttggccagatccgaccagcaatatttgtcgattctgaacaagcaccgtttgatgggcccggcaaaaggttctcgaacaattaacaagaccacagtaaaaggatatgaagatcaacagcagcatgatgacccatctagttcaagcaaagctaaacagaaaaagaggaaaatttcagatttagatcccaaatggagcaaggatgaacttacacgcttttatgaagcctaccgtcaacatgggaaggattggaaaaagatcagcatagcgataggcggtaagtcgtcggacatggtgcggtctctttacagtgcacatcggactttcttatctcttccagaacatcaagctactgccatggggtttatcgcgctggtgactggtcatcacaatgcttcggagaaaaccacgagtcatagaggatatgatcacatagccagagcatctggaaaggcaaggaaacatggagaacaacagaaatcaattgatggacctgacctgcacaactgtcatgaaggggaaattactggattttcagcttccttcaaaaaacgatactatggcgaattggtcaggaacagccgaaatcatgctgttcagaggcgtactcctcttataccagttatagctcctgcagacaggagtaccattgatgagcccacaccaggaattgaaaacgtcatcaattttaattctaccaagagaaaatatgaagcggccaatcatggctgtgctgttgctccaacaaataagtactcttcggacagagtttctggattcgctgaaacatacaaggctgatcaaggccatagttacttggataccatggaaattggggacatagcgatgtgtcaacaacattttaagaaaacacgaattcagcaaactgtggaggaaagtcagactggtatagttgagcatgaaacaacgatggcatctaaagaagggaataagctagtctcttctgtaaacaacaatcagatacttatcgacagtatttctgaagatgatatgttggtcttggatgtattgaatagcctggtgaatgcaccctctaaaatgtcagaactagagattaatattccttcaggttcgcttggaaaaactgactctgtgttaagggaggaaggccaccctaccattgatctgtctaaacaagggaagccagttcgtaaatccagtgcttccaagactaggaagaaaaaacctaagaagatattaggtgcagaggtgcctgctgaagcacaaaaaaaatgtgacgataatttagtcctgccggaaacactgagggttggtatcactgatgattcttccttgtgtactgactctggaagagcgaggacaccggaagcatctgaagatatttctgctgaagtccccaatacacaaacagaagccaagcctgaatttataatgtctggaaggaccaggttgaaatctcagatgcattgcaaaacaaagcctatgtcgtgcaatgaaggttcagataattttcaggcaaagaagttgctgcactgtttgtcatctgaaccacttcgtagatggtgcacatatgagtggttctacagtgcagttgattatccatggttttcaaataatgagtttgtgcactacttagatcatgcaaaattgagtcatctttcaaggttgactagatcagaatggagcgcgattcgaagctcccttggtaaaccgcggcgattttcaaatcattttctggcagtggaaaaagaaaaacttgaggattatcgggagaaagttagaaaaatctacgctcaactcaatgatggttcacgggattctctacctgcagacctagctaggccattttcaattggtcagcaggttattgttcgtcatccaagttctagggaactttgtgatggcaaagtggtgatgatggggccggattgttacaaggtccattttgatgatcctgaccttggtgttgatactgtgaaggacactgattgtatgccagttaattggctgcataatcgtcctgacaacatgagaaggaactacctttcaaatgatgtgtacaacatactggagatggatcacattcctgaccttacaccaagtgagaacgggaatcatgctataaatggaactactgtattcgaggagctcaaaagtctgcgcttaacatcagatagacagcctaaggcagaatctattatacatagtgaacggccaccatataggagtacatctgatggccctacaagttctagtggtttctcttgcccagacaataatgctggtcacaacggtgaactagagtcatatgtagctgcattttttgaaaactcactatcacaagccaggcagatggttgacgattatatccaggcaaactctggtggtagtgatgatgaaaaggtatgcatgttaaatcaagtgacaggatgtctaggctcagattctcgtggcgtgcaacttccatctgacctgatatcaaactgcatcgcaacggttatttcaatcaagcgccttagcgactcgcgacatccatttggtaacgtagcaggcgtcttggagcatgctttatcaatgctgcgtccaagctgtccacagaacctcggagtttacacagaaataaagagagacctttgcaccatagcgaaccagatttttgcacttgtgccaacagcatcgggcaattgcagccctcctgtctcgcccatgtaactgggacctgccccggatagacccgttgccttcttgcaggccctgcagtagacacgctgcttcctctgctgtgagttcaaaacagaggttttgctgctgttgggagcttgatgttatgaagtccggttgaatggtagcatacggaggacgcaagtctgatgtgctgacttgagcttgtatatgcagcgtgcgatcattaattggctagcctccttgtaacctgtgtatatacctgaatgaataatttataggtccatatacagattcaggatagttaatatctgatatagtagtgaataaagatgtatttctgcagtcatgattctcgtcttatcgatatagtatggcaggaacgtttcttgataggaaatttacataataatattaggatagtgagct

SEQ ID NO: 2804 - DNA, 2063 bp, Zea mays
  Clone ID: TF_ZmC5585_1
cattgggtacctcgaggccggccggggcggccagcctaccactaccactctcgattaccagccctctcgccttctccgctcctccgtcgtcgccgaaccccatggccccaaaaccctaaactgagcccgccgctgcttctccagtccgcacgaagcgccccacaaaatgccgcggctgacgccggcgcacgccaccctcatcctggaccacgtcctgggcgatccctcgatccccaccgcagtcaccatcgcgttaatcgctgggatcccctctccctccgatccgaccccgcgcctccgccgcggggtccttctccgccgcctcgccaccgaccccgtatccgaatcctctctcgaaaccctccacctcctggcctcgctcccggcctgcgcctcccccatcgcagccgcccacatcgccgtcgcggcattcctcgcggcctccgcgcccgacttcgacgccgtcgccagggctctcttcgcgcgccccgacggccgcgcgcgccaagcggtccacggcggaagttcccccgcgctcgcatccgacgatgccatcgccacagtagaccagttcgaggctgccgtcgggatgtcctcctctcagaccatcctcagggtcctgtggggcaaccgggccgccgtggaggagcgggtccaggagctcctcgctgctgaatgggccgcgattggcccgtcgcggctcgaggcgttggctatgcggatcgtcggggatggggccgtcgagacatggggtgccgcagatgaggccatgcgtgccaatttgcgcatcttggctggggaagcaaaaacgcgcgagattctcgacaaacttgaaaaaactacctgcaacacaaatccaatttcaacaccagctgttgagaaggtgatggatgcgctcaaagcaagctgtgctgacctccacagcattgtggaggatccccttccagctgcaaaggcagttgcagatgagttattgactgcgaggatggaaaaattagttagcctgaatgcccaagaagtaggagggcagccaacaacttgtggcgttgcaggaccgagtattcataatgacaaagacaatggtccaggtataggcaaacctcacagccttatggagcggaacgcaacagcacgaacctctcagtgggaggagtcacttggtcttgatggttcggaaccaccctcaccaccgagaccacacttgcctagcccaaggagactaccaccttctcctttgtcaccgcctgggaacaaaaacaataatcggagaaaggcaaggaggtggagcttgttcgaagaagaaaccttaagaaagggtgttgaagagtatggtgttggcaattggagggatattctagataacaatgctgaggcttttaccggcaggacaccggtggacttgaaggacaagtggaggaacatgcttttccgttgatgtaacggggaaacatgtagctggacatgctttactagggtaaagtacctagcaattagcatgtagtcctcgtacatcacagcagactcttggtcaagcttttctggcagctgcagctacatgattttgtgtctcggtgtagtagcagccgcagcttttctggcagctgcagctacatgattgtctcggtgtagtagcagccgcagcccaaacggttggctttcctggcagctgcagctacagtattttgtgacggtatgcttaccgagtggctgattcgcgcactgacgtattatggactcgattttgtatttttattatgtacattgtcctgcatgcttgcattgtactttttttgggtggattttgcagcagcattgtgatcaagaaactagtgtgtagtgggccttttctgtatttttgttagatagtaaaatgagaaggaatttagaggtcgcattttatctcggctctatgaagcaaccatgggttgaaggtatcccaaacaaaccttatattttgactgcactccacccgagctaattacacggcatttagcttcttgtttatcatatatccaactacataatttcaatcctgtgaacccctttgatggcccccctgcgat

SEQ ID NO: 2805 - DNA, 606 bp, Zea mays
  Clone ID: TF_LIB4073-010-Q6-K1-H9
ccggtcgacccagcgttttgtgctaaaacttcagtccagctatctaacaagagtctacacataaaacatcagcactagttctgtttctgagaaagacaatccaaaccaaagatgtctgggtccaggaactcttcccgcaacgttaacattgattccaactggagcaaaaaggagaacaagctgttcgaggaggccctgggcggctatggtgagggcacacctgaccgctggcacaaggtggcccgtgccatgggtggcatcaagacagccgatgaagttcgccgccattatgagatccttaatgatgatgtcacgctcattgaatccggcggagttccattccccaattacaacacacagggagcttggaactaaggagtcaaggatgcatgtgaagaaccaccagacaggaactactgctacatgaactagatatcttaggtattgaaggaaatgtcctgatatgatgttgtattaagaagttattatgattgctcgggtaagaaataaaaggagctacagaatatagataagtgttttatgtgtaaataactataggttgtgagaaaatcatcagttatgctatagaaaccagggaaccctatc

SEQ ID NO: 2806 - DNA, 777 bp, Zea mays
  Clone ID: TF_ZmC2063_4
gtacacgggcggaagaggagggggggcttagaaccagagggcggctacctgtgaaggatacccgtgctgctggctgctgctgttcctcgagctagagccgtgtgtgggctgtgcagattgcagagcgcagcttccagtctcagcattgctttcaatggggaggcactcctgctgttacaagcagaagctgaggaaggggctctggtctcctgaggaagatgagaagctcatgaaccacataaccaagcacgggcatggctgctggagcactgtccccaagcttgcaggtacaaccatcaaaatcaaaatcaaatcctgcacgctttgctctaccttctcaattgtccatctccactgtttcctgctccttctccaaggtcacttctttctcccactcctctccctctcgtacctgctcaattgattacttaattaattaattaattaatggtggcagggcttcagaggtgtggcaagagctgcaggctgaggtggataaattacctgaggcctgaccttaaaagaggtgcattctctgaggaggaggaagacctcatcgtcgaacttcatgctgtactggggaacaggtaagaaagctaagcccaaaatcatcacaaacacacaattttgcacagaccgattgcttccaagcaagctttctttttaaccaggcctttttctttttttttcaacatccatggacaggtggtctcagattgcaacaaggttgcctgggagaactgacaacgagatcaagaatctctggaactcgagcat

SEQ ID NO: 2807 - DNA, 890 bp, Zea mays
  unsure (1)..(890): unsure at all n locations
  Clone ID: TF_ZmC141670_1
attgggacctcgaggcgcctcgaggccggccggggtccagggactcaataggccagtaggcgattacaagggtggaagaaacatctagccttaacattccaggctacagcctaacccctctaatggatagcagcagtggtagccaggacaagaaattcagagacaatgatcgccctgaagcaaaagaagctaatagcaccgcacagcatcttgttgacttcacggaagcagaggaagatcttgtttccagaatgcacaggcttgtggggaacaggtgggagattatagcaggaagaatcccaggaaggacagcagaagaggtagagatgttctggtccaaaaaataccaggaaagatgaaaccgaggccttagatttatatagatgatatatgcaagcatgtgctgataaataatgttaaactgggcctacgatgttaccggtttttcagcctgtgcacatcttgttatgacatgatgctaattttgcaaaagcacagtaagaaaatttacagaacgtcagaaaatatcaatcatgttttagaagatgtgtaacagtatagtatgccttaagaaaagatgaattttgcctcttgcaacttaacttgtgtaccggcagaaaacttcagtaacgcagcttctcatggaggatgtgagctgttaccagcgaactttaaaaaactccccagtgtgtatggaaaagaaagattcagcatcagaaacaaattcttaactagtcaactaccagcgaaagttgtccacaagtaatttgaggagcatggcgctcacaatggctagcgccctggacatccaggncattaacctatactggtcaggttcgttctttctgaggctttgaccacccggatcgtatatgacatgtgttttgcat

SEQ ID NO: 2808 - DNA, 611 bp, Zea mays
  Clone ID: TF_ZmC141670_2
cattgggtacctcgaggccggccggggtccagggactcaatagatcagtaggcgattacaagggtggaagaaacatctagccttaacgttccaggctactgcctaacccctctaatggatagcagcagtggtagccaggacaagaaattcagagacaatgatcgccctgaagcaaaagaagctaatagcaccgcacagcatcttgttgacttcacggaagcagaggaagatcttgtttccagaatgcacaggcttgtggggaacaggtgggagattatagcaggaagaatcccaggaaggacagcagaagaggtagagatgttctggtccaaaaaataccaggaaagatgaaaccgaggccttagatttatatagatgatatatgcaagcatgtgctgataaataatgttaaactgggcctacgatgttaccggtttttcagcctgtgcacatcttgttatgacatgatgctaattttgcaaaagcacagtaagaaaatttacagaacgtgagaaaatatcaatcatgttttagaagatgtgtaacagtatagtatgccttaagaaaagatgaattttgcctcttgcaaaaaaaaaaaaaaaaaagcggcc

SEQ ID NO: 2809 - DNA, 1220 bp, Zea mays
  unsure (1)..(1220): unsure at all n locations
  Clone ID: TF_ZmC141670_3
ccggccgggatcttgtccagggactcaatagatcagtaggcgattacaagggtggaagaaacatctagccttaacgttccaggctactgcctaacccctctaatggatagcagcagtggtagccaggacaagaaattcagagacaatgatcgccctgaagcaaaaggttcaccattttcttgctttgctttgttttgctttacctttgctcgctgcctcttctgaagtctgaacttgtagctttttagttagtaccattgtgttcaagataatagctcatatgactttgttatttcaagagatctcacaccaacatatattctaaacctccgtgctttattttctctccgtcccaaaaagaatacaattctagcacagtgttatgtcatagtatcgtaaatttgattaattatagataaaaaaagtaccaatatctatgataacaaataaatacgattagattattataagatgtgttttcataataaatttatttggagccataaatctaaatactattcactaaaaacgtgatcaaacatgaaccaatttaaccggcatgtaactcatagttgcattctttttgggacagagtgaatacatgaaaactaaaacagatggtaaacagtgaccatttaggatacactataactgacaaaaactgtggggacaaacaggacgccatgtgatttaccatctgaccagcctaatgaagtgcagaggatttagccccttcgaaatagggggaaattattcctaggaaaattgcaaattctcttggcgaacataggattggcaaaccataatatatttctatatggtttgttaatgtttttttttttcttactctcgtgatcaactatatcctttcacaattattgcagaagctaatagcaccgcacagcatcttgttgacttcacggaagcagaggaagatcttgtttccagaatgcacaggcttgtggggaacaggtgggagattatagcaggaagaatcccaggaaggacagcagaagaggtagagatgttctggtccaaaaaataccaggaaagatgaaaccgaggccttagatttatatagatgatatatgcaagcatgtgctgataaataatgttaaactgggcctacgatgttaccggtttttcnagcctgtgcacatcttgttatgacatgatgctaattttgcaaaagcacagtaagaaaatttacagaacgtcag

SEQ ID NO: 2810 - DNA, 129 bp, Zea mays
  Clone ID: TF_6165685
atcaactaccttcgggcggacgtcaagagggggaacatctccaaggaggaagaagacctcatcatcaggctccacaggctcctcggcaacagatggtccctgatcgccagccacctccccggccgaaca

SEQ ID NO: 2811 - DNA, 712 bp, Zea mays
  Clone ID: TF_LIB4835-010-R1-M1-G2
ggccgcgggttttttttttttttttttggaaaacatggcgacagacgtctgcccttatctaagtataaccaatattttctggacgtcctgagttacacatgttccagcgtgtagagaacattgtgatggataacgtggttacacctacttcaaataatatttactcatatataccacatcgtccagaagcgtacacgtatatctgcattacacggatcacaaaaaacccgagccttttccctgtagaaccttgccgtcctgcccagagaacttgactggggctgtgaagccacccccttgcgactgcagctcatgtagctccttcactcgcaacaaaatggatggtggtattggtatgatagaagggttagtcttccgtggacaggcaccatctttttgcgccggaagctgtgtctgggttgctctgatcagattacgccatttatccttgagatccactgaagtgcggtaggaatacgaggcgaaggacagttttctaatctcagaccacttgccagctccataccgagccacaccatccaccagcttcacgacctcactcaatgtccatgctcgatgatgcttccgcgttaaaccatgctttattttaggcttggaaacagcactgcagacctttgcttgtaggttccgaacccctttgctatcaactgcttctgcatgctcgttctcagaactaacctttagtggaacc

SEQ ID NO: 2812 - DNA, 1667 bp, Zea mays
  Clone ID: TF_ZmC152_4
ctccacgcgagcggacgacacgaagcggccatagccgcacgttgggatcccctccgctacgcctctcgatggtctccgccagcgcgccgccgccgcaggcccagtccgacgcggccgggtcgggggaggaagtgagcaagaaggtgcggaagccgtacacaatcaccaagtcccgggagagctggacggagcaggagcacgacaagttcctcgaggccctgcagctctttgatcgtgactggaagaagatagaggcttttgttggctccaagactgtcatccagattcatcttccatccataggaactctggcatgaacgtgcctgtttcttcatgggctcatagttccatcccacaagctgttgcttcatcaatggtgaaagatttaggtgctggaacaccaggttcaaacaatttttgctcaagtagtactgaaggccttccaagaacttggcaacctggtgaaacaaatgatccaataaatcaaattccgtcactccgccttatgccagattttgcgggagtgacagcttcttaggtagtgttttcgatccaagtacaagtggtcatctgcagaaacttaaggagatgaatccaattgacgttgagacggcactgttgttgatgaggaatctctccatcaatttaaccagtcctgattttgaagatcaacgcttctgatggacctgggctagggagctcaagaagttcagctctagcgacgagcgcgcctttcatgtaaggaagcgtgcacccttcctggcctttcctatccccaaaagctcggccatctaggctcgtgaaatgctgcttcagatcaaggctgtccttggaaatgggaagatgaaaggagaatctgggtaatgccggttgctccctttcccattctttgttgagttcagctttctgattggtttctggtggccctcttgatacggaacttgtgcgctccgtctgagaaagcatgtgtgcaaagtttcatttgaggagttgaggcgatcatggcgctgtaaaatgcggcttatcttcccccttcagggctggtttggtggaccaaccctcaaacatttgcaattcctatgtacgtctgtagtgcgtcaggtgttgttgcccacgtgtaaaaggaaaataaattcacaatgtaaaggagacttgtgcgttagcactaccatttgaatttatgaaatgtcaaagcagcctagcgagtttgtacttgccaaaaaaaaaaaaaaaaaaaaaaaaaaaaaaaaaaaaaaaaaaaaaaaaaaaaaaaaaaaaaaaaaaaaaaaaaaaaaaaaaaaaaaaaaaaaaaaaaaaaaaaaaaaaaaaaaaaaaaaaaaaaaaaaaaaaaaaaaaaaaaaaaaagggggggcttctttttaagggacccgggataaaacacccttgtggggggaaaaaacttttttttacggggcaaaattttttaatatgcggggtcggtaaaaacaaagggggcgaccgaaaaaaaaggcttgggaaaaaaaactaaatttcccaagtgggaaaaacccctttaaagaagtgggaagcattatggatgggggcattacgccctcctttaccgataaattcgccccctttatagcgaaaacaaaccccccttttagggccctataaatccgcatggggggggttttttcgcgaaa

SEQ ID NO: 2813 - DNA, 2543 bp, Zea mays
  unsure (1)..(2543): unsure at all n locations
  Clone ID: TF_ZmC21713_1
actacatctcgtcgtcgtcatccccgcccgtccctcgacacccagccgtacgatccgcatcccagatccatcccagccgcccgccggctctgccacccctccccggctggatcccctttcccttttcgaaaccacccttcctccgttcctcggctcctccttgcggtgagaaacacggtgtcgccctcgagcccgaccttttcctcccctcttctctagatcgcgacgaggcggactccccactcctgctgcccggagcgaagcggaccgcgtccccgccgcgtggcctgatcgatccctcagctctgccggtcgggccaatgctgcgtgcatcgagctgccgctgatcacgattatagggtttaatacttgtatattttgattgtcacaaatgttggatgaagtttgacttatctatggaaatggatgactcacatggcaccatggttaataaaagtgaagagaatgactttgaaaagaaaggcacttctgatcctgtggtttatcagctagttcgggttgaaggtgatggaacacttgttcctgctacagaggatgatgttttgcagtttgaacatttccttcacaacgagaaggttgatcttcctcctattgaagatgcagaccatgtggaagagtttttcaacaatgactgcatgttactgaagaagcctgacttggaagatggatcttccaaattggagactgtggaagcacacacacaaaaattgggtgccaacttagaggaaaacatattacagtcattggatgattcccttagtcctccctcagactttagaattcatagtcagcattcagataaattgcttacagaacaaggggcaaacgtcactcgacaggacaatgcttcaactgagactacaaaatcgacagtgttaaatgactcttgctgtgctgaaaaatataaggctgatgcctgctcaagatctgtatgcgacacatctacagatccatctgtttcgggagttaatagttccatgcctgatttttccatattaagaggagaagtctgtttggatgatcttactattagagaacttcaggaggcgtttagagccacgtttggccggcagactaatgtcaaagacaagatatggctcaaaagacggattacaatgggcttgactaattcctacgatgttccaagttcaagttgtgtactaaaagactacaaaattgaaggttaggatgccaaaaatgatatgtcagatctggatgaaagagctaagactgggcttagagctacttctgtggttatatatcaaggaaacgaaggggactctccatctagctcttactatcagagcgaggaccaggaagattcttccaagagggtgccgatccataatgatgaaccacaaggaaatctgctaggcgagcaatgcactgacaagcgaactagaaagccaacaaaaagatacatagaggagctatcagacattgagactcatgactcaactgtaaaaaattcttcaccagcaaaaaaggcctgcacatgatgaactgttaatgaaaccgcgagtagcacctttcaatgagactggttctctgggcacaatctatcctactagaaaggatacctttggaggatttagtgtacacgttccttacgtttcaaggatgagaagggggcgccctaggaaggacttcatttcatttgcggataagggaccctcggttgaacctaaagggattcagccatcagttgagatgatattagtgaaggatggtgacaagggaaaccacctgaggaaagtacctgaggttccactaaaggtaagttctgagaacgggcatgtagaagcagttgatagcaaaggggttcggaacctacaagcaaaggtctgcagtgctgtttccaagcctaaaataaagcatggtttaacgcggaagcatcatcgagcatggacattgagtgaggtcgtgaagctggtggatggtgtggctcggtatggagctggcaagtggtctgagattagaaaactgtccttcgcctcgtattcctaccgcacttcagtggatctcaaggataaatggcgtaatctgatcagagcaacccagacacagcttccggcgcaaaaagatggtgcctgtccacggaagactaacccttctatcataccaataccaccatccattttgttgcgagtgaaggagctacatgagctgcagtcgcaagggggtggcttcacagccccagtcaagttctctgggcaggacggcaaggttctacagggaaaaggctcgggtttttttgtgatccgtgtaatgcagatatacgtgtacgcttctggacgatgtggtatatatacgagtaaatattatttgaagtaggtgtaaccacgttatccatcacaatgttctctacacgctggaacatgtgtaactcaggacgtcccagaaaatattgttatacttagataagggcagacgtctgtcgccatgtattacaaacgtgtcaggcgtacacaatttaaaaggcaaatgcaaatctagacaaaaaaaaaaaagttagagtnnnc

SEQ ID NO: 2814 - DNA, 723 bp, Zea mays
  unsure (1)..(723): unsure at all n locations
  Clone ID: TF_ZmC881404_1
tgtggcggccgcttcgannggccggccgggtctgcgagaatgcaaaccacaaaacaaagtcaaaccagctgcaacgatcaagagcgaggcttccttgtccagctctccgctcagccgacacacacagattgacagatggcgtctatgtcgctgagctcgtcgagggcgcagtggacggcgaagcagaacaagctgttcgagcaggcgttggcggtgtacgacagggacacgccggaccgctggcacaacatcgcgcgcgccgtgggtggcaagtcggcggacgaggtcaggcgctactacgagctgctggtgaaggacttggagcacatcgaggccggcaaggtggccttccccgcgtacaggtgccccggcggctacgacgacgccgacagcgacaggctgaagcacctgacctgaagatctaggcggcaggcaagcatcatgagaaccactgaacaagtacgtcctacatacgtacacttcgcgccatgtgagtgtagcacgtgtggctacaaaagaagcaagccaagcgagtgggtcggacggattatctgttcaagcacgcatgtgaattagaattactactagcaatagctataggatgttgatcaatcgatctccgttccccccgtgttgcgatgtaaaatctcagcatctgtagcatatatattctgaggagtgaaataaaatacattcactagtttgtggacttttatttgtcct

SEQ ID NO: 2815 - DNA, 603 bp, Zea mays
  Clone ID: TF_LIB4742-061-R1-K1-D4
gggtccctcgaggccggccggatctatctgtttcccctttcttcttcttcctcctcttgattgataggtgcgccgaagcttgttttgttgggtggcctttgtctctgtcgtctcggcttgtctcgtcttcctcccgcccggccgccaccacctccaggctactagttatctattaagttcggccaaccaagcagctggatcaggtcggtcgacggcggggacagctcggagggaggaggcggccggagaccgaaggacgcctaccatcaactcagtcctggccgcgctgccgaaaaattaaaggaagaggacgaaggctgaccgatggacgatcgttatcctcatcatcagtcgtcgatggcgacaccggcagcagcaagcaagatgagcaagaagctgcagggcggtggtgagcgtagtagtggcagtagtagtaggggcagcggcaacagtgataagcagcagcagcagcaggtgccggcggcggcgatgaggaagggcccgtggacagaggaggaagacgctcagctggtctgaggcgcaccggcaagagctgccgcctccgctgggtcaactacctccacccggggctccggcgcggcc

SEQ ID NO: 2816 - DNA, 2498 bp, Zea mays
  Clone ID: TF_ZmC12732_1
aattcagttcgaggcgaggccctcctccatcccccctcctaggctcaccaagtcaccagtcactaccactccgccagccaggcgctccctccatttccgacgcggcgcgccgaggtctgcacggacgcgcctcggtcactccgtcttcccacctctccggtctccgctggtcgtggtctcgagttccctcgcttgcttacgggaggcaacgacacgaccccgattcgagtggcgaccgggggaaccgcgtcttcgttccgtcgggggccgcctccgggtactccattctccggccccgcgattcccttcctcgcctgctgctgaggatcaagtcctcttctagtaagacaccgcgggctccaggaggcgcggcccaggctgctgatcctcgcccctggaccggtagacactgtggtggtgactggtagtattagtgattttaaatggcttcagcaagaaaagtaagaaacgcgaataagcgttatgccaaaatcaatgaagactggcaggataaagatacaccaagtgtacctaaaagtaaagtgcgaaagaaaaagttatcggacatgcttgggtctcagtggagcaaagatgagctcgagcgcttctatggtgcctacagaaaatatggaaaagattggagaaaggttgctggcactatccgcgatagaacatctgatatggtgaaggctctttacaacatgaataaggcatatttatctcttccagagggaacagcaactgctgcggggttaatcgcaatgatgaccgatcactataatattctggatggaagtaacagtgatcgagaaagcagtgattcaccaaaagcttctaggaggctacagaagcgtggtcgtgcaaaacttcaatctgtgtctaagacatctgatacacattttactgatctgttgcaacctcagcctgcttcatcgagctatggatgcctttctttgtggaagaaaaaacgttctggagacctatttgtagggaaccggccacgtgctgttgggaaaaggactccaagagtacctgttgcaagcatgtaccatcgagatgacaggggtgcaccaaatagacaagctaaaccggatgctaatgatggtgatgatgaaggagctcatgtagctgcacttgctctggcggaggtacatcaaagaggaggctcacctcagatttcccatacacctcggagatctggtgatcatatgtttttgtctcctgctaaaagtagtggcagaaaaaacgctgattcagagatgggaagctcaaagctccatggatttcagttggatgctgattaccctgaaggtagcttgggaagtagggaagccgagactggtgattataccaaaggcacatcctatttgatagccaacaaaggatctccatctagcaagcctcagaagaaagtcaagaggcctcaaaagaggagaaaaaaagctgtacgcagaacggatgatcagtttgaggatgatagagaggcttgtagtggtactgaagaagggtgcagcatgaaaaaggcaaaagaggaaccagagctggagacattgggaaccaaaactgcatggccatctagcacatcaaataaaagaagtcgccaactcttttttgatgatgaaagtttggctcgtcctgcattacatactttagctgatctatctgtgaatatcctacaaccatcttctgttgttgaatctgaatcatcagcacagatcaaggatgaaaaaagggacaatgattctgatggaaagcctggtatacctgcagcagctgtatcggtgtatgagcagaaagataactccaaaagtacatcaaagaaactcaaaaggcagccagaaatggcaagcactgatatggttactaggaaaaaaggcaaacttgctaaagatactcatcctgatgggagcaccacttctgaagtaaaacagcaagcttgtacatgtggtgtgaaaacagaaaaaaagaagaaatcttccatgggaaagattttaaaagatgaaaagaaaatgccaaaagatgttgagaagactgaggtttctcctgaagaagagaagacatcttctaacaaaaccatggatatcgcagagacaactacacaagttgcaacaactctgcatgctgacttgatggcaaagggtaaaagccgtcgtaaactaggcattcaaaaatcactaactcaagaatgtaaacctgccgagggtgctggcgattctggaagtgataaattgtcttactcactaagtaatattattgatctcaaggacaaactctctcattgcttatcatcacgtttgctccgtagatggtgcatgtttgagtggttctatagtgcaattgattacccgtggtttgcaaagagtgaatttgttgagtatttgaaccatgtcaagctaggtcatgttccaagactgactcatgtcgagtggggtgtcatacgaagttctcttggaaagccccgtcgattgtcgaagcagtttttgcacgaggagagagag

SEQ ID NO: 2817 - DNA, 129 bp, Zea mays
  Clone ID: TF_6165699
ctcaactacctgcggccgaacatcaagcacggcggctacaccgacgaggaggaccggatcatttggtcgctctacagctccatcggcagcaggtggtcgatcatcgcgtccaagctccccggccggacc

SEQ ID NO: 2818 - DNA, 1038 bp, Zea mays
  Clone ID: TF_ZmC11324_3
ccggccgggctccttcccttcgcgcctaggggcggaaggccgccgtgcccgttcttcccagctgcagcaaccggccagtgcgcgcggttgcgttgcatttgcatctccaagcacctctcaggaaggacggacaacgagatcaagaactactggaacacgcgcttcaagcgccggcagcgcgcgggcctgccgccctacccgccggacgtcgagcggcagatcaagctgctgcgcgcgcagaacgtcaacccgttcgcagacgcagacgccgacgccgctcctctacgacgtcggaaacccgttcgcgttgctctccagcataccgtcactgtcgcagacggcctcgcactcgcactcgccactgatcaaccagaactacccgcttctgaaccagatgcaggtgttccaccacctcggcggcagtcagcagccgtcgttccccacgcgtccaggacggcagcgcggcggctttcggcgacatcgtctcctctcgcctgccgccactgccaaccgccagaacgcaggcggagctacattcgaaccaattcgacacctccagcagcggcgggctgctggatcagtcgatgctgatcggcgacgaacacctgctgcggcccaacccgagtatggtcaaggtctcctccatgcccgcgctctcctaccgtgagccggatgggtccaggatgctgccagcccatggcgccgggagcgacggcgacgtctcctcgctggggcactgccctccgggacaggacctccaccgtggacgaacacgaacgtgcgtacacgcggcacaaacacgatgatcatcgtctcaccatgtggttgcatgcatcgggaaaccaatgcgttttcagcggccgtgaagccggcgaagaggaggacggcgagcgaggtggggttctccgacatgttcgccgtcgcaccgccgggggattggttcggcggcgggtcgacggcgccatcgccggggccgtcatcggccgtcaccgacgaagagtttaacctggagatgcagcagttcatgtcaatgctacc

SEQ ID NO: 2819 - DNA, 1797 bp, Zea mays
  Clone ID: TF_ZmC9414_16
cctaaaaactaccccctgttatgcagagctagaccaactcatattcacgctcgcatccgtgtttaacataaactagtaccaatcaaaaacatccccaagatcatcatcaccaccatcatttccaagatcacgctcttcttccacattatccatctgttcgccatgctcttcttccacatcagccgcccatctgtacgtcatgctcttcgttcaaccaatttgaactattttcctcctcgtttaaatcatccagtacattctcatttccagggcctctttcacttgatgcaccatcttgtttttgtgtacttttaatatctggcagcacaacatcttcaatgttgagctgcttaattacctcctgagcgatgaactatagcatcatggactagcaatggattttttctctcctcagatttaaatttctgccgcacctgatggcgagtcttatcagggaataattgttgtatcattgcaaaatcgctaccaaattgtcgaagaccctcataaaacaagtcggtatctgattttgaccattttcctcgggctggtttgttcatgtagccatgtaggaatggtagttcaattttgttgcattttgtacatgctcctctgttatatcgttgtcaaagaacctagcttcctcatctctgtagcccaaatcatccatatcatctagttgaaagtttcttgtattagaggatggcccggatggaatcccttttggctgaaatcatcaagaaaatcattagaattagccaaaaaagcaaatataacaacaaaatgttggattgtgacaaaacctaaccctaaccagggttggagttgtattgatagattagagtacttgggcctggcccattacaaagggatagtctaacacccccgcagtcacaactctgtcctgtacagatgttgagactgaatcgaaattctaaaaatacactcgtcggtagcccctttgtgaagatgtcggcgaactggagcatggtggggacgctgagaacccgaacgtcaccggcagcgacacgctcgcggacgaagtgcaggtcgttctccacgtgcttcgtgcgctgatgctgcacgggattggtggagagatagaccgcgctgacgttgtcgtagtaaacgagggtggcgcgctgaaggggactgttgagctcatggaggagctggcgtagccaggaggcctctgccacgccgttggccacggcacggtactcggcctcagcgctggagcaggagacgacgggctgtcgcttggcagcccaagaaacaaggttggcgcccaggaacacggcgtagccggaggtggatcggcgcgtatcgggacagccagcccagtcagcgtcggtgtataccacgagctccaacatcggggatggtcggagtaggagaccgtggtcgagggagccgcggaggtagcgcagtatccgcttgagagcggtaaagtggggctcccgcagagtgtgcatatgcaggcacacctgctggacgacgtaggcgatgtctggcctgaagaaggtgaggtactggagggcgccggtcaggctgcggtaggatgtcgcgtcggcgaccggaggcccgtcgtcctcagagagcttagcctgagtgtcgacaggcgtggagcagggcttgcagtcagacatgtcagcccgctccaggatgtcgatggcgtactggcgctggtggaggaagagaccctgagggcggcgctcagcggtgatgccgaggaagtggtgaaggagccctaggtccttcatcgcgaactcccgctgaagggcgacgatcgtgcgc

SEQ ID NO: 2820 - DNA, 3903 bp, Zea mays
  Clone ID: TF_ZmC27529_1
gaaattgaaacagctccagttcataatgcaaaaacagttccttcagaagctggtgctatatctcctgtagtcgctgagggtaaggcctgtgcagctgctgatcttagctcattgaaagcttctgaagaagctgggtctcaaaatgatattgacaatggcaggctggaaacttcttcacgccaagctaatgctgattccatgaaattagaaattagtgatgacctaccagtgaagaaatggacataccatgatcataagtctgatttgctcagttctgtcacatctgcaaatagtgctatagccaaagaaattaatgaagtgctatttaaatcattgcctgctgatacacctcgccttgatttgtttgcatcaagtcatcttctgagccaaaggaagagtgatttgattgtcaaagaaaggcttggagtatgtaaaaccaggctgaggttgaaagagcagatgcttacaatgaagttcaaggcatattgtcacttgtggaaagacgtccaactattttctgcaaataaacagcgttcaaagtctaataagcgcactgatcagagcaaccgaacatcacaaattggatctcagaggcaacgctcctctaaccgctcgcgattaaccatgcctgctggtaatttaagtacattctcaactccagaaatgtcagatgttgcaatgaggttgttttcagagttcaaaattaagcggtgcagaaattacttgaaaatgcctgcactgattattgatgagaaagagaaggaatggttgaagcttatgaacaagaatggtctagttgaggatcctgttttagttgaggaggatcggatgatgataaatccgtatactaaggaagagaggacacgtagtaggacgggaagggcttttgaggcctagctctcgccctacaagctccgatggtgttcagaaacaaaagcggcctggtgatgtcaagttgtttggacagattctcagccatcagtcaaccctgcagagttctggcttgtcttgctttggtaacaagagcaagcctccctcaccattggacgacacttctgacataaatggaatcctgagtcaaatgctcgttcgcgtgatatgcttggggtagcatcagtaatagcagcccatggccttgaatatgcaaaacaagtggagaaaatttctgcgaaatccctcatccggactgcatatgggcccagtgtgacttccgtggctaataaatcttctgataaggagtgcattgaccatgtgcctttgcacgagagagaatctgtagcagctgatgtactagcaggcatatgtggcactctctctcctgatggaatgggctcatgcattactagttctgctgatcctggacagaagattagcatgaaaagagtggagcatgtcttgtcccaagaaaatgacaaaaccgttgaggaggaagacacactctctgatcaagagtgtgaagttgacccagttgattggaatgacgacgagaagtcaattttcattgaggctatgaataactacggaaaggattttgctcggatctcgtcatgtgtgaagagcaagtcatatgaacaatgcaaagtgttctttagtaaggctcggaaatcactcggtttggatttgatccatcaaggggcagccgatgttagtatgccagctagtgataccaatggagggaagagcgatactgatgaggcctgcgctgtggaaatggattcagctatctgtagcacacagtcatgttcaaagattgcgatggatgtttgtcctactgaaggagccattggagggcctaactctgttataatctctaagcaggcagaagcatatatatcaaatgggtgcaatgctgatgttaaaattgaggaagatgagaaggtagctgataaaaattgcagcattgttgatgataagaggtccagtgatgctactcacgaagctggtcctattgacatcaattgcccaggaagcacagataagctgcaaggaactgatgatgtcgttgacctagtaaacatgcatagtaatagtggcatcagctcttcagctaagcatgcagtggccattcactcggaaatgagatccactttacattctgtagaggtccttcaaacagacaaaggtgaaggtactggtactgatttgtcctgggtggaagaatgttcacaccatgctctggataacacaccaatgaaaaatggaaattctggtgccccggctttcttggcttcagatagtggtatcaaggacaatgttcgcatctcaaacataactgctgcttccaccgttagtcctgcattcacttcaagttatcagcattctgtacctggagatatgcccctgccaaaaccaaagccacttgttaccccgcttaccccaaaggatttaatgcctgtgcagttcagttcagtgcttcctgaccccactgcaattcgtttcgagggcatagcctcaataactacgcccaacttcgaggacactggcaacagagtcagtggtgctctaggggctaaagagatgagcaagtacccagcttttagagacccatctggtaatcagcaaagcaccttgttttgtaatattgatggttatatgaatcatcgtctgacaactgaattaccatttttttctgaaagaactgcgagtggcactgtgaatacttcacaggcggatcggttgacccaaacaaaattgcagaatggcaggtccagcagcttgtgccttcaaaacaattccgatggcattcaatggcccagagaccacgaaggaggactggaaggctctttgaggccttgctctcgcaatacaagctccgagggtgatgagcaacaaaagcggcctggtgatgtcaagttgtttggacagattctcagccatcagtcaaccctgcagagttctggcttgtcttgcaatggtaacaagagcaagcctccctcaccaaagatcgacacatctgtgagatccatgaacaatccaatggaccgtgtggtttgttcttccaggcctggcaccactccacatctgggtctggaggaaagattggcaaggtgctatggtcatctggatggtagcacggcacagcccgagccactgctcgtgatggcaaagcgccagcggtccttggccggcgtacagttttactcggctaagaacggcacgcttggtgtgttaccagattaccaacaaccttcgacgcagccacagcaatcagatcccaagcgtgtggaaaggttgtctgatccgcagaagaggaacgtgctggaactcatctcgggtttccagcagcccggcagagtcgcccgtttcgggggtgctggcatcctcgtaagcggcaacgtctcggaccctgtggctgctgctctcaaggctcagtatggtcccggttctaagattatgggcagcgacgtggatccttggacggacataggaagcaggtagcgccgtagcagctctactgcttctgttgctccttgtaccatatatttagttttggtgtaacttgaatgaaatcatcagaatatgagatgtggggggtggggagtgaatggctttcctgcccatactatctgtaggcttttggccagtagcagtcgggtttcgctgtttactggcattaacatttttactctttcttctgcagctccatacccttttggtatagcttgacatgccagcagtggcacagtgccgtaggttccctagaggtgaactagatgtttgtcagcatggtttgattttgccagcctatgcagaaaacctcacttggtctttgtaatgtggtaatgccatgtatcagtatcctagtctgatggagttttggttgagacagttctcattaaaggttctgtctagcttctggaacatcattgacattataatacgtggattaaggcattggccggc

SEQ ID NO: 2821 - DNA, 830 bp, Zea mays
  Clone ID: TF_ZmC42_15
ggccgcttttttttttttttttttgtgcagagtggtattggatttctactactggagccgtgaccggaggccgtctatcagtgaacagataaacagagaaagcggccatggttgagagttgagaggccacgaaccccaccaagattccacaaaactcaatcaccagaataaactccagccacttcggcatgcgccgggaatttgattcttctgcctaaaatagtcacgctaccttccacctccccctactactctccctcgtcttcttcgctaccaagatgatggcggaggcgtggacgccggtgctgttgccggcgacggcgccctgcttctggcagcaggacacgcactcggttttgtggcggagaggagacgcgtggacggtggaggagaacaagctgttcgagaaggcgctggcgcagatcgaccggaacgcgccggacaggtgggagaaggtggcggcggtgctgccctggaagacggtcgacgacgtgaggagccagtaccacgccctcgagaaggacgtgggcgtcatcgaggccggcgggctcgtgccgttcccgcgctacagcggctcggtcccgccgccgtccgggttcgccctcgaggactggggcggtggcgaccgcgggttcaggcgcgcgcgcggctcggaggagatgcaggagcggaagaagggtgtcccctggacggaggaggagcacaagtaagtaggcaacagtcccaccagcaccccgtcgccgccgtgctgggacgacgacggggtcgggtaggggtcgatggatgggtcgggtccgctcgccttttcccgatctgcaccaagcgacccg

SEQ ID NO: 2822 - DNA, 2080 bp, Zea mays
  Clone ID: TF_ZmC10388_1
ggtacctcgaggccggccgggccggaggctttcttctcttggcgcgcctctcctccgtcgcggtagggcagagccaaaccctaaccctagcttcccccattgcgccttcctcgtgaggccgtatacatggacgcgaaggacatactagggcttccgaagacccccttctcgtcctcccaggagaagaaatcgcggccgcccaaggagccgcagcgcaagcctgatggcgtctcgcgcgaggtctatgccctcaccggaggggtgggaatgcccccgctcatgccgaccattgaggcatcgcacctgaagaggcggcctgctgcggagaaagagaaggtagcatggcagtggttacctttcacgtcatccgcacgaactgataaccttcaactctatcactgggttagagttgttaatggtattcagccaactggggattatcagtttgcaaaatataacaagagggcggatgttcttaaatatacggatgaagagtatgagaagtatttagttgaccctgtaggcttggagcaaggaagaaacagatcaactatttgaattatgtgaacgatttgaccttcgcttcatagtaatagcagataggtttccaactgctcgcagtgtggaagatctgaaaagtcgttactattctgcttctcgggctcttctaattcatagagctaggtcattcgaagatgtttctgggaatccccttgtgaaggatgcctatgatgctgctcatgagactgagaggaagcgtgcattatcagcacttctctcccaaacaaagcagcaagaacgaaaggacgccgagactttagcagaagcaaaacgtatcatggaatctcgtgctgctagcaaaaatgttgatgtagctgtaatgcctccgaactctgataatgctatggtacctgttgatggtgtatctccttcaagcagtactcatccatctttagcacatccaaatacatcagctaacatcttgatacctaattcactacgaacgcttcgagtgtatttgagaacccatgcgcttgaccaaatggtccaagcagtaggtgcttcagctggccttagagttatcaaaagggttgatcagacactacaagagctagcggtgaatttgaagcctaaggtcccaacgaaagcagtttgcatagagcatattgaactgcggaatgagctactcacattgcttaacctacaaaagcagctgcaaaataaagaggctgaagtttcagctaaccgggaaagttccttcacagaggcaccaagcacacctaagcgttctaatagggacattgatcggcccttcatccctgatacaagtgggtttacaggtgaaagagcaggcaaacgggatcacaagcggaagtccactggaagatttatagatgcgcctccatcaccaccccagtcgaagcggcctagaaaattgaagggatctgactgatagtgctgttcaaatgtcaggatgaaaactctagtcaaacaaccaagcacttgcagtcttacagtagagatgaactagtagaacctaataggtcagcaacggcatcaatggaaatccgttgggctggccagtcatgcaggaaccgactttcgctgcttgccctgacttcgggccatatgctgggtggaccggttttggatttataatgtatctatctattattgtcatgtaatgttacacagataactgagaggtcgaaatcgtcacttttcagcagatttctgaattctgagtatgggagaccggtaagcccgacaattccgtttttgctcctgtccaaccagcacggtcaatcggttcacccaatagacgttcaacaaacaggctttgagagcacgctagtgcctgtttgttcaccatgccttcccggaagctcatctgacagctcctttactttgtttgggtactctattatttatcttaatctatatatattgaggtggattggggtgtaaatttgttaacttacacctcaatacatgggtattgggatgaatactagagtatccaaacaaagccagggtttgtttagtttgattggattggagtggatattgaagattataa

SEQ ID NO: 2823 - DNA, 790 bp, Zea mays
  Clone ID: TF_ZmC602324_1
ggaccctcgaggctgccggacggggggatccagaaaagcccgggtccactgctcctctcgtactcaacaaccctcacaccccccatggatcccatgttcagtagcgagtggagtgtctccgagatcaagatggcaaaatcactcatcgctagccgcaacaccagcagcaacttagctagcgacgacgacgcaagcaacaagaagcacagcgacatcgtggacgagctccaagcaaggttcccatggaagggcaagcacgaggtaattggcttgtatgttgacctcacgatggagatgataaatacaccgcctgaggtgggagatgacggacttgtgttggacgacgacaattttgggatgccagtggaggaacaaccacagatgaaatacactgggaggttttggaccagggaggagcacaggaatttcctccgtggcctgaacatgtatggtcgtggtaactggatgtacatctctagggacttcgtccccactaagacgccaatgcagatctatagccatgcacagaagttcttccgtaggtaggagcgcacctgcagctggaagcaacgccatgatatcaaatgatattggcctctatgatatgctgagccctagacaaataacggctcttagtttatctcaagatattgtccattatactataaagatatccttcctcggcagtggacggacatcaataacatgtactagttgttatttgtcgtttagtttatcctaagatgcatagggacatatatcccattgaaggacatatatatatagttgc

SEQ ID NO: 2824 - DNA, 514 bp, Zea mays
  Clone ID: TF_LIB5025-072-A1-XP1-D8
gccggccgttccgagaatcttcttccgtttccgtctcccctcttctttgttacaataaacaaccaatcgaagccccaggcaacatcgaccgactagagtagatagagctcagtggcggccgccaagaaacacctgcgccctaaggcgagcagcggcaggcataggatgggcaggtccccgtgctgcgagaaggcgcacacgaacaagggcgcgtggaccaaggaagaggaccagcgcctgatcgcctacatcaaggcgcacggcgaggggtgctggcgctcgctgcccaaggcctgtagctgcaagtccccctcgccggcggcggcggggttccggtttctccggccgctcgaggagggccagtacatataaggcaggcgtcgtcgatcacagtaggccggcagaagcaaacctgtaaaaacaaccacagaacagagtttctaatggagatgatgactgatgtggatggatgatgagagattgagaacaaaaaaaaaaaaaaaaaaggccccta

SEQ ID NO: 2825 - DNA, 1062 bp, Zea mays
  Clone ID: TF_ZmC87815_2
agctaaaaacgacttcagtccagccatccaacaagaagatcagtctacacataaaaccagagatgtctgggtccaggagctcttcgtctcacaacgttaccattgattccgagtggagcaaaaaggagaacaagctgttcgaggaggccctagcctgctacggcgcgggcacacccgaccgctggcacaaggtggcccgtgccatgggtggcatcaagacagccgacgaggttcgccgccatcacgagatccttaatgaggatgtcacgctcatcgaatccggcagagttccattccccaactacaacacgcagggagcttggaactaaggagtgaaggatgatgtgaagaaccaccagacaggaactactgctacgcatgaaatagatatcttagccattgaagtaaatgtgctgatatattgtgttaagaagtttatgattgctcaggtaataaataagaggaggcaacgttaacactgattgcaattatagcaaaaaggagaacaagctgttcgaggaggccctagcccgctatcgcgagggcacacctgaccgctggctcaaggtgtcccgtgccatgggtggcatcaagacagctgatgaagtccgccgtcattatgagacccttaatgaggatgtcacactcattgtatctggcggaattccattccccaactacaacacacagggagcttggaactgaggagtgaaggatgtgaagaaccaccatacatgaactagatatcttagctattgaaggaaatgtgctgatatgttattgtattaagaagtttatgattgcttgagtaagaaataaaagaagctagagaatatacataattgtgttatgtgtaaatagctatagactgagcaaatcatcagttatgctatagaaaccagggaaccctctgtctgcccatagctaatgtgtgctgtgcaattatggtcccctatgaatgaatgcttgtacagtaaagagtgatgtaaaactcttgtactagtttgctgattaaaaagttgtgcttggtgaaaaaaaaaaaaaaaaaaaaaaaaaaaaaaa

SEQ ID NO: 2826 - DNA, 2051 bp, Zea mays
  Clone ID: TF_ZmC9414_14
ggaccaaaatttacaacttaatccaatagtaatttatttttcttctatttagcgcttgttcgtttttctctcaatccatgtggattggatgggtttaagttaaaatccttcatatttttttccaatctcatctaatccacatgaacaggaataaccgaacaagcccttatatggaccacgaggtggtggatgttagaggctataagggttcatttggtgacaagggatcactgagggattggaggctctcaatctcctccaatcccttcatgatacctagtcaccaaatcagccctaaaagagattctttgtatcccggatgcaaagaatttttttttcctaaaaactaccccctgtcatgcagagctagaccaactcagatattcacgctcgcatccatgtttaacataaactagtaccaatcaaaaacatccccaagatcatcatcaccaccatcatttccaagatcacgctcttcttccacatcatccatctgttcgccatgctcttcttccacatcagccatctgtacgtcatgctcttcgttcaaccaatttgaactattttcctcctcgtttaaatcatccagtacattctcatttccagggcctctttcacttgatgcaccatcttgtttttgtgtacttttaatatctggcagcacaacatcttcaatgttgagctgcttaattacctttttgaaatacaaattatctcctgagcgatgaactatagcatcatggactagcaatggattttttctctcctcagatttaaatttctgccgcacctgatggcgagtcttatcagggaataattgttgtatcattgcaaaatcgataccaaattgtcgaagaccctcataaaacaagtcggtatctgattttgaccattttccccgggctggtttgttcatgtaggaatggtagttcaattttgttgcattttgtacatgctcctctgttatatcgttgtcaaagaacctagcttcctcatctctgtagcccaaatcatccatatcatctagttgaaagtttcttgtattagaggatggcccggatggaatcccttttggatcaacacgctctctagcttcttgtaacaacctgagatgtgatgcacaaagcttcatgggttttatctgctcacgaggtgtttccagtaaagccttaacctcttttggtatcctctgacgtattctgtgggttagcttcttctcaggcttctctgtcgattcatccttcaaggtccgtttgcggccccgtgaagacaccttgcttttatttttttgagctttctgctgctgtgactcttctacaccaccccttgactttttcctagccttatgcttattaccagtagtgtaatgatcaccagtatcgttatcttcttcagctaatgaaggttcgacacagtcttcaccaaaataatcatcaacagtgtgattaggtgtcccaactttttgcacctttttcctgcaacgtcgtttcatagatgatgctctttctccaacatccgattttggttgctgttgaacagcatgatctagtggctcccgctcatggtcctgctcatttgaatattggtccttggtaatagaatgcttttcagcgatatgacgagatgagttacttaaattttcatcagtcaatttgtcactacaggaatcgccgatgttacccatctcagaattggtatctatagggctagctatcccagaaacatccgatagagcaaaagatacagattttgattttcccttttctcttcctgggacttcgccaaacattgattgagtaccatcaataggaggattaattggttcattgtgattgtctaaatcaacatcagcatgcacagcctgtggtgaccaagccactggaccagtgatggtttcttgatctttaggttctttgtacatgtcattgttgctgtcacaaactccaactattggagcaacagcaacaacattaattttaatcgcagcaacctgggatgaagccttcccgagatttggttgcaaatcagaacgaaacttagctattgtttcc

SEQ ID NO: 2827 - DNA, 712 bp, Zea mays
  unsure (1)..(712): unsure at all n locations
  Clone ID: TF_ZmC2209_2
tcgcccacgcgtgccgccacggtccggaaaccataagagcttctgaagagcgaaatacttcagtctagacactagatacagtaagccttagcgcaccaacagaggatacttcaaatatgtctgcctcgcggagctcctctcccaactccatgtcacagtggagccagaaagagaacaagatgtttgaagaggcactcgcctactatggcgagggcacacccaaccggtgggacaaggtgtccagcgccatgggaggcatcaagtctgccgaggaggtgcgctgccactatgaaaatcttgattacgacgtcaagatgattgagtcaggcaatgtgccgtaccccaagtacaagacacagggattctggacccgaggttaaaaaaatgttggaggctcaaagaggcagaaaacaaagctctacggatccaagaaggaaccaaaggaaatccagctctggttggagaataaaatgatgaaccagtgtgtatatgtcaatatgtgtatagtatagtttatgatcaagtttatgtctgtctacctgtggttgtaggatcctagtgtacataagattgataaccacatgtattcattgtccccttgaactaaagttatggagggtgtaaagtctaaaagtcatgtatttatgcaaactaaaaaaacaatgcctcgtagcattcgttgcctcaaaaaaaaaaanaaaaaaagccccta

SEQ ID NO: 2828 - DNA, 1384 bp, Zea mays
  Clone ID: TF_ZmC2209_3
taagagcttctgaagagcgaaatacttcagtctagacactagatacagtaagccttagcgcaccaacagaggatacttcaaatatgtctgcctcgcggagctcctctcccaactccatgtcacagtggagccagaaagagaacaagatgtttgaagaggcactcgcctactatggcgagggcacacccaaccggtgggacaaggtgtccagcgccatgggaggcatcaagtctgccgaggaggtgcgctgccactatgaaaatcttgattacgacgtcaagatgattgagtcaggcaatgtgccgtaccccaagtacaagacacagggattctggacccgaggtaaagtccatggcacttcgaaagcaaactggaaacatataacataagggctttttttctgtactgataagcttttggttaactatatggatgtttgttggtgatagtcgtaagaagcaggcctcgggctaagagtaattcagtcaccatatcatattttttttatgaataggtcaacatgcatcgctatgccatcgatggctcaagaattcagacgctcgagcgtctgagtgttttatgttctttagctgttccattccatacatgggtgaccacatcaacattgtataggccaaattgcagacatccttgcctttggatctaattactcggtgtttgtccactaatgcccactaatagtctgggatccaaagtactatgacaaatatctcctacctccaatagaaaagtttggatcttgcactctaatccctcatgcatccagcttgcacccgacatgcagttctcatattactctaggagtcacaacttatgccaaaagggcatctccatggcctttttagcgtgtgactaggcaagctttgggtagttctttgttgtcctttcttttgttttttttttcaagtgggtgatttctggtagggaggtctttactaaaaagctatagtagcagcttcaaccgaaatcagtacaagcacatatcacatagtacaaattagaataaatgtttacaattcagagaagcttacggtgtgcatattgacttttgctttcaggttaaaaaaatgttggagggaggcagaaaacaaagctctacggatccaagaaggaaccaaaggaaatccagctctggttggagaataaaatgatgaaccagtgtgtatatgtcaatatgtgtatagtatagtttatgatcaagtttatgtccgtctacctgtggttgtaggatcctagtgtacataagattgataaccacatgtattcattgtccccttgaactaaagttatggagggtgtaaagtctaaaagtcatgtatttatgcaaactaaaaaaacaatgcctcgtagcattcgttgcctc

SEQ ID NO: 2829 - DNA, 493 bp, Zea mays
  Clone ID: TF_LIB3245-012-P2-N1-A9
tagaatagctatcacgcctcatgcacgcgtacgtaagctcggaattcggctcgagcactacgcggccatcgccgtacgttgagatggcctccagtcctcctctctatggtgtccgccagcgcgccagcggcgtcgccgtatgaccagtccagacgcggccgaatcgtaggaggaagccaacacgaaggtgctgaagccgtacaccatcaccaagtggcgggagagctagacggagcacgagctcaacaagttgctctaggccctgcagctatttgaccgtgactggcataagattgaggctccagttgggtgcaagaccgtcatccagattaggagtcacgcacaaaaatactttttgaaggttcagaaaaatagaaccagtgaacatgtgccaccttcacgaccaaaggcaacagctgcccatacatatcctcagaaagctcacaagactgaaccacactatagtctcaagacagagagatcttccatacat

SEQ ID NO: 2830 - DNA, 2297 bp, Zea mays
  unsure (1)..(2297): unsure at all n locations
  Clone ID: TF_ZmC395_1
attgggaccctcgaggccggccggaccctcctggcctcctgtcctgccctgcctttccccccgcatgctctcgctcgctctctcgttctcgtggttctcccgagtcccgtgccgctcgagtgcgccgtctgcgtctctagtggcgacgactgggcgaccgccgccgccgccctacgcaaggtgcccagctctccattttcggtcccttcgccggacacgagcacccgccaggataatatgttgtccacgcatgaggcaaatgctgatcagtttgatcttctttcttatggtaatctaaggggactagaggctagtagaagttctgaggaatctaattttggaaatgacttaaaggatggttcttcagtttcttctgagaacttcggctcctcttgtctgcctggcgagagctatcaatctgccacagtagatcatgaaaaacgacctctttctgatgtcaagacatgccaaattgcttgcaaacgtccaaagcaaacagatcactgtacctggttatattcctttgaggaacaccctttgaccagtgaagtgggaatatcttctccagctttatatgatggattggttgagatcaaacaaccaaatgacattcctgcaattaatggtgccacaacctgcagtggtagttcagtgatcccttgccgtaatcatgatcaatcaattttagtggaaaacttagacatacctgattgggcgacttccttccctggttattttgaagactgtgggccagttgttacatatagccatgttgatgacattggttcgcctagaaagggtgtgccaattggacctgagcaccaggctgacattccagaatggaggcccctaaactctatgattgtacctggtgcttcagagttttgtgctaatctggattgtagttctgcttccacttcagagtctgttcccagaggtgatgactatgtaagtgacaagtggatcaggtactgtgttgttccggtgacatgctgctcatctcctgttgactgggctggagacagcaaaatagattgcaactgcagtgacgagggttctatgaggtgttccagacagcatattattgaagcaagggataaccttaaaatgatcttgggacaggacaggtttcgtgagttaggtctttgtgaaatgggagaggatgttgctctgagatggactgatgaggaggagaagctattccaaagagttgttttcttaaatcctgtctccttgggcaagaacttttgggaccaccttccggatgcatttcctaataaaactagccaggagcttgttagctactattttaacgttttcatgctcaggaaaagggctcagcagaacaggtctgacgtgttggctgtggacagtgatgatgatgaactgcatggtgaacctctagctgagcgggtggaaggggatcctgcagttgagtcctctacacatgaacattctgtcagcaattctctgcccatggatgatgaccataaagagtttgaaggagcacagtttgatggatctttgtgtgagaagtcagtatacaatgcagtcgagtgcagacatctaccaaatcagatgcctgcagattcaaatacggtgaacactgcactagatgtttgtgaccaagataatggagctcagtgttcagagtttcacatgtcactgccgagcgatacttcaaacagtcttggggatcaaagtgcatctgtataggagatgttgtgtggacaaggctctttggccgtcgagatgtccaaccaagaccatgaacaacaatgaaatggataacacattcagtttggatctgacatctacttcagatgggtgctgttttgccatggcttggagttgtaaattcagcttcatctggagttgatagttcatgaagttgtacattcttcaactactatgtacttttcgcggcattttgttagcacacttggaactcaactgagcttccacggggttttgctgcccccaccccctaccccccatccccattcgagaaatcaaccttgttgtatgtaccatctgttgtattttcatcgctgtatgtccattcgagaaactgaacatgtagattgtaagagttgccactgtctggattacccgcggtggttttcgtttgcagaccgagtgctttcggaatcgattcatgcaaataatgtgctaccgacagactcccagttgaatccatttgaatgtgatacgtttgtcanaaaaaaaaaaaaaaggggcggcccgcccttttttttttttttttttttttttttttttttttttttttaaagaag

SEQ ID NO: 2831 - DNA, 878 bp, Zea mays
  Clone ID: TF_ZmC344_7
ggccgcttttttttttttttttttcgtgaaaacgatcggcaaatatattgggtatcgctgtttttctaaaactgttttcaaaaaaggaagcgccaatatctagatgatctttaattagtttgaacatgcacatacaatttcgcatgctcgatctattgattctctcattattactcgggcatgtactccccatgtcttggcgactagacgattagtcatgttattaatttcatacttactattctttcctatatgcatgttctcctgcagatggtcgaagattgctgccaagctaccgggcaggactgacaacgagatcaagaaccgctggaacacgcacattaagaagaagctgatcaagatgggcatcgatccagtcacgcacgaacccctcgaccggaagacaaccagcagcggcccggctacaacctctcagtcaaccaagtctgacgaggcgaccaaggagcagagcccgcagaacgacgacgccgtgataagggacgtgccggccgatggttgcagcccgacggaatcgagcacgaacaccgtgagcaccggcggaagcagcagcagtggtggcggcggccatgaccaagacccgctggtgaagtggcttttggaagaggagcctgccaccggcgacgaggcgtggctgaacttcactggcagtgtcgacgtggacgagttcagcagcattgccgccggtccggagttgttgccgtgggatggcgcgaccgactggctgctcgactaccaagattttggattgggggactcgagcttggtcgatggctacatggtcaacaacaacagctcaaacggagcaaagttctagctagccagccgaagatgtcatctcatctgcttgtgtgctttcg

SEQ ID NO: 2832 - DNA, 1414 bp, Zea mays
  Clone ID: TF_ZmC42_33
aagcccggcccaatcgccggctgacactcacaagaacctgcctccctcggtctggatcgctatctcttttctagcggctccagagggagggaaagctagcgcacagccgagagaagaaagcagagagggagggagaacaaagagagagagaaaaaaaaaaaaccagagaggttgagcaagaaccgaggcggatccgccttttgtccctcctgcccgagggctagcctgccgccgcccccgcgagagatcgagaggaggcgctgttcagttcaggggggtgagaagccgtgggggaagagatgatgcgggagacgtacatggacgtgctgccgccggtggaccacatagccgcctcacggagcggcggctggttcccgggcgcggcgcgtctctggacggcggcggagaacaagcagttcgagcgggcgctggccgggctcgacctctgccgcccggactgggagaaggtggcgcgggccatcccgggccggacggtgcgcgaggtcgtcagccacttcaagagcctccaggtcgacgtccagcagatcgagagcggcctggtgcccatgccggtctacggcgccggggccggggccggctcgttcaccctgcagtgggacggctgctacggccccgcggactcgaggcacaacggctaccgcttcggaagcggaggctgcgggaggcggcaccacggccgcaccccggagcaggaccggaagaagggcgtgccgtggacggaggaggagcacaggtcctatatcctatatgtggtgatgatgcgagagctccaccaaacgcctgtgtgagattggcgatgtgagtcagagttccactacctcctcggcgtctctctgcatcagctttcgcagctccctttttggccctgctgcttcccttgctcggaaaggcgtctgcggatccttgtgcgagcaccaaagggcgcttctctgtaggctgtagccaggccaagccccaaaaaaaaaatgcagccatcttcttctcttctgtgggtggttgctcgtgctttttctggctcctcgctctgcaagttgcagcgaaatgcagaacacgaggcacccactgatgatgatggagatggagggcactgttccagagaaggaagcttctggtgcgggggtgtgtgtgtgtgtgtgtctatctactgctgagcttgccgtcagtgctgctgcagcaagatctgatgaaaagcctggaattcttcaggctagttgccattgccagtcccagtcccagtcccagtcaccttctcatctctgatgtctttcagtccacatgattcagttcagttcagtgaacaaccgccgagacgatgttttcatcatcattattgtcgtttcgtcgccggaatagaagtaacttctgttctaaaaaataatttccttactttaaa

SEQ ID NO: 2833 - DNA, 1163 bp, Zea mays
  Clone ID: TF_ZmC29713_8
tgggtacctcgaggccggccgggttcaaggcctaaaggccgagcagccccagccggctgcggtgaagctacggcacctcggtgccttcagctgccttacgggagtaaggcagaggctggcgcataggcggtggttgagagcagcagcgacggcgttcttcgtacgccgatttctacggctcgatcttccgctcttctcgctaatctatttgcctccttcgtttctcggctccttaaaggatgggcagtcaacccctgagcgacaggctgcaaaacaccgtgatacaacagcgcaccggtcttgatgggaaatggtgttcaggcagcagttcgaggtactggacaggtctacctgaagttatggcgttggttggcgtcctgtccatttcgctttgctgcctcgccatcaccgccggccggtggtccctgatcgccagccacctccccggccgaacagacaacgagatcaagaactactggaactcgcacctcagccggcagatccacacgtaccgccggaaatacaccgccgggcctgacgacaccgccatcgccatcgacatgagcaagctgcagagcgccgacaggcggcgcggcggcaggaccccgggccggccgccgaaggctagcgccagcaggaccaagcaggcggacgccgatcagcccggcggcgaggcgaaaggcccggccgcggcggcgtcgagcccgcggcacagcgacgtggtgaacccgggcccgaaccagcccaacagcagcagcggcagcacgggcacggccgaggaggaggggcccagcagcgaggacgcgagcgggccgtgggtgctggagccgatagagctcggggacctagtctggggggaggccgacagcgagatggacgccctgatgcctatcgggcccggcggccacgactcggctgccctcgaagggcttggcgcggtcggctgcgaggcccaggtggacgacctgttcgacatggactgggatggcttcgcggcccatctgtggggcgggccggagcaggacgagcacagcgcgcagctgcggcaggccgccgagccgctggaagttgctgctgctgctgctgctgcgacggcggcccgcaccccggacgatcgcgagctggaggcgttcgagacttggctcctgtccgactcgttctga

SEQ ID NO: 2834 - DNA, 129 bp, Zea mays
  Clone ID: TF_6165769
accaactacctccgcccgggcatccggcgcggcaacttcacgccgcgcgaggagcgcgtcatcgtccacctccactccctgctgggcaaccggtgggcggccatcgcgtcgcatctcccgcagcgcacc

SEQ ID NO: 2835 - DNA, 709 bp, Zea mays
  Clone ID: TF_LIB4742-048-R1-K1-D6
ttgggtccctcgaggccggccgggatcgatctatcccactcaactcttctaactgcatgagtaatctgtttcacgtacgcaaacattctgcttatgttagtggatggaatgaaacgcacacaggtggtcgctgatcgccgcccagctgccggggcggacggacaacgagatcaagaactactggaacacgcacatcaagcgcaagctcatcgcccggggcatcgacccacggacgcaccagccggcgagtgccgccgcagttgcccccgccgccgccgccgccgccgccgcgcaaagcagctttcgccaccatggcgacgacgaggcggtggcgcggcgcagctgctcgcgagacagcggctgcatcgcggcgcacagcagcgacgacgacgacagcacgtccgggtccctgccacaccaacatgctgtcggcggcatcgacctcaacctctcgctaagcccaccgacgagccaaccgtcatcgccggccgccgccaagggagttgtagctagcggatatggccaagggagtgagagctagctgtacctcctctgcactgccacgatgatggttgtcaattgttgttagctcctcctcctcgtcttatgttcttccatgcaggccggaagatcctaaagagaacgtgtgcgtgcgtgtgagaattaaactcgtgtctgttgttagaaaaaaaaaaaaaaaaaagcggcc

SEQ ID NO: 2836 - DNA, 908 bp, Zea mays
  Clone ID: TF_ZmC14429_2
tgggtaccctcggggtcggccgggaatccggaggatctggtaagcaactaagcaagtgtactgaggacggaggcatcgatccagcgttccagctagcacgcacgcagccagcacccagcacccagcagtagaatctatatatcgtacgcaagtagtggatcgaggcatctatctgcagtccctttcttcttcttcctcttgattgataggtgcgccgaagcttgttttgttgggtggcctttgtctctgtcgtctcgtctcgtctcgtcttccgcccggccgccaccacctgcaggctatactagctagctattaagtccggccaaccaagcagctcgatcaggtcggtcgacggcggggacagttcggagggaggaggcggccggagaccgaaggacgcctaccatcaactcgcggtcctggccgcgctgccgaaaaattaaaggaagaggacgaaggctgaccgatggacgatcgttatcctcatcatcagtcgtcgatggcgacaccggcagcagcgagcaagatgagcaagaagctgcagggcggtggtgagcgtagtagtggcagtagtagtaggggcagcggcaacagtgataagcagcagcagcagcagtgccggcggcggcgatgaggaagggcccgtggacagaggaggaagacgctcagctggtatggttcgtccgcttgtttggtgaacgccggtggggatttcttagcaaaggtctcaggtttgcgcggtggcgggtgcatccgatccccaagcatgcatgcatgcatgcatatgtagatgcatgcgtgcgtggggatggattgatgtaagaatgggctatggcgatgggtgttgattaacatttcttttctctctctctcttggcgtgccctgcttcttctctgtgcatgcgcat

SEQ ID NO: 2837 - DNA, 129 bp, Zea mays
  Clone ID: TF_6165743
accaactacctccgcccgggcatccgccgcggcggcttctccgaccaggaggacaggctcatcgtccacctccaggcgctcctcggcaaccgctgggccgccatcgcctcctacctccccgaccgcacc

SEQ ID NO: 2838 - DNA, 687 bp, Zea mays
  Clone ID: TF_LIB5117-013-A1-PF1-C4
ggataaactccggccactttttgtagccgcccggaatttgatactcccccggtcctcccctatataggcatgcctccttccacctctccccttcgccactttcctgccttcctccattgctcgccgcccttaagccagctcaggtagcaactagagccgacatgatggcggaggcgtgggtggacgtgctgccgccgccggcgccctacttcgccgggcagccgtgctgggccgtacagcaagagcgtcgtggaggcggcgcctggacactggaggagaacaaggtgttcgaggaggcgctcgcggcgatcgacctggacgcgccggaccggtgggagatggtcgcgctgatgctgcccaggaagacggtcgccgacgtggtgaaccactaccgggccctcgagaacgacgtcgggttcatcgaggccgggctggtcccgtttcctcactacgacagctcgtccccttcgtccgggttcactctggactggggacggcggcgccgccggcgccggcgggttcaggcgcggctactgcctcaagcgcgggcgcgccgaccaggagcggaagaagggcgtcccgtggacggaggaggagcaccggctgttcttgaaggggctgaagaagtacgggataggcgactggaggaacatctcgcggaactacttgacgagccgcacgccgacg

SEQ ID NO: 2839 - DNA, 509 bp, Zea mays
  Clone ID: TF_LIB3732-036-Q1-K6-G4
ccggctgcggaggtgctgcgggggtggggggggaggtaaaaaaaaagccccttcacgcccggagaggaccccgctatcctggcccctcacgccctgctgggcaaccggtgggccgggctctcgcgccttttgccggagcgctcctacaactccgctaagaaccactttatctgggggggggggctgaatctcgccaccgactcggcgacctccatcggcgagggagtgctgaccatccgtgcaagcgctcaacccctggcccggggagcccatcagcgtctgaccgaaacgacctcagccactgctgcagcaccattcacgtgttccttcccgtgccgcgcgccctaggcttcaacgccatcatcgccgaaaacgttcgccctcttttctcgacagcaatcctagacgatgacccgctcaccatcctctccctctcgctgccggagctggaccattcgccttctggcttccaccactacagcgcccggagccactttcaggagctctcc

SEQ ID NO: 2840 - DNA, 676 bp, Zea mays
  Clone ID: TF_ZmC344_3
gctggcggtcgctgcccaagcggcgggcctgctgcggtgcggcaagagctgccggctgcggtggatcaactacctccggcccgacctgaagcgcggcaacttcaccgccgacgaggacgacctcatcgtcaagctgcacagcctcctcgggaacaagtacgtgcgcgacgcctccgccgctgctctgctccgtaccgtagtgcactgcacgcggacatgcctgcctctagaagtctagaggctggttggttgcctgccttgccttcgtcggcctcgacgccacccaaccaaaccaagctgaacgaacgtccggtccgattgcctctgccctctgcaggtggtcgctcatcgccgcgcggctcccggggcggacggacaacgagatcaagaactactggaacacgcacgtccggcggaagctgctgggcaggggcatcgaccccgtcacgcaccgccccatcgccgccgacgccgtgaccgtgaccaccgtctcgttccagcccagccccagcgccgccgccgcagcagcagcagaagccgaggcgacggccgccaaggcgcccagatgccccgacctcaacctcgacctctgcatcagcccgccgtgccagagcggggaggaggaggaggtggacctcaagccctccgccgccgtcgtcaagcgggaggttctgct

SEQ ID NO: 2841 - DNA, 667 bp, Zea mays
  unsure (1)..(667): unsure at all n locations
  Clone ID: TF_LIB3592-067-Q6-K6-D3
ggnacggntcatgataaatccgtggactcaanaacgaaaggnaaatttttatggagatgcttgctaaatttggcaaggatttctccaaaatttccagtttcatcacacataaaactactgcagactgtgtggagttctactacaagcatcataaatcagacagcttccgagaagtgaagaaactgttggaccttcatcaacagctgcctgccagcaattaccttggagcgaaatcaggacagaaatggaatcctgagtcaaatgctgcttctcttgatatgcttggggtagcatcagctgaagcagcccatgaccttgaatatgcaaacaaagtggagaaaatttctgtgaaatccctcatccggactgcatatgggtccaatgtttcatttgtgaccaaaaaatcttctgataaggagtgcattgacaatgtgcctttgcatgagagagaatctgtagcagctgatgtactagcaggcatatgcggcactccttctcctgatggaatgggctcatgcattactagttctgctgatcctggcctgaagatcagcatgaaaagagtggagcatgtcttatcccaagaaaatgacaaaaatgttaatgaggaagaatctctctctgatcaagagtgtgaatntgatccagttgattggaatgatgatga

SEQ ID NO: 2842 - DNA, 129 bp, Zea mays
  Clone ID: TF_6165689
accaactacctgcgcccggacatcaagcgcgggcacttcacccccgaggagcacaactctatcctccagctccacgccatcatcggcaacaggtggtccacgatcgcggcacagctgccgggccggacg

SEQ ID NO: 2843 - DNA, 792 bp, Zea mays
  unsure (1)..(792): unsure at all n locations
  Clone ID: TF_LIB4758-049-R2-K1-E6
cccgctcctgcgctacgctggagaggagtcgtccgccgcgacgcccgagggctccggatccgccgcctccgcgcccaaggacgctggaggaggaggaggaggaggcggtgggcaccgacgcgaagaacggaagagcggcgtcggcgttgacgtggggaagagtagctctaaggctgagcaggagcggcggaagggcatcccgtggacggaagaggaacacaggttcctagcagatctccacgtgttctcgccttcaaaagcttacacctttttggtgggtgcaggttgttcttgctgggtctggacaagttcggcaagggcgactggcggagcatctcgcgcaacttcgtcatctcacggacgccgacgcaggtggcgagccacgcgcagaaatacttcatccgtctcaactccatgaaccgggaccggcgccgctccagcatccacgacatcaccagcgtgagcgcgggcgaagtcgccgcggccggcgcacccatcacgggcggcccaaccacggcgggagcgatgccgatgggtcccgcgggcatgaagcaccaccaccaccacccggctccgccgatgggcatgtacgggcacgcgcccatgggccacccggtctcggggcacatggtggcgccggcggnccgtcgcacgcccgttatgttcccgncgggtcatcactcgccctatgtcatgccagtgggatacccggcgccgnccgggcagatgcacccatgatcatttacccggcatttgcacatctgcagagctgcatttcggtgcttggtcttt

SEQ ID NO: 2844 - DNA, 817 bp, Zea mays
  Clone ID: TF_ZmC42_27
atcacctgagtagatttgcaacttgcagttaatcaactatcaacaattattgcatttaatccggggggaattttcgattttctttatcgagtagagatctgactctctcttaaacagacatttactgaagaagatcgtcatgtttctgttcttccaggttgttcctcctaggcctgaagaaatacggcaagggggactggaggaacatatcgcgcaacttcgtccagaccagaacgcctactcaggtggccagccacgcgcagaagtacttcatcaggctcaactccggcggcaaggacaagaggaggtccagcatccacgacatcaccacggtcaacctgacggacgaccagccgccctcgccgtcccagtcctccctgatcaccagccagtcgaacgcaccagctccagctccaggtccggctccggccgcagggatatgccaggtcccattggcggccgacgccaagcgacacggtgccagaactctgcccttcagctcaccgaacaggacctctgcggcgccggcctacaggatggagtttcatgaccaacagggcctgcagtgtggccctctgcatgatcagttgctcgccagccagagcgttctgttctaggcgcggtggcagcccaccctgcggcatggatcgaccaggtcaggtgcctagtgtataatacttgtggtatcgctgtagcttcagcgcctgtattgaagggattagccttttgggagcataacagaaaggaggtcttcatttcatggtggtccataatttgttggagaatgtaacaaaaggaacgccgagaattcgatgcc

SEQ ID NO: 2845 - DNA, 691 bp, Zea mays
  unsure (1)..(691): unsure at all n locations
  Clone ID: TF_LIB4978-036-R1-K1-C1
gtccctgtggcaattaatcccctcgccttcttaaccgccagtcctccgccacctctccacccaacaacaaaacaagcctaatgggtaatggcttcctcagttcctctccatctcacgccactgcgctgccctagaaccttcgccgccgcccctctttaggattaccgtgtccccgatcgccccctggcacgcccgccccgatcgccccctggcacgcccgcccggatcctgcaccggaattccgtgtggaattccggacccgatcgaaatcgaaccgcctccctgcgtgctcccctgatcaagaaattctcacgccgcgcgaacgcacgcctgaggcggttggatcctctggtggggttccttggtctcgatttngctgtgtgtggatgggggcgccgaagcagcgctggacgccggaggaagaggccgctctcaaggccggcgtcgccaagcacgggcccggcaagtggcgcaccatcctccgagactcggacttcagcgcgctcctgcgcctccgctccaatgttgacctcaaggtgacgctcggatcgccagggagggtgggcgggtgggtttttggcgatcagctgaggggagtatggaggaagtctccagtctttttagtgggttagactgaatgaaagaaaatcgcggttttgcacggtccgtacagcctgacgtgttcttattt

SEQ ID NO: 2846 - DNA, 457 bp, Zea mays
  Clone ID: TF_ZmC42_28
ggatccgactctctaggacagtcatgtactactagcttgttgcacatatgatggccagcaaagcaagaactgatcaaaagttagtagcactgaacaagatcacgttttttttgtggttgatgttcttggggccaggctgttcctcttaggcctgaagaaatacggcaagggggactggaggaacatatcgcgcaactacgtccagacgcggacgcccacgcaggtggccagccacgcgcagaagtacttcatcaggctcaactccggcggcaaggacaagaggaggtccagcatccacgacatcaccacggtgaacctgacggacgacgagcgggcgccctcgccgtcgcggtcctctctgatcaccaccaccaccagccagccaaacgcgccggctccggccgcagtggtgataggcggccccttctcgtcgtcgtcggcggcggcggccgaggcc

SEQ ID NO: 2847 - DNA, 1175 bp, Zea mays
  Clone ID: TF_ZmC11324_2
actcctataggggattgggaccctcgaggccggccagggagctggcggacggaacgacgacgatggcgaggagcggcggcgggatggaaggcaacaagtgggcgcgcatctccaagcacctctcaggaaggacggacaacgagatcaagaactactggaacacgcgcttcaagcgccggcagcgcgcgggcctgccgccctacccgccggacgtcgagcggcagatcaagctgctgcgcgcgcagaacgtcaacccgttcgcagacgcagacgccgacgccgcccacgccaacgccagcgccggccttccggcgccgccgctcctctacgacgtcggaaacccgttcgcgttgctctccagcataccgtcactgtcgcagacggcctcgcactcgcactcgccactgatcaaccagaactacccgcttctgaaccagatgcaggtgttccaccacctcggcggcagtcagcagccgtcgttccaccaggacggcagcgcggcggctttcggtgacatcgtctcctctcgcctgccgccactgccaaccgccagaacgcaggcggagctacattcgaaccaattcgacacctccatcagcggcgggctggtggatcagtcgatgctgatcggcgacgaacacctgctgcggcctaacccgagtatggtcaaggtctcctccatgcccgcgctctcctaccgtgagccggatgggtccaggatgctgccagcccatggcgccgggagcgacggcgacgtctcctcgctggggcaatgccctccgggacaggacctccaccgtggtgcgacatgggacttcaccttcgcggccgtgaagccggcgaagaggaggacggcgagcgaggtggggttctccgacatgttcgccgtcgcaccgccgggggattggttcggcggcgggtcgacggcgccatcgccggggccgtcatcggccgtcaccgacgaagagtttaacctggagatgcagcagttcatgtcaatgctaccactgtctgacgagcacggctggaacgcataatgcggccgggtaaaatggaaatcgaaaactgtgtagagcgtgtgtctccttgcttctgcgacgagaatggtgtgcgcattgtttttgtaatgtgcccactcttggatctttatctgttctagacgtcgattgagtttc

SEQ ID NO: 2848 - DNA, 1084 bp, Zea mays
  Clone ID: TF_ZmC5904_1
gccgagtgaactggacaagataccgagtagaatagaatagcgaagaagaaggatagcttgttggattgagttttgaacatcatttttctatttttactgatgcttatcaatttagttaatctcttggagttgctcttataaatgcgcggcgatcaacccatgaagcaaacctcgcatgcatggtggcgttcacgtggttgttggcgcggccatgatgctcttgctggacgaggagctggtcagcctcagtgccctcatggtgctcgctagcacccaagcctagctccagtggctccacgagccggtgccccttgtgctcccgccgttcttgtcgttgggtgccgagagccagtaggatgacgaaggcggggccgcagtgcctaggcagccaccgaagaactcgacgcacttgacgcggtggtgctggtcctgttcgtgttcctcgccgacgccctggtagcctagcgcgtccgcggccttgggcttggccgcttgggggcttgcagtgagactgtgggagtcgacgcggtggagcgtgcagccgccaaagccgatggagaggcgctccaggccaggaagtctcccgagaagctgtggctgtcgcagccgactgagcgcgacctcgccaccttccgtccgaacgacggcgatgacaacgagccctcggcccctcgctgcggcgggagggtgtgcgagaacagaaatacgtgagcgcccgcatgaaagaagggagatggcgaggcggacgagctagccaaagatgccgagtgaactggacagataccgagtagaatagaatagcgaagaagaaggatagcttgttggattgagttttgaacattatttttctatttttactgatgctcatcaatttagctaatttcttggagttgctcgattgtccattctctgaatgccaagtttccttttttttcccaggtggtccctgatcgccggtcatttgcctggccgaactgacaacgagatcaagaaccactggaactcgcacctgcgcaggcgcgggcgggcgggcgactcccgcgacgacggcgtcgtcgtcaacatcgacctcgtcaagctgccc

SEQ ID NO: 2849 - DNA, 1748 bp, Zea mays
  Clone ID: TF_ZmC9939_1
tgcttggggtgcaggtaccggactgccagtgtcggaccgacgcatgcgtccaggcgtccgcgaactcgcttctgagagtttccagatgatgatgagtacgacttggagcaagctgaatctcgtgaacataagagatggatggagaggcagaatgcaaagctacaagagaaggccaaaaaggtggaatatgcgcgagtgcgcacacttgtagacaatgcttataagaaagacccaaggatccagaggaggaaagaggaggagaaagctgagaaacagagaagaagggaggcgaagtatttggcaaagaaattacaagaagaggaagcagcaaaagctgttgaagaggaaaggataaggaaagaagaagagtctaagaaagctgcagaagctgctctacatcagaagaagctaaaggagaaagagaagaagctgctccgcaaagagaaaactcggttgcgcactcttgcagcacctgtcattgcagatagccactttggtctgtcagaggcaaatgttgaatcggcatgtgcttcacttgatatggaacagctgaagaagctctgtgatggaatggatggtaaggatgcagctggaaaggccaggttgctgagcaatgtacttcgcaatgaaagttcctcaaaggaagcaaagaaaattgaagggaatggtgtggagccttctgccccaaaatccaactctacaggaggtagagcgacagaaggcagtaacagcatattgaacagctatgagaaaaaagagagaccatggggaaaggaagagattgagatgcttaggaaagcaattcaaaagtatcctaagggaacatcgaggagatgggaggttgtttctgaatttattgggactagcagatcggttgaggaaattctcaaggccaccaagactgttcttctgcagaagccagactcatcgaaagctttcgactctttccttgagaagcggaaaccgacacaatcaattgcttcgcctctttcgacccgagatgaaattagttcaactgagggagctgggactgcatcgtcaaaggctgcagcacaatctgcgaatagccagacagccaatgagaaagctgctgctgatcctgtcacggatggaggaccatccgtgtcagatccagatgcctggacagatgcgcaggtcctggctctagtccaagctttgaaggcttttcccaaggatgcaagccaaagatgggagcgtgtggctgctgctgttccatgtaaaaccgtagtccagtgcaagaaaaaaagtagcggcaatgagagagaatttccggagcaagaaaagtggggagtaggctgaggcattgcctcactggaagtatattttgcaagaaagagtctggacggcaatatttatagaatggattcagcatcttagctagagaggtattgcttggcgaacctttcatctcatgccaccagtggtgaggataattttgttatggagctgtgacagctcatttattgtggctggccaccagggttgttttactttgagcagccgtagcaggatgccatcgaagctcatctattgttgatgggctgatggttggcaattttgccgcagtggttcgtgtgggattttgtttctgcaggctcctggggttgtatatgcgctgctgtaagccaatgaatgaattgtgagctattccaacattcttagagtcaattcatctcaggtttgatcaaatttatataataaaacactaatatttatgataaaaaata

SEQ ID NO: 2850 - DNA, 492 bp, Zea mays
  Clone ID: TF_jC-zmXLIB3527P015Be03d1
gggggcggcagcggcagcggcagcggagaggagcgccgccgcggggtgccgtggaccgaggacgagcacaggctgtttctggaggggcttgagaagtacgggcgcggcgactggcggaacatctcgcgctggtcggtgaagacgcggacgcccacgcaggtggccagccacgcgcagaagtacttcatccgccaggccagcgccgccagccgcggcgacaccaagcgcaagagcatccacgacatcaccaccccgtgatggctcctgctcgtggaggacaaagctagcaccgagagatccagacctggctactgctgctacctgcattttatctttacctttgcgagacgggaacaaaaaaaaacaaacagccgtccctgtggttgtagaaatgtaggcaaagctaagttagcctggctggaatctggggtccggtataactgtattaagcggcactacaatgactatcgaataaataagttttgcaagttt

SEQ ID NO: 2851 - DNA, 1797 bp, Zea mays
  Clone ID: TF_ZmC1981_1
cattgggtacctcgaggccggctgggatcgagtccaggccagcgaccgcgtttccgccttctcctccccttccacctccgatggccacaacggcgacaacgatggcgccggtgacggcgccggtggccacagccaacctcgaacctacaccaacacctctgcatccacgtcctgccgcgccacctcatctccgggcgctttccaccttggcccccgtcaagtcagaggctcctcccaccccctcgtcttctaccgccatcaccgccgcagccggagcggaggatccatcctacatcatcaccgtccctagttattcagcgtggttctcgttcgactccatccacgacacggagcgccgcctcctgccggagttcttcgtgggggaggccgccgcggcgtcagggtgccggggcccgcacgcgtacaagtactaccgcgactccttgatacggaggttccgggcgcggccgggtcgacggctcacgctcacggaggctcggaggggccttgttggcgacgtcggctcagtccgccgcgtcttcgatttccttgaggaatgggggcttatcaactacggtgctttgccatcggggtcaaagcaagctaaagagaagagggaagaggctgcacaacagtcctcgttgccttctggggcaattgcacccaggaagctctgtaccggttgccgcaccgtgtgtgggcttgcttactacgcctgcgacaaggcagatataagtctttgtgctagatgctatgtaaataataactaccggccgggcctgtctcctgctaacttcaagagagttgaaattactgaagatgcaaaaccagattggacagacaaagaaactcttcacttgcttgaggctgtcttgcattatggggaagactggaaaaaggtgtctgaacatgttagtagtcggtcagaaaaagattgtattgcaagatttataaggctaccttttggagaacagttcatgggacacaaggaggatagaatgaggtttgagaatactgatgacaatactgatgagcctggagcaaatgtctcaaaacgactacgtctcactccactagcagatgcaagcaatccgattatggctcaggttgcatttttatcagccattgtgggttccgatgttgcctcagctgcagcgcaagcagctatttctgcccaatcccgtgttgaccttaatgacggcgagattgaaacttcaataaatagcatcaagcaagaagaatcatctcacacaaatgggctctcagccaacgtgttactgaaagaggcagctgctaatgcacgggcacaactcgagaaggaaaggaacagcatagagcaatctttatcaaacatagtagacgtccagatgaaggaaatccaagataaaatatgccggtttgagcagaaggagatgctgatggagaaagagcggcagcagctccattttctaagggatctacttttcacagaccaattggcagtcatgcagcatcaacaaaggagtccagctgtagccacagagtgcaagggtgatgagaagccaaagcccgtggctagcatgagttgatacgagtagatcctcagcgtagcatggtttcacttcagatgtagcattggagctgcgttcatccgcatctgccgttgctgttaaatttgatggtgtttattggatggtgtttctgtccctttcccttcttgcaccacagatgcctggagtgcaagggaagttacgactaccgattaccacaaaaaaaaaaaaaaaaaaggcccctagggcctatctttgctggtggcgc

SEQ ID NO: 2852 - DNA, 1361 bp, Zea mays
  Clone ID: TF_ZmC5277_1
taaataagaattgctgacctcgaggccggccggggcgacacctcccaataaaaacgttcctccccgtcccactcgccggagcctggccgacgggatgcctcgagattcgcgcccagccgggatgcgcctcttcggcgtcaccatcgcgccggcgccggaggcggatccaccggtacgggatccgagccccaacccgcccgtggcggccagggaggacgtgatgcgtaagtgcaagagcatgggcaacctcgccgcccttggcgctgtcgtggacggtggaggaggtggtgcggacggcggaggcgccggcgacggctacctctccgatggcgggctgatgcagtcgtccgggaagcggcggagggcgcaggagaggaagaaagctgttccttggactgaagaagagcataggacatttcttgctggtcttgaaaagctagggaagggagactggaggggcatagcaaaaaattttgttaccaccagaacaccaactcaagttgcaagtcatgctcagaaatattttcttaggcaaactaatccaaacaagaagaagcgcagatctagtctttttgacatgatgccaagagagctgtcaccagcaccaaattgccccatattaccaccatcgatggcaaaagtacacgatgtggtagctatgacgaaacaacttcagaatagcaacttggaaggaacctcctcttcaaatgcagcatctcaagttggaagagatctccccccagttccatcttttaaggcaacaaatatggatccaagtttcagcaaatttagccacatggagcgcgtctggagaactccctacccattcggaccagttcccagagcccctgaagggacgccttcaccaacggctgctgctgctgctgctgctgctgcggctgccaatgcagctgttccggtctctcaagctaacctgacgactgcctgtactagtaacacattcttgagccagccaaagccaagtgatactccgtcactgcctccgaagggaggtcctccatcagaggaggacggtttggaactgactgttgccccaccctcccaacagaacatgacgaacatgtcttcccagaatgcggtaggcgtgatccaagtcatctaagctaatatattttattttattttatttctctctctctctctctttctctctagaagttactgtggctgttgacagttattgaccgaataaatattaacattgtattagcaatactacatgaataagaagagcatgaggtataagcccatcatttgccagtaaaaaaaaaaaaaaaaaaaaaaaaaaaaaaaaaaaaaaaaaaaaaaaaaaaaaaaaaagagggggggcgccgtgtacc

SEQ ID NO: 2853 - DNA, 585 bp, Zea mays
  unsure (1)..(585): unsure at all n locations
  Clone ID: TF_LIB3900-001-Q1-N6-F1
aattaagctatcgatgatcgatctcgtcttgatgtgctatccatgcttgaattagggttgaagaggaccggcaagagctgccggctcaggtggctcaactacctgaagcccgacatcaagcgcggcaacctgacgcctgaggagcagctgctcatcctcgagctccactccaagtgggggaacaggtggtcgaggatagcgcagcacctgccggggcgcaccgacaacgagatcaagaactactggcggacgcgcgtgcagaagcaggcgcggcagctgcgggtggacgccaacagcgccgtcttccgcgacgccgtccgctgctactggatgccgcgcctgctggagaagatggccgcgcaccaccacggcgacggcgagctgccgccgccactgcacccctcgcacaacatcgccggcacggcctcctcgcgctcgccgccggcccacggnagccagcaggaggacccgagtagtagcgcgccggcggccagcggccactacctgcagcaggtcgacccgagcccgagcacgtcgacgacgtccgggtcgacgacctcggccgcgctcccgccggtgccctgc

SEQ ID NO: 2854 - DNA, 399 bp, Zea mays
  unsure (1)..(399): unsure at all n locations
  Clone ID: TF_ZmC40061_1
ggtgatagtaaatgatcaatggggagacagccggctgtgacaaggagggggtgaagcgagggccatggacagcggagaggacaagaagctcattagcttcatcctgacacatggccggtgctgctggcgggcagtgcctaaactcgcagggctgcttcgttgcggcaagagctgccgtctgcggtggactaactatcttcgccctgacctcaagcgtggcctcctcagcactgccgaggagcagcttgtcattgacctccatgccaagctcggaaatagatggtcccagattgctgccaagttgcctgngagaacagacaacgagatcaagaaccactggaacacgcacatcaagaagaagcttgtcaagatgggtgtcgacccggccacacacgagcc

SEQ ID NO: 2855 - DNA, 858 bp, Zea mays
  Clone ID: TF_ZmC2941_8
gtacctcgaggccggccgggaaccaaactcctggtcttctcttctccactacccacccgcccgcccccgccttcttctccaccactgccccgccgctaaccaaccactcgtgcgccacaagtctcccgtcgtggaatagggcaaaggccaggcatctcgcttctgtcctctgtcgaggggatcggacccgatcggagaaagaatgggctcggaggcggactgcgacaggatcaggggcccgtggagccccgaggaggacgacgcgctgcggcggctcgtggagcggcacggtgcgcgcaactggacggcgatcgggcgcgagatcccggggcggtcggggaagtcgtgccggctgcggtggtgcaaccagctgtcgccgcaggtggagcgccgccccttcacgcccgaggaggacgccgcgatcctggccgcgcacgcccggctgggcaaccggtgggccgccatcgcgcgccttctcccggggcgcaccgacaacgccgttaagaaccacgacagcgcccggagccacttccaggagctctccccctcgtcgtccccgtcgccgcagtctactccacccgccttccctccgcaggcggctccgtctcagtcgtcgtacgcgttcagcggcgagctggttgccgcgatgcaggagatgatccgcgccgaggtgcgcaagtacatgtccggcgcggggctccgcgccggatgcgggcccggggccgtgggcgaggtgtgcatgccgcagctggtggagggtgtgatgcgcgccgccgcggagcgcgtcggcgtcgtcacacggccgtagaaacccggaaacggaccaaatcagatctgatcaatgcgaagcattgtgtt

SEQ ID NO: 2856 - DNA, 523 bp, Zea mays
  Clone ID: TF_ZmC8104_2
cctggccgggagtcgcccgccctctagccttcgtgccgtctgcccgcccgccgtctagtcctctcttcgttctcttcctctcgcgctagcagagcggaggaggaggagaccaaccgggttggtggacgtgggcgggaggtgtgtgcgtgtgtcgtccatggggcggacgccgtgctgcgacagggcggccgtgaagcggggcccgtggtcgccggaggaggacgaggcgctgcgcagctacgtccagcgccacggcagcggcggcaactggatcaccatgcccaagaaagcggggctcaagaggtgcggcaagagctgcaggctgcgctggctcaactacctccgcccggacatccgccacggcggcttcaccgccgaggaggacgccgtcatcatgtccctctacgcccagctcgggagcaaatggtcgctgatagcctcgcagatggaggggaggacggacaacgacgtgaagaaccactggaacaccaagctcaagaagcgcctcctggccgcagcggcc

SEQ ID NO: 2857 - DNA, 723 bp, Zea mays
  Clone ID: TF_ZmC3484_3
gcaccggttagtgacacgcgcgcataccgacggacttggtagctgctcaccagctatccagatcattggctcattgctgcttccattccattccccccctcggcatcggccgcgcccgcccgtgtcgggcggaggcggacgcgcgcgggaatgggacgccacgcggcctccggcggcggcgtgcagcagaagctgcgcaagggcctctggtcgcccgaggaagacgagaagctctacaaccacatcattcgctacggggtcgggtgctggagctccgtgcccaagctcgcagggctgcagagatgcggcaagagctgccggcttcggtggatcaactacctacgccccgacctgaagcggggcagcttctcgcagcaggaggaggacgcgatcgtcggcctccaccagatcctggggaacaggtggtcgcagatcgcgtcgcacttgccgggccggacggacaacgagatcaagaacttctggaacagctgcctcaagaagaagctgcgtcagcgcggcatcgacaccagcacccacaagcccgcggtctccgccagcgtgccggcatcggagcagccggtgtcgcaggaccgcaagccgttggccgcagccgccgctgatggcggctccgacatgaagcaccagcaggtgttcgacccgttcccgctgaccgacagcttcggcggcggcttcggcgccgcactgtacggccacacgggcggc

SEQ ID NO: 2858 - DNA, 813 bp, Zea mays
  Clone ID: TF_ZmC864203_1
atcttctcgaccctaccaccgctctgctttcagccagatcgatcgccacatgcacattccctagcggcactagctatatctctgcagctagctagctatctagctgggtaataactaacgtgtacgtcgtacccagctataggacggcaatgaggaaaccggagtgcccagcggcgaacagcagcaatgcgggggcggcggccgcgaagctgcggaaggggctgtggtcgccggaggaggacgagaggctggtggcgtacatgctgcggagtggacagggttcttggagcgatgtggcccggaacgccgggttgcagcggtgcggcaagagctgccgcctccggtggatcaactacctccggccggacctcaagcgcggcgccttctcgccgcaggaggaggagctcatcgtcagcctccacgccatcctgggaaacaggtggtctcagatcgctgcccggttgccggggcgcaccgacaacgagatcaagaacttctggaactccaccatcaagaagcggctcaagaacagctcggcagcttcgtcaccagcagctacggactgcgcgtcgccggagcctaataacaaggtcgccgccgccggtagctgcccggatctttccgtcctagatcatcaggacggtggccaccaccacgcaatgacgacgacgactgcaggtttgtggatggtggactcatcctcctcttgtacctcgtcgacctcgccaatgcatcagtttcagaggccgacgacgacgatggcagcggccgtggccagcgggagctatggaggtctcgtccccttcctgacca

SEQ ID NO: 2859 - DNA, 1831 bp, Zea mays
  Clone ID: TF_ZmC8091_1
tatactcgaggccggccggggtctgcaaccttcactcccgactccacctctctccgatcgtctcatcttcttccttctcttccaccacatccttggcatctcatccggatcgaccagtacacgccccagtagtactaaagaaccagtttctgagtaaaacatggcggcgtcgccttccccgtccggcagcggcggcggcaaggccggcgtggaccggatcaagggcccctggagccccgaggaggacgaggccctgcagcgcctcgtgcgccgccacggcgcgcgcaactggtccctcatcagccgctccgtcccgggccggtccggcaagtcgtgccgcctccggtggtgcaaccagctgtcgccgcgggtggagcaccgccccttcacgcccgacgaggacgacgccatcctccgcgcgcacgccaggttcggcaacaagtgggccaccatcgcgcgcctcctctccggacgcacggacaacgccatcaagaaccactggaactccacgctcaagcgcgagcgcgagcgcgagcgcgagtactacgccgatgcgcgccccggccccggcgaccagcgctcgctcaagcgcaccagcagcgacgggccccccggaagcccgtccgggtccgacctcagcgactccagccaccagagccttcccaccgtgatgccgtcagccgcttctaccgccgtcacctcccagcagcagctacaacacgtgtactaccgccccgtgccgcgcgcgggcggcgtggtcctgctcccggtggcgccgccttctccgcaggctcctccagcaacctccttgtcgttgtccctctccctgccagggctggaccagcagcccgaaccatccccgccgccgccgccaacacctcaagcacaagcaagctcgccgttgagcgcggagttcctgttgatgatgcaggagatgatccggatcgaggtccggaattacatgtccgggtcgggcttcgacgcacgcgccgtgatgggcatggccgagatcgactagtttcagcggcaggggtcccaagacaacgaatcgccgatcgatcccagattcctttgttaatcagcagagcagaggccttcgttccatgctgctgctgtgctgcctgctggtggtactcagtataaccagtagagtttagagtacagtaccagagagacggacggacggacggcgagacctccgatatcgtcatgctgttcttgtacaggagacagcaaaaaagggatcgagaagatggatcagggagaagagagaggactcactcgtgtttcttggctcgtgcagatttgccttttggtttcgagtgcaaaattggaccactaagataaaaaggggtctcttcgattggcgggctcaaaaatttggtcgttcttagattattaggctagatgttgggattttatttcctaggtagtaagttttaaaaatatggattaaattttagtttagtgtgtcctaacacccactgaccaccgtgcacacacagaaccgtacggacaacactagaatggtctgcctgggagctgaggagctctttttttttgtagttgtggaccactgctgagctacttctagatggtatggtatggtatggatggatggaaggaaaggacgaagagaaaatatatggccatgatggctggcagacagggtagctagccggccgttggcagaagccgcggcagagttgagtgagtgacagctaactggctgcttgtcccagccgtcgatgacgatgaagtgtggtgtttttctttatgattcagcaaaaaaaaaaaaaaaaaaaaactcgagggagggccgcgtgtaccc

SEQ ID NO: 2860 - DNA, 808 bp, Zea mays
  unsure (1)..(808): unsure at all n locations
  Clone ID: TF_ZmC659_2
attactccgcggcatcacgcaggcaggcaggcaggctagccgtgctccctcccgtctcttctctcctctcccccaaagaggtcaaagacacagggagaggactcctccgcatctgcatccgtcctcctccgcgcgcacgaattcgagagggagaggagcggtaatggggagggctccgtgctgcgagaagatgggcctcaagaggggcccctggacgccggaggaggacaagatcctggtcgcccacatccacagccacggccacggcaactggcgcgcgctgcccaagcaagccggcctgctgcggtgcggcaagagctgccggctccggtggatcaactacctgcggccggacatcaagcgcggcaacttcaccgacgaggaggagcagtcaatcatccagctgcaccagctgctcggcaacagatggtccgcgattgccgcccggctgccggggaggacggacaacgagatcaagaacgtgtggcacacccacctcaagaagcggctcgacctcagcgcgcaggagcagcacgaggaggccaagaagcgcaagaagccggcagcggcggcgcggaagcgcgacggcaaggtcaagatgaggaagctcgacgcgctgaccgccaaggcggcgcccgtgctgtcctcgcccgagcgctccgtctcgtccacggtcaccgagtcgacgtccacggnnctccggcggcggcggagcagcacggcaactcgggcagctccgcgtccgcctccgcgtccgtcaaggaggagtgcttcacctcgtccaaggagtcggaggagtccagatcga

SEQ ID NO: 2861 - DNA, 1322 bp, Zea mays
  unsure (1)..(1322): unsure at all n locations
  Clone ID: TF_ZmC42_26
gggtccctcgggccggccgggtccatatccatccgtcccaacccatagagagccagtaaacaccgcgcacgcaaacgcaacagcgagatcgtgtcgagcagccggggcgacttgcgaggcatggacttccaccacggctgccacagcagcagcatccacgcggcggcgccgccgccggcgcggccgtggagcaaggaggagaacaagatgttcgagagcgcgctggtgatgtggcccgagcatacgcccgagcgctgggcgctcgtcgcggcgcagctccacgggcgcacgccgcgggaggcctgggagcactacgaggcgctcgtcgccgacatcgcacttatcgagcgcggcggggtcgacgtgcccgcctgctggaacgacgacaaccaagtccgcggcggctgcggcagcgagggtggcactggcaacagccgccgcgccggcgctgaccgggcgcaccgcgagggccggcgccccgggaaaccctggagcgaggaagagcacaggctcttccttcaagggctggagaagtacgggcgcggggactggcgtaacatctcgcgcttcacggtgcggacgcgcacgccggcgcaggtggccagccacgcgcagaagtacttcaaccggcagctcaaccccgccagccggaactccaagcggaagagcatccacgacatcaccaccccttgaccctggccgccgacggcgacgcgcgctccctgcttccaacaaatcgcgacagccactcatcctcatctcgagatcagaatagaagaaacaagtaggcattactcgtagtccatgacaatagctaaatccttaggtcgcatgggtcgttccaaacaaaagctagcacatggtttaggcttactcgtagtcattaaaatagaattaggagtccaaacatctaatggagtctgacgtggcaccgtcgcgtcgagtttaggcgaatgcagaatgggatgagtttctcgctcgagaaacaccggtttcctgcctttaaattttcttgttcccgctactgacccggaaaccaaaaacggttccgttttcagtgttatttaggtttagaatttaataatacaagagtcaaacgaaaaacggttcggttttcagtgttatttaggtttagaatttaaaaatacaagagtcaaactttggtcacaaaacggcatccgaaaaatgcagaaccaaattgtaatcctatcaatgcccgagtcactgttctagtattgtattggtttacaatggtgttttattttaaaaaaaaaacccccccccggccgtntagaggaccaagctaacgacgcgtgcaacga

SEQ ID NO: 2862 - DNA, 519 bp, Zea mays
  Clone ID: TF_ZmC14064_1
cggacgcgtggggtgccagaaaacacacggccgccaccccgcgccaccacccagttcgatcccattccaagcgcgcgcagcagcagcgccagcatgggtcgggcgccgtgctgcgacaagacgagtgtgaagcgggggccgtggtcgcccgaggaggacgaggtgctgcggagctacgtccagaaccacggcacgggcggcaactggatcgcgctcccgcacaaagcagggctcaaccggtgcggcaagagctgccggctgcggtggctcaactacctgcgccccgacatcaagcacggcggctacacggagcaggaggaccgggtcatctgctccctctacagctccatcgggagcaggtggtccatcatcgcgtccaagctgccggggcggacggacaacgacgtcaagaactactggaacaccaagctcaagaagaaggcgatcgccatgcagcagcagcagcaagagtactaccaccaccagcagcagcagcacagctcaggaggccgcggccgc

SEQ ID NO: 2863 - DNA, 891 bp, Zea mays
  Clone ID: TF_ZmC3484_1
ctcagcgagctctcccgtacgtgcgcagttctcggcacgctaccccttatatacccccccggccgctctcgctctagatgcacaggcagtgacacgcgcgcataccgacggactaggtagctgctcatcagctatccagatcgttgctccttccttccctcgccatcggccgcgcccgtgtcgggcggcgggaatgggacgccacgcggcctccggcggcggcgtgcagcagaagctgcgcaagggcctctggtcgcccgaggaagacgagaagctctacaaccacatcatccactacggcgtcgggtgctggagctccgtgcccaagctctcagggctgcagaggtgcggcaagagctgccgccttcggtggatcaactacctgcgccccgacctgaagcggggcagcttctcgcagcaggaggaggacgccatcgtcggcctccatgagatcctgggcaacagatggtcgcagatcgcgtcgcacttgccgggccgaacggacaacgagatcaagaacttctggaacagctgcctcaagaagaagctgcgccagcgcggcatcgaccccagcacccacaagcccatctccgccgacgcggcggcattggagcagccggcgtcgcgagaccgcaagccgtcgttggccacagccgccgctggtggcggcctcgacgtgaagcagcagcagcagcagcagcaggtgttcgacccgttcccgctgaccgacagcttcggcggcggcttcgacgacgcggccggcgccgcattgtacggccacatgggcggcggcggcggcaagcagcaggacgcggccgccaccgcggtggacgtgttggaacgtgtcggagaacctgggctacggcgagagctccagcacagcagcacact

SEQ ID NO: 2864 - DNA, 1637 bp, Zea mays
  Clone ID: TF_ZmC2013_1
gtggtggcccgcgagcctcatctcactcttcttcctctgccttcctggcctgccttctcttctcccgccttctcctcctcccagcacagcagcagctgtgaccacatcaccacacacacacacatatatacttggtcatcatccagcttccagcagccagctgcccgccgatcaacgtgtaggcggttcaaagggaaatctgctgatggacatggcgcacgagagatcagacgccagcagcgaggaggaggtgatggccggcgagctgcggcgcgggccttggacggtggaggaggacctccagctggtcaactacgtcgacgcgcacggcgagggccgctggaactcgctcgcccgatcagcaggtctgaagcgcactggcaagagctgccgcctccggtggctgaactacctccggcccgacctccggcgcggcaacatcacgccgcaggagcagctgctgatcctggagctgcactcgcgctggggcaaccgctggtccaagatcgcgcagcacctccccgggcgcaccgacaacgagatcaagaactactggcgcacgcgcgtgcagaagcacgccaagcagctcaagtgcgacgtcaacagccagcagttcaaggacgtgatgcgctacctctggatgccccgcctcgtcgagcgcatccagaacgccgcagccatggcggggactccgcagcagcacaaggccggcgccgcggacacgccgctctcgtcgccgtcgtcgtggcagcccggcggtggcggcggcctctacgcgtcgccggacctccccacggacgcgtgctggcctcccgcagactgctactactacccagccgccgctgaccatcagctactgaacaaccccgccgccgccgccgtcgtgccggacctgtcgagcaccacggccgggtcggcctccccgtcctcggattccggcgcggggacagcacaaccctggcccgcgccgatgggtggcgcagagtggttgaccaccgccgcctgcgacgcctccagcgccgccgccgccgtcctcctgggcgggcagcagcaacaatcgtgcctggtcggggagacgtcgtgggcgtcatccgagctccccgagctgggcgtcgcggacttcgagatcggcagcttcgacgtggagagcatctggagcatggacgacagcctgtggttcacgcaggcgcagggcgtgtgaatccaagccaccaacacacgcggcgcgcgggcacggaaatcgatccacgttacggcgtcaaataccggtggtggatcggacaccccgcacgtcggggacgcctagcgaaggtgccgagagagctagctgagacacgggttagaagaaggagagagattatttggaggaaccgaagacgacgcgggacggctactctttgctcggttcaagatgcttgctgttcttgcctccaggacttttcttccgctccagttctactccgtttcctagtcttgattccctagcggcttgtgtagggtatatacgccaagaaaattccagaaaaaagggggaaaacgtagctgttgtagtagtacatatatactagtagcgtcaagtgtttgtacgtagctgttgagtaattaagcgcaatacatatgaacaagtgaagttactg

SEQ ID NO: 2865 - DNA, 1214 bp, Zea mays
  Clone ID: TF_ZmC2013_2
acctcatctcactcttcttcctcttccttcctggcctgccttctcttctcccgccttctcctcctcccagcacagcagcagctgtgaccacatcaccacacacacacacatatatacttggtcatcatccagcttccagcagccagctgcccgccgatcaacgtgtaggcggttcaaagggaaatctgctgatggacatggcgcacgagagatcagacgccagcagcgaggaggaggtgatggccggcgagctgcggcgcgggccttggacggtggaggaggacctccagctggtcaactacgtcgacgcgcacggcgagggccgctggaactcgctcgcccgatcagcaggtctgaagcgcactggcaagagctgccgcctccggtggctgaactacctccgtcccgacctccggcgcggcaacatcacgccgcaggagcagctgctgatcctggagctgcactcgcgctggggcaaccgctggtccaagatcgcgcagcacctccccgggcgcaccgacaacgagatcaagaactactggcgcacgcgcgtgcagaagcacgccaagcagctcaaatgcgacgtcaacagccagcagttcaaggacgtgatgcgctacctctggatgccccgcctcgtcgagcgcatccaggccgccgcagccaacaataacgccagcggcgccggggttccgccagctggcgccgccgcggacgacacgccgctctcgtcgtcgtggcagcacggcggcggcgccgacgacgacggcggcctctacgcgtcgccggagctgcccacggacgcctgctggcctcccgcagactgctactactacccagccgccgctgaccaccagctactgaacaaccccgccgccgccgccgtcttcccggacctgtcaagcaccacggccgggtcgtcctctccgtcctcggattccggcgcggggacagcacagccctggcccgcgccgctgggtggaggcgcagagtggttgaccaccggcgcctgctgcgacgcctccagcgccgccgccgccgccgtcgtcctgggcgggcagcagcaacaatcgtgcttggtcggggagacgtcgtgggcgtcatccgagctccccgagctgggcgtcgcggacttcgagatcggcagcttcgacgtggagagcatctggagcatggacgacagcctgtggttcacgcaggcgcagggcgtgtga

SEQ ID NO: 2866 - DNA, 1838 bp, Zea mays
  Clone ID: TF_ZmC3584_1
aattcggccggaccaccttggacccctgtcctcaacctcaagccgccacgcaccaccaacacacgcgcgctggcttcttcaacctcggttgctcgctcgcaacaagacacggatcgtcagagcaagagctctggtgacctgacgattctgctcttgttctcgtacggcgccggtgcctagcgtctgtagcctttttgtgtgtgtgttttttcgcccatatctctccccaccaccaccaccaacctagctcagccgcagttcacccgcgtcaccgcacgagtacacgagcaatccgcaagcgataacctgcaagctgaggggccagctgttttgctcacggagaaagaggttctagctagtcgttcatcaacacggacacaccatggtgaggccgccgtgctgcgacaaggagggcgtcaagaaggggccgtggacgccggaggaggacctcgtcctcgtctcctacatccaggaccacggccccggcaactggcgcgccgtccccaccagaaccgggctgatgcggtgcagcaagagctgccggcttcggtggaccaactacctccggccgggcatcaggcgcggcaacttcacggagcaggaggagaagctcatcgtccacctccaggccctcctcggcaacaggtgggcggccatcgcgtcgtacctgccggagcggacggacaatgacgtcaagaactactggaacacgcacctcaagcgcaagctgcaggccggcggcggcgacggcgacggcgacggggcggccaagccgccggcgcacaggccgccgtcgtccaactccaagggccagtgggagaggaggctgcagacggacatcaacctggcgcgccgcgcgctccgcgaggcgctcaccccgctcggcgacctcaagccgcagccgcagccgcagcgcgccggcgctggcgtgggcacgggcggcggtgacagcccggcgccttcgagctcgtcgtcgcagtcctccccggcgccagcggccttcgccgccgccgccgcggggccgtacgttctcaccgcggagaacatctcgcggatgctggacgggtgggctggccggaaggtccgcggcggcgggaccccgggcacccccggcggtgccgagagcgcgtccacgggatcctcggacgcgtcggaggtgtcgtacggtggcgccgccgtcgcatcggccgcgccggcgcccgcttgtggtgggccggtcttcgaatacgaggcgaagccgggcgtgccgacgtcccatcagcagatgccgctgtcggcgatcgagtcgtggctgttcgacgacgacagccacttgcaccatgctgtccagagcgccagcttgctcgatgccgcccccatggattaccccttctagctctagtgtgtccaatcgatcaagctcaagctaatcccttcaagcgaggagtgtgattacagcgctgtctcctaaagaaaactacacagatcctgcagtacgacgtcggtggctgattaatcgatcggctaggtagctgattcagatcggtcgcttgatcaggttgtttacgtgggatctgcgtagttttcatttagattccaaagaacataagtagaaccacacttatgatataaccacaactatgacgacgacggagtatgttcttgggcctttttttttactgttttctagccttttctcccaagtaaagcttgggggtacgtagtagatccgcttgtgcaagttgcatgttgtgtggaaaaataattgactccagtaatcctatgtcacatacatgtcataaattgtatcgctatctctaacatagcagatattttaagttcccatgcatgtctctcaa

SEQ ID NO: 2867 - DNA, 720 bp, Zea mays
  Clone ID: TF_LIB4767-042-R1-K1-D8
ggccggccgggacacacatccacagtagcgtcacacagaacccttagctcgatagagatagagagataaatatgtcggagcatcggagcaccatcaccactaccactccggttcccccgaagcatccatctcgaaacataagttcatgatcttctggcgagtcaacaataactactgcatgatcggccattaaaggagcttcgtgccaccacagaacgagctcaacgaccataaccacaaatgatatacattcctgagatctgtaaagctctgcgaatatgaagatcccatagcgtctgcattgctcgtgaaatggggcacggattctctgctgctacaagctaaatctgacaaaggcactctggtaagccgacgactatgagaaagtcatgaaacaaataaccaaggatgtgcatggatgctgaagatctattcccggactctctgtgcttcaaagatgcgcaaaaaaacccgactctgatgcgaatacattatctgagaccagaactccagagaggggcattctcccaagaccaagaagacttcatcattgagctgcacgctgtccttggaaacaggtgatcttgaattgcagctcagatgccaaggaggactgacaatgagatcaagaatctatggaactcgccgcatcaataaaaagctcaggcagaaaggcattgatctccacaccccacaagcccttactgaacgtgatcccaa

SEQ ID NO: 2868 - DNA, 548 bp, Zea mays
  Clone ID: TF_LIB3608-060-Q6-N6-G11
aactggggacggggtgagcggcgggcaggcggtggttgatgcgatccggcccgagacagaggaaacgccggccccggagctgccgctggtagacgagatgttcgaggccgtccgatcccgtggcgccggcgtccatgtggtccctacctttgctggcagattttgacctctgttgtgattgctataatgaagggaaatttgatccaggcatggccaaaaccgatttcatcctcatggattctgcaggagtttcaggtgctagtggtactagttggacagatgaggaaacattacttctattagaaggtttggaaatttttggtggaaaatgggctgagattgctgaacatgttgctactaagacaaaagcacaatgcatgttgcactttcttcaaatgcaaattgaagaccgcttccatgatggcaaagatattaatcaaaacatcccagtaaagacagagcaagccacaactgagaaagccattgctgaaacatctgagaaaatggaagttgaagataaagtggaaggaagaggtactgtggatgaa

SEQ ID NO: 2869 - DNA, 1871 bp, Zea mays
  Clone ID: TF_ZmC27878_1
gcagcccatccatatggccgggaagcatctaaaaacccaactccagccctcgacgagcacccgagagacacgagagtgaaggaaagaggaaaaagaagaagactacagccaaaaccctatctcactccggcgcgccaccggccgatggtttcgatgaacaccacgccgaatccgcttgactccgccgccggcagcgccgccgtcgccggcggaagcgtggacgagggaggaggaggaggcggcaggaagaagcggatgcgcggggcggtagcggcggcgatggtgccgccgccgatggcggtcccgctgccggccgcggcgcccgcggcgggggaggaggttcggaaggtcaggaagccgtacaccatcaccaaatcccgggagagctggacggagccggagcacgataagttcctcgaggccctgcagctttttgatcgtgattggaagaagattgaagcatatgtcggctcgaagactgttatacagataaggagccatgcacagaagtacttcttgaaggttcagaagaatggcacaggcgagcatctgcccccacccaggccaaaacggaaggcagctcatccatatccccagaaatcatctaaaaatgtttctcaaactattttattacaagaacaacctactcagcgggagcaaggttctgtcatgcctatggatactgctactgtgagaaacacaaatgcgaatgtggcggtgccttcctgggacaatactcttgctcaacctttcagcgctggtcatgttcaaggtgcagctgcaacaaataactgttcaagtagcatggagagtccatctggtacttggccaacttctgaagcagtcgagcaagaaaatatggttccaccactccgtgccatgccagattttgcccaagtatacaacttcctgggaagcatatttgatccggatacaagtgggcatttgcagaggttaaaagcgatggatccagttgatattgaaacggcactactacttatgaggaatctttccatgaaccttaggagtcccgactttgagcaacatcggaggttgctatcatcatatagctatggtggcgcggaccatgtcaaatctgaagccatggaaaatcttggatctcctcagagtggccatcttccatccctggtaacaagcgaatgagagcacacttccaatttgcggtcggagctttggttgtttacacgggacattcctgtgcgctcccagcaatggagttgtggagacggctggtctgtttatgaatgctagagacgtatcgtggcagtaacatctgtatagcttccaataaatggtctgaccctaggcaagttttgctttttcgcgtacgtgtagatagccagttttgtgtgctcatgcaattttttcctgggtggggcctagatcgtatgtttttttatatacacactattggacgcgtgatgtaaatatgtgcaatctttgtaatgcttgaggtactataattatataatggatatgttatgatcgtgcatattgtgtgtgtgtgtgtgtgtgcatttcacaagcttcttgccttcctttatttgttatgtcccatttcaaagcttttacgatttctgcgcataactattgtttctgttttctagcttctgctgctatcttggctagtcttggctcttattaagagggtgtttgatttctatggactaaattttagtctacctattttattctattttagtccctaaatttacaaatatggaaactaaaatagagttttagttttcatatttagcaatttatgtactaaaatggaataaaatagagggattaaaaattagtccctataaaccaaacaccctctaaatatagctggggcatgcacttgg

SEQ ID NO: 2870 - DNA, 1105 bp, Zea mays
  Clone ID: TF_ZmC9324_3
ccacgcgtccgagtaccactgcaactcctgttcagttgattgctcacggaagcgctaccattgtcgaacccaggcagattttgacctctgttgtgtttgctataatgaagggaagttcgatccaggcatggccaaaactgatttcatcctcatggattctgcagaagtttcaggtgctagtggtactagttggactgatgaagagacattacttcttttagaaggtttggaaatttttggtggaaaatgggctgagattgctgaacatgttgctactaagacaaaagcacaatgcatgttgcactttcttcaaatgcaaatcgaagaccgcttccatgatggtgacgatattaatcaaaacatcccagtaagtacagagcaagccacaactgagaaagccattgttgaaacacctgagaaaatggaagttggagataaagtggaaggaagagataatgcggatgagaaggcctcggagaaaacagagggaagctgtgaagaaacaaaaactgaagatgcaaatgttgtaaataaagatactcagaaatcaggtggcaaagattcaggtgcatctccaagcactgaagaggcaaagcaatcttctgatgatcaacctatagtaaaggaaaattctgtagatgtagatacttctggtgaaaaactatcaaatgttgctattgatatcctaaaatgtgcatttgaggctgctggtcacagcccagaatatgaaggttcatttgcggatgcaggaaatccagttatggcactagcagcgtatttagctggtcttgtggaagatgataacaccaccacttcattccgtagttcactaaaatctgtatctgatgtgtctcctgcactccaattatcaagtaggcactgttttattcttgaggatccgccagatgaactcaaagacatttgtgctagtgtaaggtaagcaatgcttgcacctattttgcattgaaatgctcacaagtttttctgacgatataaatgaaatgtgctcttggcagtaagaaaatagagaatggtgatcaaaaacagatgaggatatgattcaaaattcaattgataccgagaaaaaagagatcaatgagaaaga

SEQ ID NO: 2871 - DNA, 1245 bp, Zea mays
  unsure (1)..(1245): unsure at all n locations
  Clone ID: TF_ZmC1193_7
ccgggtcgaccccgctttcgcggncgcgtgggtcgccgtgctgcgagaaggcgcacaccaacaagggcgcgtggaccaaggaggaggacgagcgcctggtcgcgcacatcagggcgcacggcgaggggtgctggcgctcgctgcccaaggccgccggcctcctgcgctgcggcaagagctgccgcctccgctggatcaactacctccgccccgacctcaagcgcggcaacttcacggaggaggaggacgagctcatcgtcaagctgcacagcgtcctcggcaacaagtagggccgccgcgcgcctctccctctccctcctacccctcgtcattcgtttcgtttcctaaactggccgggtacgttacgtgcaggtggtccctgatcgccggaaggctgcccggcaggacggacaacgagatcaagaactactggaacacgcacatccggaggaagctgctgagcagggggatcgacccggtgacgcaccgcccggtcacggagcaccacgcgtccaacatcaccatatcgttcgagacggaggtggccgccgctgcccgtgatgataagaagggcgccgtcttccggctggaggaggaggaggagcgcaacaaggcgacgatggtcgtcggccgcgaccggcagagccagagccagagccacagccaccccgccggcgagtggggccaggggaagaggccgctcaagtgccccgacctcaacctggacctctgcatcagcccgccgtgccaggaggaggaggagatggaggaggctgcgatgagagtgagaccggcggtgaagcgggaggccgggctctgcttcggctgcagcctggggctccccaggaccgcggactgcaagtgcagcagcagcagcttcctcgggctcaggaccgccatgctcgacttcagaagcctcgagatgaaatgagcgcgcttctaccctctctgtgtagcttctcccccccgtcgtcctcgtttttgttttgccacacctcacatggatgatgaattgatgatacgtggttggttagttttttcgtaggtgaaaaatacgcgatggtgagcgagtgaaagagagattttgtgccctgggtcctcctccctgctctctcttgctgctccattttgcctccctctgtcctctctctctctctctctctctctctctctctctctctctctgtatctctgtaattaccatcgccaaatgatcatgggggcaatatcatgctaggtctctgg

SEQ ID NO: 2872 - DNA, 807 bp, Zea mays
  unsure (1)..(807): unsure at all n locations
  Clone ID: TF_ZmC16180_2
cattgggaccctcgaggccggccggggctggcttctgacctctctctacatccttttgtttgttgccctcctccccatatcatcctcccttgttcgtcatcgtctctccctcagctccctccagccgccaattaatcgatcacctagccggccggttgctggttctcttcttcgcatgctgccgataattaatttattccacgctcgattgcagtggctttagttaatagttatagggagcttcaagatagcaaactagaaacggcgcaggattattggaaggaatagagcttcaattcagatagcagcaggctgctgttgattcggcgatcggtcgatcgaggatgtgcacgaggggccactggaggccgtcggaggacgagaagctgaaagagctcgtcgcgctgtacgggccgcacaactggaacgccatcgccgagaagcttcaagggagatcagggaaaagctgcaggctgcggtggttcaaccagctggacccgaggatcaaccggagccccttctcggaggaggaggaggagctgctcctcgcctcccaccgcgtccacggcaaccgctgggccgtcatcgccaggcttttcccggggcgcaccgacaacgccgtcaagaaccactggcatgtgatcatggcgcggcggtgcagggagcggatgcggctgtcgaacaggcgtgccggcggcgctgctgctgctggtgcctgnngccgtcgtcgtcgccaccggtgctgctgccgaagatggcagtaaccctaggagcgncaataaagagccgaggcctgacgcgagcggc

SEQ ID NO: 2873 - DNA, 857 bp, Zea mays
  Clone ID: TF_ZmC39745_1
ttgggaccctcgaggccggccgggagggagaagagaagggagggcgaggccactggctgtgtaggcagcagccagccacacagacacagcttcgttcccatctcttctcgttcttcatcacctacttgcctactatatctactagccacgctagctagactagccttagacgtagctagctcactagctgcttgctaggtgtgtaccgatcgtccgaggtaggagacacagcacgcagcaggggtatggggaggccaccgtgctgcgacaacggcgtcggcgtcaagaaagggccttggacgccggaggaggacatcgtcctcgtctcctacatccagcagcacggccccgggaactggcggtccgtgccagagaacacagggttgatgaggtgcagcaagagctgcaggctgcggtggaccaactacctgaggcctgggatcaagcgtggaaacttcactcctcatgaggaagggatcatcatccacctccaggcgttgcttggcaacaagtgggcagccatagcctcctacctccctcaaaggaccgacaacgacatcaagaactactggaacacacacctcaagaagaaggtgaagaggctgcaacagccggcagccgactccttccagacaactgcctccaatgcagtcacctgcagcccaaactactacagccccagcagcagtcaccacagcctccaaggaatgcagccgatgagcagctacccccacaccacctgcagcggcggagccccaagcaacaatgaggcgacgactggatactactaccggcgtcgtctcccactctccccagcatggatgagggcatcaccagcagcagcgacagctaactgc

SEQ ID NO: 2874 - DNA, 963 bp, Zea mays
  Clone ID: TF_ZmC7195_1
tgttggggtagctagctagagagagcagcaggccagcacagcagcatggggaggtcgccgtgctgcgagaaggcgcacacgaacaagggcgcctggaccaaggaggaggaccagcggctcgtcgcctacatcaaggcccacggcgaaggctgctggaggtcgctccccaaggccgcgggcctgctgcgctgcggcaagagctgccgcctccggtggatcaactacctgcgccccgacctcaagcgcggcaacttcacccaggaggaggacgacgtcatcatcaagctccaccaggtcctcggaaacaagtggtcgctgatcgccgcccagctgccggggcggacggacaacgagatcaagaactactggaacacgcacatcaagcgcaagctcatcgcccggggcatcgacccacggacgcaccagccggcgagtgccgccgcagttgcccccgccgccgccgccgccgccgccgcgcaaagcagctttcgccaccatggcgacgacgaggcggtggcgcggcgcagctgctcgcgagacagcggctgcatcgcggcgcacagcagcgacgacgacgacagcacgtccgggtccctgccacaccaacatgctgtcggcggcatcgacctcaacctctcgctaagcccaccgacgagccaaccgtcatcgccggccgccgccaagggagttgtagctagcggatatggccaagggagtgagagctagctgtacctcctctgcactgccacgatgatggttgtcaattgttgttagctcctcctcctcgtcttatgttcttccatgcaggccggaagatcctaaagagaacgtgtgcgtgcgtgtgagaattaaactcgtgtctgttgttcacaaaaaaaaaaaaaaaaaagggctgatcgggcgctctaagatttggccatgccccatgcatgaggaaccctgcaggggccctcctactttttg

SEQ ID NO: 2875 - DNA, 846 bp, Zea mays
  unsure (1)..(846): unsure at all n locations
  Clone ID: TF_LIB4746-133-Q1-K1-A11
gggtacctcgaggccggccggaaggtcgtcgagctctcatctctacgccggaggtgctccacagagcagggctcgaagaggtgcgtcaagagctgcaggctgaggtacaccaactatcgcgcgctgatctgggcgacgaactgcgtgcgcgtttgcaggggctccctgatcgccaagcagctgccgcggcggacgggcaacgacgtgaggaaccgttggaacacgaaactgatagcaagcagctgcggcagcgcgggatcgaccccaccgcccccatcgccggcctcatgcacatcttcgtcggcgccctctccttacggtgacgacggcacgggaacgacgacggcacgggagagatcatcgacgccaccctggactgcgacaagaagacacgggtggaccagctcatcgcctagctgctggccgacccggcctactacgctggctcctcctccgagatgggctggatcatgggcttgatgaatgctgattaattagcggttatacaatggatccatgaggctaaagcaaactgactgaaatagtcactttagaggctaaagtttcaaacataaagaactaaaagggactaaaatgttttagctcctttagcttgtaaggacgagttaaactcgactaaaacagctggtcccacacccacacatgcaacttgcgcttgctgctgcacccgcgctaactgccttttccacaaatcaatgcctggtccccacactagcatttatgatttaatgactgctttagtcacttgttccaaacacgagtaactaaattttagtcagtcacttttaggactggacaaaaaactcgtangctcgtactcgctcg

SEQ ID NO: 2876 - DNA, 1225 bp, Zea mays
  unsure (1)..(1225): unsure at all n locations
  Clone ID: TF_ZmC1193_6
acccactgcgccccggcctgctgcccggctcccatatgtatgccctccgttgcacttgcactgcaccccctgtctgtccccacccttctgccctggcttatctctttccgcttccccctgttataatagcaaccaaaccaaaccaaaccagagctcaggaggagcttncacgcaaactcaggggaggcgcgcgcaagcaagcacacgagggagaaccgggcaggcagccagccatggggaggtcgccgtgctgcgagaaggcgcacacgaacaagggcgcctggaccaaggaggaggaccagcgcctgatcgcctacatcagggcgcacggagaggggagctggcgctcgctgcccaaggccgccccacgcgtccgaggccgccggcctcctccgctgcggcaagagctgccggcttcgctggatgaactacctccgcccggacctcaagcgcggcaacttcacggacgacgacgacgaggtcatcatcaagctccacgccctgctcggcaacaagtaagcactcagtctcagttcgccgcccgcccgccggtaccattatttccctcctcctcgactcaatcattttcccatcgtcggccggcccgtcgcgcgcaggtggtcgctcatcgcggggcagctgccggggcgcacggacaacgagatcaagaactactggaacacgcacatcaagcgcaagctgctgacccgcggcatcgacccgcagacgcaccgcccgctgagcgccgccgccgccctcaccgccggcttcccgtcgcccgcgcgcccgcccaccgtgctgttcgcgcgcccggcgccgtcggaggacggcggccacagcagcggcggcgggagcgcggacgcgccgcggtgccccgacctcaacctggacctgtccgtgggcccgccgtgctcgccgcccaagacgccggcggccaccgcgtcgacgcccacgtcgcagcagcagcagcggacgacgaccatctgcctgtgctaccacctcggcgtccgcagcggggaggcctgtagctgcaagtccccctcgccagcggcggcggggttccggtttctccggccgctcgaggagggccagtacatataaggcaggcgtcgtcgatcacagtaggccggcagaagcaaacccccccgccgcaaaacctgtaaaaacaaccacagaacagagtttctaatggagatgatgactgatgtggatggtcnccggccgg

SEQ ID NO: 2877 - DNA, 1762 bp, Zea mays
  Clone ID: TF_ZmC42_43
cggacgcgtgggctcccggccccccgctgcataaatacctcctctcgcggcccattcccacctccccctcctcgccgctccgggctgaccaagggctcgccgcctcccgtgtcctccgactccgacagggaaaggcgaaaccttgggtcggctcgctagtggagtgcagggtacgttgatgacggagctgtggatggaggtgctgccgccgccctacttcgcggggcaggcggcgggcgggtggttcctgccggaccggcgggccgggcccggggcgtggacgctggaggagaacaagatgttcgagcgcgcgctggcgagggtcgactgggacgcgccggaccggtgggagcgggtggccgcgatgctgcccgggaggacggcgtccgacgtcgcggcccactacgacgacctggagtgcgatgtcggctgcatcgaggcgggcttcgtgcccttcccctgctacggtagcggcggcggcggcggcgcgtcgcaatccgccgggttcacgttcgactgggacgccggcgggctgggctttaagcgctcctgctacgtggtcggcggcggcaagcgcgagcgcgggccggaccaggagcgcaagaagggcgtcccctggacggaggaagagcacaagcagttcttgatgggcctgaagaagtacgggcgaggggactggaggaacatctcgcgcaacttcgtgacgagccggacgccgacgcaggtggccagccacgcgcagaagtacttcatccgcctcaactccggcggcaaggacaagcgccggtccagcatccacgacatcaccaccgtcaatctccccgacgacgacgcgggcggtaccgcctctgcctctccgccctccgtgctcacctccgcctccgcgccctcgtccaccggcggcggcggccctgtcgtctccgagcagttcggcgtgctcgtcgacagcaagcccccggcgccgcaccaccacttcgtgccgcacccttacggcaacgtgaagctcgagcccgtcagttcccaccacggcgggttcctggacgactctgtcctgatgcagatgcactgcgggcagctgcagcctctcggatgactggttgtttgtgcagcaacaatggtagaaagagggaaatgcctctcgtctctttggccagttacgaggggtggagggtaccataccgctctgttgcgttgcgcgtgtctgttgttggatttcaatcaggcaaataacaattgggtacagcacacattcttgtcaagggtggatggctcatacaaacagctccgaggcccgagctcagcgcagctcgcagccgagcgctagcgttctgctgcagctgaagccactgaactgagctccctcccgtgtgttccagagacgggaggaagagggtgaaaaagaaaagaaacacacacacacacacacacacaaaaagtagaagatatggacaatgggatctctgcatttcggctatgcatgtgtatacataagcccacgcccgctgtgaaataatttcctactgtgatttgtttcccgtgttatgggaaccacactgctagatgttgtgattgattacgctagctagccctttctttgtagtaatgaggtattggtcggttaacgtcatgtatttcgacagcgagtagcatcagcagcatgctgtctggtgtcttgtaatggttttttatctttataagctggggatgtatcagcctctgattgacccgccctttttttaattaagtattgatcatgatggtg

SEQ ID NO: 2878 - DNA, 1164 bp, Zea mays
  Clone ID: TF_ZmC3584_2
gtggacgccggaggaggacctcgtcctcgtctcctacatccaggaccacggccccggcaactggcgcgccgtccccaccagaaccgggctgatgcggtgcagcaagagctgccggcttcggtggaccaactacctccggccgggcatcaggcgcggcaacttcacggagcaggaggagaagctcatcgtccacctccaggccctcctcggcaacaggtgggcggccatcgcgtcgtacctgccggagcggacggacaatgacgtcaagaactactggaacacgcacctcaagcgcaagctgcaggccggcggcggcgacggcgacggcgacggggcggccaagccgccggcgcacaggccgccgccgtccaactccaaggggcagtgggagaggaggctgcagacggacatcaacctggcgcgccgcgcgctccgcgaggcgctcaccccgctcggcgacctcaagccgcagccgcagccgcagcgcgacggcgctggcgtgggcatcgtcggcggtgacagcccggcggcctcgagcttgtcgtcgcagtgctccccgccgccagcgcctgccgccttggggacgtacgttctcaccgcggacaacgtctcccggatgctggacggatgggccggcttgaacgggaagcgccgcggcggggctccgggcacgcccggcggcgccgagaccgcgtccaccgggtcctcctcggaggtgtcgtacggcggtggcaccgccgtcgtcgcgccggccgctggtggcccggtgttcgagtacgagacgaagccgccggccgcgccgttccagctgatgatgccgctgtctgcgatcgagtcgtggctgttcgacgacgacacccacttccaccgtcctgtccagagcgccagcttgctggacgccgcccccatggattattacctgttgtagctagcgtgtccagcagctgatccagaccaagctaatccgttcaagcaaggaagtcggtggctgattagtcggctagctagctacctgtttctaaagttgttagttttcattatatttagccttttcttttctaggtgggtaaaagttgagtgcgtacttccccttgtgcaagctgcatgttgcatgggaaaataacatatatagctcttgcttgagacccaaaaaaaaattaccac

SEQ ID NO: 2879 - DNA, 1089 bp, Zea mays
  Clone ID: TF_ZM4497.C3.o9.fg
atggggagggcgccgtgctgcgagaaggtggggctcaagcgagggaggtggacggcggaggaggaccagttacttgccaactacattgcggagcacggcgaggggtcctggaggtcgctgcccaagaatgcaggcctgctccggtgcggcaagagctgccggctccgttggatcaactaccttcgggcggacgtcaagagggggaacatctccaaggaggaagaagacatcatcatcaagctccacgccaccctcgggaacaggcaggctaagaaacacgatagataccacgcattcggttctcattacgaagctgcagctgcccaaccagcagcgatgatcacgtggtccctgatcgccagccacctccccggccgaacagacaacgagattaagaactactggaactcgcacctcagccggcagatccacacgtaccgccggaaatacaccgccgggccggacgacaccgccatcgccatcgacatgagcaagctgcagagcgccgacaggcggcgcggcggcaggaccccgggccggccgccgaagactagcgccagcaggaccaagcattcagacgccgatcagcccggcggcgaggcgaaaggcgcggcggcgtcgagcccgcggcacagcgacgcggtgaacccgggcccgaaccagcccaacagcagcagcggcagcacgggcacggccgaggaggaagggcccagcagcgaggacgcgagcgggccgtgggtgctggagccgatagagctcggggacctctggggggaggccgacagcgagatggacgccctgatgcctattgggcccggcggccacgactcggctgccctccaagggcttggcgcggtcggcggcgaggcccaggtggacgacctgttcgacatggactgggatggcttcgcggcccatctgtggggcgggccggagcaggacgaccacagcgcgcagctgcggcaggccgccgagccgatggaagcggctgctgttgccgctgccgctgccgctgcgacggcggcctgcaccccggacgatcgcgagctggaggcgttcgagacttggctcctgtccgactcgttctga

SEQ ID NO: 2880 - DNA, 1008 bp, Zea mays
  Clone ID: TF_ZmC17859_2
cccacgcgtccgtgttgctgcagcagggatggaggaagggcccctggacggcgctggaggacaggctgctcaccgagtacgtgcagcagcacggcgagggctgctggaactccgtcgccaagctcacagggctgcggcggagcgggaagagctgccggctgcggtgggtgaactacctccggccggacctcaagcggggcaagatcacccccgacgaggagaccgtcatcctccacctgcacgccatgctcggcaacaggtggtcggcgatcgcgcggtgcctgccggggaggacggacaacgagatcaagaactactggcggacgcacttcaagaaggtccggccgtcgcggcgcgcccgggcgcagctgctgcaccagtaccagctgcagcagcaggagcagcgccgccagtacctgcagctcctgcagccgcagcagctgcagcagcagcagctgggggtggtgaaacaacagcagctggagcagcagagcccgccggagcctcatcaccaggccatgatggacagcctgcaaagcacggcggcgtgctactgcagcccggtgccggaggaatgctgcccgctcccggccgacgacgacgcggtgctgtgggatagcctgtggaggctggtggacggggatggatgcggcgacggcgacggcgatggctccagcggaggcgactactagccggctagcacgtacgtgtgcgtgtgtatgccaggctgccagccagccagtgtaaagaaataaagcggaagaggaggttctcttcaggtttcagctgctgcaagccaaggatcctgctagtggtagtagagacatgctaattttcctacgagaatagacgatcatgcttcatgcttttttcccctttatccatgaaccatgagcaagtgacattgtgtatcgaagggccctctgtttatgttattatggcctgattacaaggttggaataccttcatgttccttttggtttcaagaatcaagatcatgttttagcc

SEQ ID NO: 2881 - DNA, 1328 bp, Zea mays
  Clone ID: TF_ZmC1302_1
gccggccgggttcgggaagggacaggaagctccaagggccaagggaggctgcaggcaggttgtctccctccttcccacctgcaccacccctacccctgccccccatctcatccatcaatgggaaggtcaccttgctgcgatgagaatggtctcaagaagggcccctggacccctgaagaagaccagaagctcatggagtacatccagaagaacggccatgggagctggagggcgctgcctaggcttgccgggctcaacaggtgtggcaagagctgcaggctgagatggaccaactacttgaggccagacatcaagagagggaagttcacccaggaggaagaacagaccatcctccagcttcactccgtccttggcaacaaatggtcagctatcgcaaagcacctccctgggcggactgataacgagatcaagaatttctggaacacgcacctgaagaagaagctgatccagatgggcttcgacccgatgacgcaccggccgagaaccgacttctttgctgctctgcctcaactcattgctcttgcgaacctccgccagcttgtggagcagcggccgtgggatgaccacgctgctaggatacaggttgaggcggtccaggctgcgaagctccagtgcctccagaacctgctccagtctgcagcatccatcaccaccactcccagctccagcagcatgaacaccatccccagtgaccttggcctcctgagtcctccacagatgtcttccttgtctacgttgccttctccaagtttcctggagagtatcagtggccaagacatggtagctggtcaactgtctgacatccagatccctagctctttctttgaacagcccaccagcaacgaggccaaccagcagtcagacttcactccaaagagtagcgtcgagggggagaatggaacccctaaaacgcttctgtcagaaaattcccttccgccgctggccgacttccccatttccaacctgggtgatgcttgcggtgcctcaagctgtgacggtagcagcattcagttcccaagttggcccgagttgtttgatgaacagttcatgtgcgagtttgtatgaattctggcctggagtgagtgtgtttgtgttactctatagtttgtttttttttcagttatagttttcttcccttcttacatctgttttttgtgccatattctggtgtgggtctcagttcagaggtgtagtttccgcatgctgttttttttcctttttgagtgaaaatgtgtgctcctatgcatacactatataccaaacacttgtaaatatacgacactataaattttgaaggtttggatccc

SEQ ID NO: 2882 - DNA, 2525 bp, Zea mays
  Clone ID: TF_ZmC984_1
cattgggacctcgagccggccgggaaaaaaatctctcaaccatcctgctcctgctcccttcccatccggtctccctttcttttcgcggcctcgcctcgcctcgcctcgccggcggcctggtggtcgcggtctcgctccagcaccgataaagcccacctcgagttcttagtccaagtgtctgctctgctccaccccccggcttcagccgcagcttgtggtggaatcggagcttcttatccgagagcagacatggagcagagtagtgatgggttgccaatcagccagcggagggctaacagttcaacaaaacactcaagcaagtcagatgaggttgctgaagacatgttgcagagtaatataccacatgaaactgtgagactgtgccaaggtgtggaatcagaagagatagagggacctcctcacaagaaaattgtccagaacttcacggagagcagtagttccaaaaataaaaaacacagatggtcatcagaggaagatgaggcactaaagcaaatggtaaaaaaatatgggacgaaaaactggcgaactattgcatgtgctatacctggccgaaatgccaactcatgcctttcaagatggaagtaccttctagacccagcaataaacaaagagccttggtcgcaacaggaggaactaagattgatccgtgcgcagcaagtttatggaaacaaatggtgtaaaatggtcaaacatttcccagggaggacaaatgatgcactcaaagaacattggagaagtcctatgaaaagaaaactggattcatatttggcctcaggattgctcgaacatgttccagacctgcaagatgatgtatcatttccacagacacagaacaatcaatcagatattccaaaggactgcaaagctgcatctgatagaaatagattttcatcacgtttatcaacagaccccaaacttaaacaagagctcacagaactggatgaaaatggtaatacatcagcaagaaaaagctctgacttattctatgctaaagcacctgatacccattcagccaaaatctcagaaatgagaatggccaaatcacagcagtgtgcaggaacaagaaagaagctggcttttctgtcaactccagtggagctcaagagtgttgtaccgcatgaaaccaccaaacattgccaagatatggaaccagaaaagacagagggcccactgtgcaagagaaattcccactgcatcaaggatggaagtagtttgaaaattcccgaaagtaccaaaggcaaatggttagcagaggaagatgaaattctcattaaaatggttaccaaacatgggaaaaactggcaaactgtagcatttgctatacctggccgagaagcaaaacaatgccaaatcagatggacacgcagtcttgacccagcaataaagaaacaggattggtcagaacaggaggatctaaaattgattcgagctcatcaaatatatggaagtcagtggcttaaaatggtcaaacatttccctgggaggacaaatcatgcactcaaagaacactggagaaatcgtatcaaaggaaaactgaatttttatttagcctcaggattgctagaacaagttccggacctggaagaaggtggtatatcagttccagagagcagtcagtcagaaattccgaaggacagtcagggttcagctgacaggagtggaccgccaccagttttacgagcacagcccaaatctaaaccggaactcccagaaaacgctggtacatcaggagaaggaacttctgattccattcgtcttaaagggcccaacgcccatccaaccgaagtttctgaaaaggtattggctaaatcaaagcagcgtgccagagccagaaggagattggattttctgtcaaccccagtggagctcaaattgtgcactgctgcggcaagttgtcaaaggcctccccagaaaatggatcaaccgggtccagtggccgagaacatctctccgtcagatgcatgtcaagacatttcacagaatgttccaccagagcgtgcggatgccatcacaccgctggctgctagtaaccaccattcaccagcgacaccagttgatccattctctctcgaaatgcatgaggcgaacgcatcagatcttctggacatgtcctactgtgatggcttgataatcgattctcctcgtgatccacatgacggtagcctcatgtagaagaaaaagttaccaacgcaaaatgacacttttaatagcaagagacgatggactgtcttcctgaaatccagcaactccctgtataaaaatcgtgttgcatgttggatggaacttgtatcttgtcttggcaaaaataattgcattgctgttctgttaatgcccctaactggtttggagagcatttttcttttgcaggtttgaagagcattttgaggggtgttgtaggtcaaaatgattttttttcgttgttttgggttggacaggtccccatcactctttttatgcaaagcatagcacgccccttataaaccccataaaaaaaaaaaacaagc

SEQ ID NO: 2883 - DNA, 1055 bp, Zea mays
  Clone ID: TF_ZmC39133_1
ccgcggctccgcctccccctcccccaaatttgaaacctccgaggcggacgcgaggcgaagacgtgcgtcggtcatcgagacggccggctgggcgaccgcgccgccgcctctctcctctcgttgcgcgccgcgggggttgcccgcacttgggggcgcgcttgggcgcggggttggatgcagctccgccgacggaggtgctcgtcgatcgcgtcggccacaccgggacggtggtaatcatgccgagtgataaagcaaaagctccaaagaagaagggcgaagaggatcctggaatcccgccagctccctgtgaaggagaaattagccatgagccacatagacaacggtcactcaatgggaggaccactggtccgacccggcgttcaaccaaaggaaattggacacccgaagaggatgctatattgtcccgtgcggttcagacataccaagggaaaaactggaaaaagatagcggaaagttttccagacagaaccgatgtacaatggttgcacaggtggcaaaaggttctaaaccctgaattggtcaaagggccatggtccaaagaagaagacgaaatcatagttcagatggtaaacaaatatgggccaaagaaatggtcggccatcgctcaagctttgcctggacgcataggaaagcaatgccgggagcggtggcacaatcatcttaacccagccataaacaaggaggcatggacgcaagaagaggagattactcttattcatgctcataggatgtatggaaataaatgggccgaacttacgaaatttttacctggaaggacggataatgcaattaaaaatcactggaacagttcagtgaagaaaaaggtcgattcgtacatatcttctggtttactttcacaagtcccatgcctctctctgattgaatgtcctgcacaatgtgactctttatcggctatggaccaacaaaacaacggaggtactgattgcaatgaccagaacactagtgtgggcttaagctctgatttacaagtaaatgtggatgccaacaagaaagagcacatgactctcactcgt

SEQ ID NO: 2884 - DNA, 424 bp, Zea mays
  Clone ID: TF_uC-zmflteosinte056a06b1
ggcaccggcccgtacttattggttttcttacccacccgttcttatcgacgagccttctaacagggagaggcggcatgttcttgtggaaaggggcgacaaggatccatcatttattggaacgtgagagtggatccaagacgaggaggacctcatcatccatctccatcccatgatgggcaacaagtgggctcacattgctaggcatgtgccggggcggacggacaacgaggtgaaagaacttctggaactgtgcaaccaaaagaacttctgtgatgattggtagtggactttcacccaacacccttttgcgagtggactataacggaatccagaggcgaccgggcatgtttaatcactgcgagctaattcatgtggtactgagcagctgaaaagactgggcggtacatgccggcgccgacagagg

SEQ ID NO: 2885 - DNA, 755 bp, Zea mays
  Clone ID: TF_ZmC8104_1
cgccctctagccttcgtgccgtctgcccgcccgccgtctagtcctctcttcgttctcttcctctcgcgctagcagagcggaggaggaggagaccaaccgggttggtggacgtgggcgggaggtgtgtgcgtgtgtcgtttcatggggcggacgccgtgctgcgacagggcggccgtgaagcggggcccgtggtcgccggaggaggacgaggcgctgcgcagctacgtccagcgccacggcagcggcggcaactggatcaccatgcccaagaaagccggtgagcgatcgagcgtgtgctccccttagcttgtgtgtatgtgccatatgtagctagcaagagccatatatgcacaggtgcactgacgacgggtcgatcgttgccggtcggcgtcgcgtgcagggctcaagaggtgcggcaagagctgcaggctgcgctggctcaactacctccgcccggacatccgccacggcggcttcaccgccgaggaggacgccgtcatcatgtccctctacgcccagctcgggagcaagtgagtactgatcgtacacatgtgaatccgagaagctcttcttccttcttcgatcctccaatatcttgagccgagcgcatgccatgccatgccaaagcgtctcccttaatttgaccgatcgacgcgcacaggtggtcgctgatagcctcgcagatggaggggaggacggacaacgacgtgaagaaccactggaacaccaagctcaagaagcgcctcctggccgca

SEQ ID NO: 2886 - DNA, 800 bp, Zea mays
  Clone ID: TF_LIB4767-058-R1-K1-G8
cattgggtacctcgaggccggccgggaaaattcagcgcgaccaggacagtgcagtgctccccgaggtccccaaaagacaagcaggcaagcagcaaagacacgcctccctgcttgcactccccacacgcccagtcgcccacacctccaacagacaaagacaatctagcaagcacacacagcatcaggaggaggagatcgagtaggagcagaagcaaagaatggggagagctccgtgctgcgagaagatggggctcaagagggggccatggacgccggaggaggacaagatcctggtcgcgcacatccagagcttcggccacagcaactggcgcgcgctgcccaagcaagccgggctgctgcggtgcggcaagagctgccggctccggtggatcaactacctgcgcccggacatcaagcgcggcaacttcagcaaggaggaggaggacgccatcatcaccctccacgagcagctcggcaacaggtacgtaacgtacctaccgctctgctaattaatctcgcgccacccatttttctccgcatcccttttctttccctttctagcgcgttgctgtcttttcgggtgttttgctgaatcggaggagcaatgatggcttcttgttgcttcaaacgcaaatcactcttcgtcttcctcttgctcctgtcactggggcagggcatagcatacacatacattatcccctcatggccatgggccccccgcctcgatgccgacgcgaagaaagaaacgcaagtgtgggtgccactagttaatttatcacactgacgctgcgcgagatgcg

SEQ ID NO: 2887 - DNA, 782 bp, Zea mays
  Clone ID: TF_ZmC659_6
ccggccgggatccccctttgccttagcaatcagcacgaccaggaccaggacagcgctccctcccgtccccaaagacaaacaggcgagcagcaaacacacacgctcgaaccgagacaagccaatctaataatggggagggctccgtgctgcgagaagatggggctgaagaaggggccatggacgcccgaggaggacaaggtcctggtcgcccacatccagagcttcggccacagcaactggcgcgcgctgcccaagcaagccgggctgctgcggtgcggcaagagctgccggctccggtggatcaactacctgcgcccggacatcaagcgcggcaacttcagcaaggaggaggaggacgccatcatcagcctccacgagcagctcggcaacaggtactttttactcacgccgctgttctttcccttcgtcctcgcattgctgtcttctcgggtgtaaaaatcagaggatcaatgattgtttgcttgttgcttcaaacgcaaattactattcgtcttcgtcttctcccctctctcctctgaattgttcctgtcagtggggcagggcatacaatacattatccccgtgggccccgcctcgaggcccgcccgacgaagggagaaagaaagaaaatccaagtgtgctggccacttggtcgctagtatagttcagcttgttcgctgcggcttgctgcggctgcaatccggctgcggctgcggcttctacagtatttttctctctatggattgcagctgcagcagtccaaacagctgccacagtgtcgg

SEQ ID NO: 2888 - DNA, 1877 bp, Zea mays
  Clone ID: TF_ZmC11324_1
cccacgcgcccgccggcccggccccggccttcccttcgcgcctaggggcggaaggccgccgtgcccgttcttcccagctgcagcaaccggccagtgcgcgcggttgcgttgcatttgcatggctgcgcgctgcgctctgggagcttgcactagcgggtcggcggcctaggcgcggggcatctttcgagtgcgtgcgtgtctgttcaagctctgatcgtctctccggcccattcgccggaggaaactgaccgccgccttctcgctctcgctctctaccctattcccggggctgagaggggaggagagaaggccacgtccacaccataaagcaggacgtacagacacgtgtacgagggggatcacggtcgggtgaggtgactaagctggcggacggaacgacgacgatggcgaggagcggcggcgggatggaaggcagcggcgggctgaagaaggggccgtggacgcaggcggaggacaagctgctgagggaccacgtgcggcggcacggcgagggcaactggaacgccgtgcgccgggagacgaggctgcagcgctgcggcaagagctgccgtctccggtgggccaaccacctccgccccaacctccgcaagtgccccttctcccccgaggaggagcgtcagatccttctcctccacggcctcatcggcaacaagtgggcgcgcatctccaagcacctctcagggaggacggacaacgagatcaagaactactggaacacgcgcttcaagcgccggcagcgcgcgggcctgccgccctacccgccggacgtcgagcggcagatcaagctgctgcgcgcccaacgtcaaccgtttgcagccgccgcactcgcatcgcctgaacaactacccgctgcggtgtcgcgacgtcggaaacccgttcgcgttgctctccagcataccgtcactgtcgcagacggcctcgcactcgcactcgccactgatcaaccagaactacccgcttctgaaccagatgcaggtgttccaccacctcggcggcagtcagcagccgtcgttccaccaggacggcagcgcggcggctttcggtgacatcgtctcctctcgcctgccgccactgccaaccgccagaacgcaggcggagctacattcgaaccaattcgacacctccagcagcggcgggctgctggatcagtcgatgctgatcggcgacgaacacctgctgcggcccaacccgagtatggtcaaggtctcctccatgcccgcgctctcctaccgtgagccggatgggtccaggatgctgccagcccatggcgccgggagcgacggcgacgtctcctcgctggggcactgccctccgggacaggacctccaccgtggtgcgacatgggacttcaccttcgcggccgcgaagccggcgaagaggaagacggcgagcgaggtggggttctccgacatgttcgccgtcgcaccggcgggggattggttcggcggcgggtcgacggcgccatcgccggggccgtcatcggccgtcaccgacgaagagtttaacctggagatgcagcagttcatgtcaatgctaccactgtctgacgagcacggctggaacgcataatgcggccgggtaaaatggaaatcgaaaactgtgtagagcgtgtgtctccttgcttctgcgacgagaatggtgtgcgcattgtttttgtaatgtgcccactcttggatctttatctgttctagacgtcgattgagtttcaaacattgataatgctagggcaccatcggcgtgggataaacaccaaatagtccaagaattcactgcaacaactgctgtgcaccttcgtaaagccaaacatgttcagttttgatatatatatatatttaaagcgacgaacacgaacttgc

SEQ ID NO: 2889 - DNA, 1147 bp, Zea mays
  Clone ID: TF_ZmC4021_2
attcggctcgagatccgagttcgtctcaaaggcatcgcctttcttcctggcagcagagagagagatggcatcctcctcgaccacgaatacatcagatggtggtgcaaagtcatcgtcttgcccgagaggacactggcgacccggcgaggacgagaagctgaagcagctcgtcgagaagtacgggccgcagaactggaactccattgcagaaaagctggaggggagatcaggcaaaagctgccggctccggtggttcaaccagcttgaccctcggatcaacaagcggcccttcacagaggaggaagaagagcggctgctcaacgcccaccgcgcccacggcaacaagtgggcgctcatcgcccgccacttcccgggccgcacggacaacgctgtcaagaatcactggcatgtcgtcatggcacgtcgcagccgcgagcgctccaggctccttgccagggccgcgagctcatcctcctcgccgtccaccggtgggtacctcttcggcgctgtcacgccggcgactagctcgctctgcttcggcttctccaagcttggtggtgccggcagcgccagcggaagcggaggcctgttcaggtcgccggtgcctgcacctcctacttcactgttcaagaactttggcacagccactgcaagtaagggcttgctggggtcgagtttcgaggcgtcaggacggtacagctacagcggcaagcagccgacggcacctctctccatcaccttctcctctccaagagaagcgctaggcatggatatcggccaccatggccgccatgagcaccaccaaaaggattatcacgccagcgaaagcgccgatgagccactgaagaagaaggacgtgccgttctttgatttcctcggcgtcggtgtgtcctcgtaatcaataataatattgcattcctgaaataccaatcgatgttgatcaatcaagtgtattgatcagtgtttgttttttttaattattagggcgaactgcatgcggtagtagctgacaagtattcagggttagagttcatcgtcattgatggttacagtgttctgatcatcatgtgctgattcatcagtcaaataaggctccagacacatggctatttaatatttatttaaaagtttttttactagcctgctg

SEQ ID NO: 2890 - DNA, 777 bp, Zea mays
  Clone ID: TF_ZmC2251_1
gccggccaggccgggagacggataaacagatgtcagctgcagtgaacaagtcgtcggccgggacgaagaagtcccggaagccgtacgtggtgagcaggccgcgggagaggtggaccgccgacgagcacggccgcttcctccacgcgctgctgctgttcggccgcgactggaagagggtccaggcgttcgtcgccaccaagacgggcacgcagatacgcagccacgcccagaagcactttctcagagcggacaagaagctgggcctcgccgtgccgccgccgcaccctcgccgctctgccgccgactatggtggtgccctggcgccggacgtcgagacggttcagctcccgttgtctcaggacgacctgcgcttcgctcaggtgtacaggttcgtcggcgacgtcttcggctgtggcgcgatgtggccggtcgaggcgcagctgcagaggctgctgggcgcggaccctgtagtcgtggacaccatcctacgggtgctggccaacctccaagacaaaacttccctccctgtagcttgtaggtcgacaatattttgtagccagttacgttatggcgggattggttttgaatcctgtgattacaaatttcctgctagataaaaaatagggatttttacgtcactagttctcaaagtcgatcggtacgagtaaaccgatctgtgctagacatgtcctcgtctaagggcctatgcaggaacttcatagaaattatgtgcaaattttagaaggatcccaaaaaaaaaaaaaaaaaaagccccta

SEQ ID NO: 2891 - DNA, 665 bp, Zea mays
  Clone ID: TF_ZmC2251_2
gcagtgaacaagtcgtcggccgggacgaagaagtcccggaagccgtacgtggtgagcaggccgcgggagaggtggaccgccgacgagcacggccgcttcctccacgcgctgctgctgttcggccgcgactggaagagggtccaggcgttcgtcgccaccaagacgggcacgcagatacgcagccacgcccagaagcactttctcagagcggacaagaagctgggcctcgccgtgccgccgccggacgtcgagacggttcagctcccgttgtctccggacgacctgcgcttcgctcaggtgtacaggttcgtcggcgacgtcttcggctgtggcgcgatgtggccggtcgaggcgcagctgcagaggctgctgggcgcggaccctgtagtcgtggacaccatcctacgggtgctggccaacctccaagacaacttccctccctgtagcttgtaggtcgacaatattttgtagccagttacgttatggcgggattggttttgaatcctgtgattacaaatttcctgctagataaaaaatagggatttttacgtcactagttctcaaagtcgatcggtacgagtaaaccgatctgtgctagacatgtcctcgtctaagggcctatgcaggaacttcatagaaattatgtgcaaattttagaagaatcc

SEQ ID NO: 2892 - DNA, 661 bp, Zea mays
  unsure (1)..(661): unsure at all n locations
  Clone ID: TF_LIB4977-051-Q1-K1-D10
tcgaggccggccgggncgggttactagagcaccccccggcccgtcgtctactgtctacagcacacatcgcagcagctcgcgaccatcgtccatccgctcaattgtgattgatcgagctgcgagcccatcgcctctagctaagctaccatgggtcggcagccgtgctgcgacaaggtggggctgaagaaggggccgtggacagcggaggaggaccagaagctcgtcagcttcatcctcggcaacaggcagtgctgctggcgcgccgtgcccaagcttgccggtgcgtatctatctatctatgtacgtgcatgctcgatcgatcgtcgcagcttttgtcatgacgagagaagcttgtcgcgcgttgccatgccatgcagggctgctgcggtgcgggaagagctgccggctgcgctggaccaactacctgcggccggacctcaagaggggcctgctctccgacgccgaggagaagctcgtcatcgacctgcatgctcagctcggcaacaggtggtcaaagattgcgtcgcacatgccaggacgaacggacaacgagattaagaaccactggaacaccacatcaagaagaagctcaggaagatggggatcgacccgctcacccacaagcccctcccggcgcccgatccgcatccgccgaaggacc

SEQ ID NO: 2893 - DNA, 1518 bp, Zea mays
  Clone ID: TF_ZmC1497_3
cccacgcgtccgcttctctagatctcctcctcctcttcctctctatctctctctctccccaaccaacaacctgtcgattaagctagctctcagctcatcccggcctcagaaccaaccaattcctgttttagacggttaacaacctacaacaacagttagcatggccacaacacagagcaggggcggcggcggtgttgttcccgttgaggtggacgaggagcacggccgccgccggcagggaggagcagcgccgcaggaggaggaggaggaggaggcggccgagaagccggagctccggcgtggcccgtggaccgtggacgaggaccacaccctcgtcaactacatcgccgacaacggcgagggccgctggaactccctcgcccgcgccgccggtctgaagcgcacgggcaagagctgccggttgcggtggctcaactacctccggcccgacgtgaagcgcggcaacttcaccgccgacgagcagctgctcatcctcgacctccacacccgctggggcaaccggtggtcgaagatagcgcagcacctgccggggaggacggacaacgagatcaagaactactggaggacgcgggtgcagaagcacgccaagcagctcaactgcgacgccagcagcaagcgcttcaaggacgccatgcgctacctctggatgccgcacctcgtcgacgccaccgctaccaccgccgacgacgaataccaccaccaccaacaccaacaccaagccgctgcagcaggcaacatcgacggcctgctcgccggcggcgacgtcgacgacgtccagaacgctctggcggcgggcgtggccgctgctatggcgtcgtcgtcgtccgactcgctcgcgtcggagccgtactcgtacgaggacggtggcctcctcgcgagcgtgcgcgccggcgaggacatgcagctggtgatgagcggcggcggttgggcgatggcgcaggaggccaacgaccaagggctgtggccgtcgtcgtctggtcatggtctgtcgtcgtcggtgcaggccgctgccggtggtgccggccagtttgaggacccggagctcagtggatgggtgcaaggtttctccgacagcattattactggtaacctttgggccttggaggaaatttggaagatgcaatgagcaattttgcgttttccacacgcatccaacgaagagctagcggaaatgtatacgactagtgatgttgacagtagatagaacatgaggttgtcatatataattctcgatctctccctctctctctctatctatatatctctctctctctctctctctctctatatatatatatatatatatatatatatatatatatatatatatatatatatatatatatatatatatatatactctaactccaaatatactatacggtatactaaagttgtatagcattttcatttttttcctcgtttttttatttcgcctcttaaggttcattcttatagaggttggaaaaggagggtattgtttatgcaagtcgaaac

SEQ ID NO: 2894 - DNA, 1105 bp, Zea mays
  Clone ID: TF_ZmC20189_2
ctgtagctagctgatctccctccgaaactctctgctcgcccgctgcctgctggaagcttggcgcggtcccggcggcggcattctccggcaatggggtgcaaggcgtgcgacaagcccaagcccagctaccgcaagggcctgtggtcgccggaggaggaccagaagctccgcgactacatcctcctccacggccacggctgctggagcgcgctccccgccaaagccgggctccagcggaacggcaagagctgcaggctgcggtggatcaactacctccggccgggcctgaagcacggcaccttctccccggaggaggaggagacggtgatgagcctccacgccacgctcggcaacaagtggtctaggatcgccaaacacctgcctggcaggaccgacaacgaggtcaagaaccactggaactcgtacctcaagaagagggtcgagggacccagcacgccgccgtccgactcagacgactcgcattgcgccaagcccggccggggcggcagcacggcgcgggagacgggagacgaccgcccggcggactactccggctcgtcggagccgcgcgagccgtcgtcgtcgcccgacacgagctgcctgacgggcacgcccaaggtcatgttcgtggactggctcgacatggactgcatgggtggtggtggtggtggcccgccgggcgcggcggcagcggcagcggcacctggtctgggcgctgctgcgggcgtggccagggtcagcacgggcgatgatcagatgacgatggatgatgggtcggcgtccggtcgtgccgacgtgtccctgcacggtacgttcggtgacagcggcggcgccggctgctgggagttccacgagagcttcgatcagatgcaggcggccggcttctgcgacctgctctcctccattggcgagtactacttcggactcgactaggctctcggccctggttggtgatcggtcgttgctcaaaggatttgcgcgttttttttttaactttgttagaagtttcgatggatggctttgtctgtgcttgtaaattgttgtcgtgtacggtatagatagagcaattttaaaggcagataaaagtcaaggacggtgacgagtc

SEQ ID NO: 2895 - DNA, 1589 bp, Zea mays
  unsure (1)..(1589): unsure at all n locations
  Clone ID: TF_ZmC16443_1
cagagccccgagcaatcccttctcgcccttttcacttttcagatccagccagccagccagccatcccactccgcaccgcattcctcgcagtggcagagcttgcagcggtggtctcttccccttcctcctgtctcctcctcgctcgatctcctctcccaaacagcgagaagcggatggggagggcgccgtgctgcgagaaggtggggctgaagaaggggaggtggaccaaggaggaggacgaggtcctggcgaggtacatcaaggagcacggggaaggatcgtggaggtcactgcccaagaatgccgggctgctgcggtgcgggaagagctgcaggctgcggtggatcaactacctgagggcggggctcaagagggggaacatctcggaggaggaggaggacatgatcatcaagctccacgccacgcttggcaacaggtggtccctgatcgccggtcacttgcccggtcgaacagacaacgagatcaaaaactactggaactcgcacctgagcaggcgggcggccgacttccgcgacggcgtcgtcgtcgacatcgacctcagcaagctgcccggcggcgggaaacggcgcggcggccgggccagccggggcgccgtcgtggccgcggccaaggagaagaaggccaaggagaaggacgacaggggcaatagcaaggtcgcagaagcggagcagcagctcagggacacggaggacgacgacggcggcagcgtctccacgccgaggcctcagtctgatgactgcggcaccgcccagagcgaagaggagcaagcgcaggccagcgccagcgacctgacatccgatgggcatgggcccgaggaggaggaggaggaggacccgctggctctgagcgaggagatggtgagtgcgcttctggccccggaaagcccaaagctggaggtgggccccgatggctcgtgcatggacagctacagtggccctccgtcaggggaaagcggctgtgggtccagtgggccttctggcgacgtggcccaggacctggacctagacgacgacaaggccatcatggactgggacttgatggggctggacatctcgaccgccggtgacatgtgggaccagctggtgtgggactacgacgaaacgttggtcacggaaccggaaggaggtgaggaagggcaccagcagcaggacgatgtcatgtcagacctcttcttcctggacaatctctaggaggtgcgaggatagcatgggcatggctgccgtgatgctttatgctttttaatttgatccggtacttgtaggtttttgggtgtgttcagttcagagatgagtggcggtgtcagagacgagataaggggagtgctccagtgacatctttgtttgctggccggatctcacgaacccgtagaatggcaagaatgtagaaaaataagcacgcaatatcacttggaaacctttcatcagtagagcctgtctaacatctacagacggagaaatgcaaaaaaaaaaaaaggttgctgggattgccatagtctgctaatccttaggtcttttcttttgacaaacacgattgctttattaattgattcaagtcatgattacnnanca

SEQ ID NO: 2896 - DNA, 326 bp, Zea mays
  Clone ID: TF_ZmC11751_1
ccccaccttcttcgttgcctctcttcctccctctcctctcttccttcctctcgatcgatcgtcatagcaatccaagctagcaagcccgtccgtcgtctctcgtccaagaagcatacaactactaatggggaggtcaccgtgctgcgaccaggacgcgggcgtcaagaaaggcccgtggacgccggaggaggacaagctgctggtggactacatcaacggcaacggccacgggagctggcgccgcctgcccaagcacgccggcctcaaccgctgcggcaagagctgccgcctccgctggaccaactacctccgcccggacatcaagc

SEQ ID NO: 2897 - DNA, 1025 bp, Zea mays
  Clone ID: TF_ZmC19314_1
ctcatctaggcgtcggtcagagctctctcgagctcgccagcggtggttggtcgtcgtcgtcgtcgtcgtcgatggggaggccgccgtgctgcgacaaggcgaacgtgaagaaggggccgtggacgccggaggaggacgccaagctgctggcctacacctccacccatggcaccggcaactggaccaacgtgccccagagagcagggctcaagaggtgcggcaagagctgcaggctgaggtacaccaactacctgcgtcccaacctgaagcacgagaacttcacccaggaggaggaagacctcatcgtcaccctccacgccatgctcggaagcaggtggtctctgatcgcgaaccagctgccgggaaggacggacaacgacgtgaagaactactggaacacgaagctgagcaagaagctgcggcagcgcgggatcgaccccctcacccaccgccccatcgccgacctcatgcacagcatcggcgcgctggccatccgcccgccgcagccggcgacctcccctaacggctccgccgcctaccttcctgcgccagcgctcccgctcgtccacgacgtcgcgtaccacgccgccggaatgctgccgccgacgccggcgccgcagcggcaggtcgtcatcgcgcgcgtggaagcggacgcgcccgcgtcgccgacggagcacgggcacgagctcaagtggagcgacttcctcgccgacgacgccgccgccgccgcggcggccgcggccgaggcgcagcagcagctggccgttgttgggcagtaccaccacgaggccaacgccgggagcagcagcgctgcggccggcggtaacgacggttgtggcattggcgtcgggggcgacgacggcgcggcggcgttcatcgacgccatcctggactgcgacaaggagacgggggtggaccagctcatcgccgagctgctggccgacccggcctactacgcgggctcctcctcctcctcgtcgcccgggatgggctgggccagcatgggcctgctgaacgctgattaa

SEQ ID NO: 2898 - DNA, 319 bp, Zea mays
  Clone ID: TF_LIB3245-455-P1-K1-H9
cggacgcgtgggcggactcgtggggccacaactccggccagaagctagctagccaagttattagctagtacatactagtggccggccggacacgatcgatgggcaggccgccgtgctgcgacaaggcgggggtcaagaaggggccatggacgccggaggaggacatcgtcctggtgtcctacgtccaagagcacggccccggcaactggcgcgccgtgcctgtcagcacgggcctcatgcgctgcagcaagagctgccggcttcgctggaccaactaccttcagcccggcattcggcgcggcaacttcacaccccacga

SEQ ID NO: 2899 - DNA, 1229 bp, Zea mays
  Clone ID: TF_ZmC2204_1
gaattcggcaccatagtggcttcttctccctaatagctaccttcttcctatcaggctggagttcatcaaggatttgaacctggaactggagcccacaagcacacagaggaggaagaacaccaagactggttcccaacctatccaaggtagaagcgagcaacgttagtgtggtagtaacatggtgactgtgagagaggagatgcgtaaggggccatggacagagcaggaggacattcagctggtatgcactgtccgcctgtttggtgaccatcgttgggacttcattgctcaagtctcaggcctcaacaggacaggaaagagctgccgcctgcgctgggtgaactatcttcaccctggcctcaagcatggccgcatgtcaccacaagaagagcgcattatcattgagctccatgctcggtgggggaacaggtggtctaggatagcaaggaggctgccagggcgcacagacaatgagatcaagaactactggagaacacacatgagaaagaaggcacaggagaggaagatgggcatgccatcaccttcatcctcatcctcctcactgacataccaaacctgccttcttgacaccattccagtcattgggatgggcagtggtgacactcacaatggtagctgtgtcaccagcaccctcgagaacacacagagtgtcatggatggatatcccatggatcagatatggaaggagattgaggcaccacatgcacctaacttgctgagtattgctgaagggaaagagaagacgtgcagcagtatcccctgtcatctaccatcacctgtaatgtgggactacaaatgccctgagatattctggaagatgggagatcaagaaatcatgatgtgatggaagatgaaatcaagatgttggctgcacgatttggttatgggcttatggtaaataaggccatcgctattgaaggctgaaggaatacatttatattggtcaggccactcagctatctgcctagcagatttgcagtatttgtacttcctaactatgcttgcattagtatgcagtatttttaaatctagtgtaacactggtggtatgctcataatgtatgtatctatgtagtgtgaaaaatagtttgtatcagtttgtgcaatagtgtggacgctctatatgcatgatatatctatttatctctgttcttgttgtgctgaacgcttctatatgcatgataaaaaaaaaaaaaaaaaaaaaaaaaa

SEQ ID NO: 2900 - DNA, 1514 bp, Zea mays
  Clone ID: TF_ZmC152_1
caatgctcgaggtcgggggggggcggcgaagtttagtcatcgtctccagctgctgtcttgctcttccccgccagcaccagcacgcagcacgcagccaccacaccacccgtcacgtcactactgctccttcctttgtcctctcctgcctcacgtctcacgccagcagaagcgccaaacaccagcagcggacgaccacgccaactctaggtctacgaggaaggaggggggagggaggagcagcgcagcggcagccgatggtgtcgatgagctcgacgccgcaccctctggatccgtccgttccggccgtcgtggggggcggcaaggaggaggaggaggcggtggagtcttgtgccgccgccgcgcccttgccgccggttgggatcgacgacgacgaggagggcccccggagagtgcgcaagccctacaccatcaccaagtcgcgcgagagctggaccgaccccgagcacgacaagttcctcgaggcactgcagctctttgaccgtgactggaaaaagattgaagcatatgttggctccaagacagtaatacagattaggagtcacgcacagaagtactttttgaaggttcaaaagaatggaacaggtgagcatttgcccccacctaggccaaagcgaaaggctgcccatccatatccacacaagtcctcaaaaaaggcccttcaagttgtcttaccacaacaagtttcgcacataatggagcaaggctgtggtacacctatggatgtagctactgttgctacagactctagtgtaaataatgcttttcctgttcaacatttcagtccgaggcatacacaagccatgccagactttgctcgtgtatacaacttcctgggaagcatatttgatccagagacaaatgggcatttgcagaagttgaaggaaatggatcccattgatgctgaaacggtactgttgctgatgaaaaatctgtcaatcaacctaactagtccaaactttgaggagcataggaggttgctctcttcggatgcctcaagcatggatcaaaagtcgggctcttcccgggttcatctcccgttcatgataacgagcaagtgagagaagcagctggctggcctgaaggcaagaaggtcgtttggagtcgtcacactcaggagcaaggcgatgcgtatgtacatatatcttaataagcagctttaggatagcttggtttgctcgacccacatgttgcaagtttatgcgcctttttctttattctctgcccctccagttttgcccattgtagtatggaacttataacatgcgtgttttatgccgcatcttacaaaatttttttgtcccatcacaaggatgaacgggtggggcatgtgtgtgtgttttttgccgtgtgtgtatgtatacaacatgcggctgtgtgtagatcaggctatatatataacagactctgtgctgttctattattgccctcgtttcaaatacttgttttttttgccgttattaataatattattacatggagtatggtattagtat

SEQ ID NO: 2901 - DNA, 1793 bp, Zea mays
  Clone ID: TF_ZmC42_55
agcgacggccgcccttttttttttttttttaatagaacatcatgtctaaacttctactagctagtaactggcaaagcaacaatggcggacaaaaaccttgcgagaccccactacaagcatcacacactacaagtgttaacaccatctggtgggagatgttgcacacaccaaaaatacattaacaattaagccggtacagaaatcttctgatcctggatcctaatccaagccgccggtgacgctggaagaggctttttatcgaatgctttattgttcggtaccgtggaagttgttggactctgtacttgtcgaattttgtacactgaaccgaaatggacgctggaacggcacgcgtacgcccatgggccatggcctcttgttctcgatgaacacaacacagccactcggagctgccgcgagctggcagctggacgacgagactgttccactcttcatcctcgtcacacgcggcgggacgtgccagccatctgatcggtaggagtacacctgaagcaactctgcatccaagcctagcacgacgacgtgcgacttgtgccgccggccctgatgcccgcccggggatagatgaggtggtggttggtggcgtacgttgcgacgggagcggttctcgccgcaagaacagcccgttacaactgtccgcagtgcatcaggaggacggagtcgttgaagcccaggccggccaccagcgagctcttaggctccagcttcacgttgccgtaggggtgcgacacgccgagcgcgtcttggagcggcgcaatgaagggcttcatgtccgggagggcgacggaggggttggtagtggtggtgaccgcggacggtggcgcgttgccgcggtcttcgtcggggaggttgacggtggtgatgtcgtggatgctggaccggcgcttgtccttgccgccggagttgaggcggatgaagtacttctgcgcgtggctagccacctgcgtcggcgtccgggtagtcacgtacttgcgcgagatgttcctccagtcccctctcccgtacttcttcagtcccatcaagaaaagcttgtgctcctcctccgtccaggggacgcccttcttccgctccgggtccgagccgcgcgcgcgcttaaggcagtagccgcgcctgaaccctccgtcccaatcctcgtggtgggtgaacccgaacgacggaaccgagccgctgtagtgcgggaacggcacgagcccggcctcgatgaagccgacgtcgttctccaggtcgtggtagtggttcctcacgtcgtcgaccgtcttcgtgcgcaccacctccgccaccttctcccacctgtcgggcgcgttacggtcgatctgcgccagcgccttctcgaacagtttgttctccgccgccgtccacgcgtctcctccccgccagaaaaccgagtgcgtgtcgtgcagccagaagcagggcgccgtcggcgggaacggcaccggcgtccacgcctccgccatcatcttggccgctgcctgcacacgtgagctgcccgtctggctggtagcgaagaagatgagggagagaagtagggggaggtggaaggtagcgtcagtatttaggggagaagaatcaaattcccggcggatgccgaagtggccggagtttattccggctccaccgttggaggccttaaagaaaaggcgagcaaggaagcggatgcttgtgattgggtcttggactcttggtggagttcgtggcctctcaactctcaaccaaaggccactttctcattgtagatccctggtaaatttgatcccggcccggccggcctcgag

SEQ ID NO: 2902 - DNA, 641 bp, Zea mays
  Clone ID: TF_ZmC256743_2
attgggtacctcgaggccggccggggtctttgctcgcagctaggtccctccttgaactctgcttcttcttcttccaactgatcatctcctaccttttcttttccaatccctaaacctacacacagctttacggtagctgctagtgctagtgcatggccatatatatgcatctataagtagataggttgcaccctccaaggggttcatatcatccaaggtgcatgcaaggagacaggccacaataatgtcccagaggaaaggcgccatggcggctgcagtgacggccagcaagcatcgcgaggaccaggaggcgatgatggtggagctcaggagaggcccctggacgctcgaggaagacaacctcctcatgaactacattgcttgccacggcgagggccgctggaatctcctcgcccgctgctccgggttgaagaggaccggcaagagctgccggctcaggtggctcaactacctgaagcccgacatcaagcgcggcaacctgacgcctgaggagcagctgctcatcctcgagctccactccaagtgggggaacaggtggtcgaggatagcgcagcacctgccggggcgcaccggccaccagatcaagaactactggcggacgcgcgtgcagaaacaagcgc

SEQ ID NO: 2903 - DNA, 1628 bp, Zea mays
  Clone ID: TF_ZmC14101_1
cggaccgggccgggcctcccgggccacaactccacctaaaccgaacgaaaaggctagaagctagctagccaagttattagctactacatactagtggccggccggacacgatcgatgggaaggccgccgtgctgcgacagggcgggggtcaacaaggggccatggacgccggaggaggacatcgtcctggtgtcctacgtccaggagcacggccccggcaactggcgcgccgtgcccgtcagcacgggcctcatgcgctgcagcaagagctgccgcctccgctggaccaactacctccgccccggcatccggcgcggcaacttcacaccccacgaggaaggcatcatcgtccacctccaggccttgctaggcaacagatgggcggccattgcttcttacctcccacagagaaccgacaacgacatcaagaactactggaacacccacctcaagaagaagctccggaagcagcaagccatcggcgccatcttcgcgccacctcccccctccgaacccaccgccggccatgccgattgccgtcgtcacgacatgacccgctcctccaaggacagccacgcttgcctggccgacagcacaccagcggctgatgaggtcgtcacccagctcatcgcccagcagttcgccgccaccgacggtgacacctcgtcgtcgtcgtcgtactcgtacgcctccagcacggacaacatctccaagctgctcaacggcttcatgaagagcgccttcgccggcgcgggacgacgctaccgacaccatcaagacttcctcggccattgacatcgaccctttcgaccacaagtccggcggggcactactaccaccacccaagaagcggcagcagcagcagcagcatctgtcctccatagagaactggttgttcgacgatgccactgagcaggtcgttgtccagctgatggaggagatctccggcggctcatgctcagttcccatgctgctttattagcaccaagaaaaagaagcgaacatgcatgatagccgatcgatagatgtgacttggataggagaatgaatttgtgcatgggtgcaagttacccagctgataggagaattttatatacacccatatgcatgtttcaagttttatttacacaaccatgagccatgagataagaacaatatatatgcatagtcaatcaaaactcccaagcgagaggcacctcaaagaactcaaaaaaaaaaaaaaaaaaaaaaaagacaacgcctggtccaacaagtcttggtgacctggtccggccttccagatgagttggctacgtgggaggatcaggaagccttgcatcagcgctttccattggctcctgcttggggtcaagccggctttccagggtgagggaatgtcacgagctcatccacaccacacaagccacatgaacctgaagaagcagcaaggagaggagagcgtgtccgtcggacaaatgtgagaattactgggcctgaatgggtgtagtgcgttgaatgggccactgttgggctggctttgtaggattcctgtgtgacccttgtaatgggagatagttaaactctgcagtagccagggagatgaggaagaaagaaatagacactgctcctatctacctcctccttccttc

SEQ ID NO: 2904 - DNA, 662 bp, Zea mays
  Clone ID: TF_LIB5116-021-A1-PF1-H6
accagccgtattcttcctagcagctctggcagcctttaccttcggaccagcgtcaacacactgagcaatccatacatcacacacacagcgccagaggtttaacttaattagtcggccgagaagagcagaggagtgagcaaggtagctatggggaggtctccttgctgcgacaagacagggatcaagaggggcccgtggacggcggaggaggacatgaccctggtcgctcacatcgagcagcacgggcacagcaactggcgggcgctgcccaagcaggccggcctgctgcggtgcggcaagagctgccgccttcggtggatcaactacctgcgccccgacatcaagcgtggcaacttcaccggcgaggaggaagacgctatcatccagctccacgccatgctcggcaacagatggtccaccattgccgccaggctgcctgggagaacggacaacgagatcaagaacgtctggcacacacacctcaagaagcgactcgactcgtcctcgtccaagacgtccggccaggcagcgcctaagcgcaaagccaagaagcctgtggctgcagcgagcacagccgatggcccggtctccatgccagtgtcatcaccggagcagcccatctcgtcgtccgccacagattactcgatggcatcgtcgttgga

SEQ ID NO: 2905 - DNA, 1471 bp, Zea mays
  Clone ID: TF_ZmC16901_1
acgcacgtacgggcagtcgcccaggccccagctagctagggcaccgcgcacgcggcacgccccggcccccgctctatttatgccgctagctagcgacaccgaccaggtcactggggggggtcattcccttgtcactagctagatcgactgactggagaggagctatcctcgtctactacctctgggcgagctgcgtgtcctgtcgtccttctcgctcctgtggtcgccgcgcgcggcgctgcgatggggcggtcgccgtgctgcgagaaggaggccgggctgaagaaggggccgtggacggccgaggaggaccagaaactgctggccttcatcgagcagcacggacacggctgctggcgctcgctgccggccaaggccggtctgcggcggtgcggcaagagctgccggctccggtggaccaactacctgcggccggacatcaagcggggcaagttcacgctgcaggaggagcagaccatcatccagctccacgctctcctcggcaacaggtggtcgtcgatcgcgacgcacctgcccaagcgcacggacaacgagatcaagaactactggaacacgcacctcaagaagcggctcgccaagatgggcatcgaccccgtcacgcacaaggcccgcgccgacgtcgtggggggctcctctggcgccggcaacaactctggagcgcgctacagggcagccgcgcacctcagccacacggcgcagtgggagagcgcgcgcctcgaggccgaggcgcgtctggcgcgcgaggccaggctgcgtgcccttgcctcgccgccgccgccgccagggccagggccgggacccgcgtttagcgggctcgagtcgccgacatcgactctgagcttctccgagagcgtgctgttcgccagtgcggcgcacgacacccacgccctgacgtcacgcgcttacgcagaggcgttcggggcggagcagcaacagcgcttcgctgacactgccgccgccgccgacgccgcgccaggcttccttgcaggcgtccttctcggctgctccgtcgccggcgcggagaaggggttcgcggcctcgtcgacggacgccagcgtctgtgagcagcagcaggaggaagaggacaagggctactggagcagcatattgaacatggtcaactcctccatgtcgtcgtccacgtcctcgctgacttccgatgctgtcacggaccccgccgccgcgtacttgccgccggcgacggcggcggccgagttctgagtgattgtcgtgcaataataacgaacctgtgctaatgttaccttgtcatgtgtgttgcttactagtaagtgcgttttttggtgctagttagtttatttacgtgctaatggggtgtcgtccacgtgtgcttgtgctttatgatgtgcaataaacatgtacgtactgattttgtttgcgcgggcgtgtcgtcgatcacctatgtggcccccataacgcccaacactataac

SEQ ID NO: 2906 - DNA, 726 bp, Zea mays
  Clone ID: TF_ZmC741467_1
gggtacctcgaggccggccgggccgccgtttctccaagtccaacgctgcccccaccctctcggcctccgcctccgccaccgccgcggtccttccctcccctgcccaccgagtagatttgaggatctccagcttttttaggacaatccagttttcgtcgaagttcaaaatgacggtggtggaggcgggtgaagtgttgaacttgaaggtgggcgagaaccctctactggagggtgaggccaagacggggtacgtctcgcccgacgaccaagacggggagaccgccagcgaaaaaccctgcggcgcgccccagctgaagaagggcccctggagtcccgatgaagataagcttctcaaaaattatgtcgaggcacacggcgaggggaaatggaacaaggtgcagcgcaactccgggctcaatcgctgtggcaagagctgccgcctccgctggaccaaccacctcatgcccgatctcaagaaagggtctttcgacaatgaggagatcgacaagattttgaagttttacctcaagtggggccccaagtgggccaagatagcctcgcgattgcctggtcgcacagataatgaaataaacttttggaataccagtgagactgatttgcctatctatctttctcaagctcctgcagtttcgagcttacttcctacatgcttcttgggtgtagtgggaatgtgctccctgcatcctggaactgatctgctatgcc

SEQ ID NO: 2907 - DNA, 132 bp, Zea mays
  Clone ID: TF_6165807
ctgaactacctccggcccaacatcaggcgcggcaacatctcctacgacgaggaggatctcatgatcatccgcctccacaggctcctcggcaacaggtggtcgctgattgcaggcaggctgcctggccgaaca

SEQ ID NO: 2908 - DNA, 281 bp, Zea mays
  Clone ID: TF_LIB3079-030-Q1-K1-F3
cggacgcgtgggggcgcgccgccccttcactgtcgacgaggacgcggccatcgcccgggcggacgcccgcctcggcaaccgctgggccgtcatcgcgcgcctgctccccggccgcaccgacaacgccgtcaagaaccactggaactgctccctcaagcgcaagctcggcgccgccgacgccgcgtccggttcggcggttgccgctgacgactgcgtcgccgacggcgagaccgaggcgcgccggggcaagatgatgatgatgagcatctcgcccgccgaca

SEQ ID NO: 2909 - DNA, 958 bp, Zea mays
  unsure (1)..(958): unsure at all n locations
  Clone ID: TF_ZmC764246_1
ctttgtagttattgttcacacctttgcccagtttgcactatgaatcacaaaaggaggcagacatcgctctttgctcggattgcttccatgatgcaagatttgttcctgggcactcaagcttagattttcagagagtggatggaacgaaagatggatcagacaatgatggggacagctggactcatgaggaaactttactgttgctggagggcttggagaagtacaatgataattggaatgctattgctgaacatgtcggaacaaagtctaaggcgcagtgtattcaccattttattcgtattccagtggaagatggtctgttagagagcattgaagtaccagaagcatccgtttcatctagagtacaaagcaatggattttcgtattcaaattccaatggcggcatttcaggtagcgttcctcaaagtagccaacctggacaacagcttccatttgttaattctgctaatccagtcatgtcactggttgcatttttggcctctgcagtaggaccaagaatagcagcatcctgtgcaaatgcagcattatctgttttgacaagagatgattccaggatgtgttcagaaggcaatgatgtcatgggtcaagctgctcgtccaaactatgatgcctcatcatctgtctctcccgaaaacgtcaaatacgctgcaatgtgtggcttgtcagcagcggcaacaaagtgcaaactttttgcagatcaggaggagcgtgaaattcagagattagcggccaccatcataaatcaccagttaaagagattggagttgaagctgaagcaatttgcagaggtggagaccttgcttttgaaggaaagcgagcaggttgagagggccaggcagaatctacagcccagcgtgtccggnttatgtcagctcgattgctttcctccggagtcccatgncctggagcagcagcagcaccatggcatcaaatccaa

SEQ ID NO: 2910 - DNA, 536 bp, Zea mays
  unsure (1)..(536): unsure at all n locations
  Clone ID: TF_LIB4764-028-R1-K1-B7
attgggtccctcgaggccggcctacaacgctgctggaagagctgccggctgcggtggatcaactacctcaggccggacatccgccgaggccggttcacggcggaggaggagaaactcatcatcagcctgcacgccattgttggcaacaggtgggcacacattgccagccacttgcccgggcggacggacaacgagatcaagaactactggaactcgtggatcaagaagaagatccggaagccagcgatgagcacgacgacgagctcggccgtgacggcggccagccctccgtgcagcacggcggcgttggacgcggcgcttggtcgtcacctgcagacgccgttcagcgcggcggagcaccggctcgacgccatcctcagccagagccttgccttgccgccgccgaagctgggctccggcgngcggcgggcggcggcggccaagagtccccgccgctgcccccgcactgccccttcttcatgttcgacacgagcgtcagcgtcagcccgccgtcgtcgctggcgtcgcccgcggcc

SEQ ID NO: 2911 - DNA, 1389 bp, Zea mays
  Clone ID: TF_ZmC21035_1
cttgctttctgtgcctctcagcaaagggcagcgttccttgctatgtcatctagctagatagcacagagcaagctgcctgggcaggcagctagaaaattaacaacaaaaaaaaaggtcaggagcagtgggatttggtcgcttgctgttgcttttggcttcgtctccgggcacatctcactgctgaagcctcatggggagagctccgtgctgcgacaagaacaatgtgaagaaagggccatggtctcctgaggaggatgccaagctcaaggagttcatcgagaagcatggcaccggtgggaattggattgctctccctcaaaaagcagggttgaggagatgtggcaagagctgcagacttagatggttaaactacctgaggcctaacattaagcacggggagttcactgagaccgaagacagggtcatctgcagcatgtatgcaagtataggaagcaggtggtcgatcatcgcgtcgcagctgcccgggcgcaccgacaacgacatcaagaactattggaacaccaagctgaagaagaagctcctcggctccacagccgcgccacaccctcaccgcgcgccacggcagcagcagcagcaccaccaccaccggcccggcctcaacctgatgctccaacaaacgttgccctccttaccccagctggccacctacaacagcttcttctccgtcgcaggcggaggagccctccaccacgacgacccaatcatcccagcgctagcacttccgccgccacaccaggactacatgctaagccccggcggcggcggcggcggccttggcatcccaacgtcactgctgcacgcgcagcagcagtttcagcagcagcaccagcagcatgtggtgaaggaggagagcggcagcatgatcgtgttcggcagggaccagcagagctgcagctcgtcggacggcggcggcggcgcgcatagccagcaccagcagccgcagtacggcaatggccatggcaaggagctgagcttcgacggctacttgttcggctacagcaacggcggcagcggcatggagcacgacaactgcggcaggctgatgcagcagctgcaggacgctcaccagcagcaagcccatcagcatctagtgcctgtggagtacaactacgaggagatcaagcagctgctcatgagcacagccgccgccgatactctgcacgccgccggcagccacgacgacgacgacgacaacggcgggattgaagggttcggcggctcgcaagggaataaggtgacgatgatgtaaattgacgactgatgctgagagatggacgtacgacacgacacagggtaaaagcgattgatgatcaacgcgcaaggtgtgtgtttgatttttactgctgtattatttcttcttgcttcttc

SEQ ID NO: 2912 - DNA, 2114 bp, Zea mays
  Clone ID: TF_ZmC2041_1
ctcctctgcacatgtacactcacctcaaaacccccaagcatcgtgctaaaacccggcctagccctcgaatccccccttgcccgcgcggagtagacgagcccagcccgtcccatcgaccatggcatcctcagggtccgccgctaacctctggtactgcttggcctaagcatcgcgggcgtcctcctggcagcgcggcgattgaggcaccatacgcgccctgaccacgacgctttcatggcccgcctagagctcctcccaccgccacagcctccgccgtcgcaaggaggccagcccgggcgaggtggcgcaggccatcgccatgttccccagatcctgttccacagcgtcgccttcttccaggtacacccagctctcgccttcttcaggcacagctccaagccgtcaagcgccacccagtcccgattcccttcacaccgtctctcgccctatcctatctgacggtccaagactctgagtttgccgtggtgagtgtgcttcactgcttctctaattcctcccgttgcattggttcgatggaatatggcgctgaggaggaggcggcgaccgatgaccccagtagcagcgggggcaccaggcgttgggcgactgaaggggagcccgaagctgactgtggatgcggacatgcgagatatggcgaagacggccgcgtggagcgttagttcctacagggctggcaacggtgtcacggccctgcacgacaacaaccttgacacctgccgacagtctgatggggctcaagtgtacagccgcaaatggtgaacatccagttccagaagaagttgcaggcgtgtagctgcagcctgcagctcgtcgtgatatacgtggatttcaagctcgaagaagtgctccactaaaaatgaaacgttagaattcagctgagcatcttactctacattgcagcaaactgtgacgtgctttgctgagttagattagtctggcatgcttgagtttcccatggtagggcgccgcgaagcgcgcctctttttctagtaaacaaaagcgcaaatggaagccgcttcacgtagcagcccgtgcaaagcaagcgaaagggacccgcgagcagcgaagcaaccaggccaagcgcaacacgacctacaccgtggggccggccatccaggagacacgcgtattccgtcctggacaaaggaccgcatccacttgctagctcgctagtcattacctgatttcgccgcgggcgtcgtcgtctttctccttcctcgtcctttataaaggaaggtggcaatggcctttccctctgcaccgccaagttagcttgcctagccacatcaaagcaaagctagctacggccagctttggcgatctgcttgcttctctctgagcgtttctttacaactaaaccaactgagcaatggggaggcaaccgtgctgcgacaaggtggggctgaagaagggcccgtggtcggcggaggaggacgagaagctcgtcaccttcctcctcaccaacggccagtgctgctggcgcgccgtgcccaagcttgccgggctactgcggtgcggaaagagctgcaggcttcggtggaccaactacctgcgcccggacctcaagcgcgggctgctgtcgtcggaggaggagacgacggtgatcgacctgcacgcgcagctgggcaaccggtggtccaagatcgcgtcgcacctgccgggacgcacggacaacgagatcaagaaccactggaacacgcacatcaagaagaagctgaggaagatgggcatcgaccctgccacccacaagcccctccacccacagccagcagctcctcctccgactcagcaggagcaggacacgggcgggtcgcccgaggaggagggggagaaggccgacgcggtcatgatggcagcagctacgccgattatcgggcacgagacggcgccgttctttaccgacgaggaggagatgctggcgcacctccttgacgacatcgacgacttcccacccgcggcttattctcccgacgactcttcttcgccctcctcctcctcctccgcgtcccggtcgtctcactcggcctccgtcgtcacagcgccgtcgtcgagcggagctggtggaagcagcgtcgccgacggcgagcggccgc

SEQ ID NO: 2913 - DNA, 846 bp, Zea mays
  Clone ID: TF_ZmC14028_2
cagctcgccgctccactctcctggttctgctgcggccgtcgccggctaactagctatagccagccactcggagtcggaggcacagcacctccccccgcgtcgccagcgcacttggacgaccgatggggagggcgccgtgctgcgagaagaaggggctgcggcggggcgcgtggagccccgaggaggaccagcgcctggtggcctacgtccggcagaacgggcaccccaactggcgcgcgctgccccagcaggcgggccttccccgctgcggcaagagctgccgcctccgctggatcaactacctgcgcccggacatcaagcgcggcaacttcacccgcgaggaggaggacgcagtcatccaactccaccaaatgctcgggaacagatggtcggcaatcgctgccaggctgccggggaggacggacaacgagatcaagaacgtctggcacactcacctcaagaagcgactggagcctaagacagccacgcaggcgcccaagcgaaagcccaagaagcagcagcagccagaggcggtgacgctcgcagcgcctgtctcgccggagcagtcagcagtctccacgtcgaccaccagcaccaccactgactactcggcggcctcgtcgtcgttggagaacgcggatagcttcacctcggaggaggaggactaccagattgacgacagcttctggtccgagacgctggcgatggcggtggacagttccgactccgggatggaggaggcagagggcgccttcggcgcgtcgccgccggcgccgtcgaccaacgacgacgtggacttttggctcaagctgttcatgcaggccagcgacatgcagaattcgcccc

SEQ ID NO: 2914 - DNA, 1272 bp, Zea mays
  Clone ID: TF_ZmC17037_2
ttgggtacctcgaggccggccgggggctccttgcctttgttctgttctccattcgcgaaaggctcgcagcaaaaccacgccatcgatcgccgccaccagtccagcatcctccgatcgactacgtactcccacccactccggcagcagcgaggcctctctgtctgtgcgcggcgtggctgtcgtcgatctctgcctggcgggcggccggcatggggaggtccccgtgctgcgagcaggcgcacaccaacaagggcgcgtggaccaaggaggaggaccagcgcctcgtcgcctacatcaaggcccacggcgagggctgctggagatcgctaccaaaagccgcaggtctgctgcgctgcgggaagagctgccggctgcggtggatcaactacctgcgcccggacctcaagcgcggcaacttcaccgaggaggaggatgacctcatcatcaagttccacgagctcttcggcaacaagtggtcgctcatcgccgggaggctgccgggcaggacggacaacgagatcaagaactactggaacacgcacatcaagcgcaagctcctcgcccgcggcatggacccgcagacgcaccgcccgctcgccagcgcgaccgcggggcagcagcattaccagctgcaggagccgcagaagcgagcggccggcggcggtccagcaggccatccgcaccaggaccacttggaggtcgtcgtcatctccaactcgccggacgaggcctacagccgtagcagcgacgacgagccgcggtccgccacgccgccgcggcgccacctcgacatcgacctcaacctgtccatcagcctagcggcctaccagccgccggaggaaaccggcatcatcaagcagccactggtgatgaagcaggagcaggaaacggcggcgggcggcaccaatgccgcggcggtgtgcctgtgcctcaacagcctcgggtaccggccgggcgtcgagtgcgtttgcggcgacggcagctcctcctcctcctcctggcactcccactcccactcccaccaatgggctctgaattttttacaggcggcggcgccctgctacagaggccaatagtgtagtaagagcgatcagtgacatcattaaaatgggagcgttattacgatcgagactgagggtgagggaggggggcagagctgagcagggatagtagttaactacagctagtagtagtagtagtacgtaaaagacacacatgcttaggctttaacaagtctctgaaacacgcatcatgggttatgagttgtgctct

SEQ ID NO: 2915 - DNA, 1348 bp, Zea mays
  Clone ID: TF_ZmC1497_1
ccggccggggagagctccctttcaggtagagaaaactgatcatcttctctagatcttctcatcataccgataccggcctcaacgccctctctttcccagcctcacaaccaattcctgtttcagtcgatcgcagttagcatggccgcgacacagagctgtcaggctgctgcttgcttcccggccgccgtggcggtcgacgaggagcacggccaccacagccaccagctgaagggaggagcgcaggaggaggctgagaacgacaataagccggagctccggcgtggcccctggaccgtagacgaggacctcaccctcgtcaactacatcgccgacaacggcgagggtcgctggaacaacctcgcccgcgccgccgggctgaagcggacgggcaagagctgccggctgcggtggctcaactacctccggcccgacgtgaagcgtggcaacttcagcgccgacgagcagctgctcatcctcgacctccacacccgctggggcaaccgatggtcgaagatagcgcagcacctgccggggaggacggacaacgagatcaagaactactggaggacccgggtgcagaagcacgccaagcagctcaactgcgacgccaacagcaagcgcttcaaggacgccatgcgctacctctggatgccgcacctcgccgacgacgtcgataccatcgctgcggccaacgacgacgacgaagaccaccaccaccacctacgcctcctcgtcctgcatcaccaccaggcccagcacctgcagcaagctgctgccgcggccggcggcgctgccaacgaccttgctgcgggcgcctacgacgtccgccagctgcacgcgctgccgtcgtcgggcatggcggcgacgtcgtcgtccgactcgctcgcgtcggagtcgtacgatgacgggggcctgcttttcgcgaacttgcgcgccggcgagatgctgatggacggcggagattgggcggcgcagcaggaggccgaccaagggctgtggccgccgccgccgccgacgtctgatcttgatcagtcggtggtgcaggctgctggtgccggcgctggccagtttcaggacatggagctcagtggttgggtgcaaggcttctccgagagcattacagataacttttgggccttggaggaaatttggaagatgcaatgagcgagcaattttacatcttacacatccatccaaattaaagacaacatagatacacatatacataccatatattctaacaacaggtgccatatacgatatacatacacaagttgttgtatagttgtattccgcttatatatatatatttttgcctctcaatgaagttcattcttatagaggttgg

SEQ ID NO: 2916 - DNA, 1421 bp, Zea mays
  Clone ID: TF_ZmC1497_2
agactaataaattccctcacatgctttactctctcctcgcatcttagcctataaaaggactgaggaattgcgatacggctgctgctaactgatcatcttctctagatcttctcatcataccgataccggcctcaacgccctctttttcccagcctcacaaccaattcctgtttcagtcgatcgcagttagcatggccacgacacagagctgtcagagcaggagcagcgcctgcagcaaggctgctgcttgcttcccggccgccgtagcggtcgacgaggagcacggccaccacagccaccagctgaagggaggagcgcaggaggaggctgagaacgacaataataagccggagctccggcgtggcccctggacggtagacgaggacctcaccctcgtcaactacatcgccgacaacggcgagggtcgctggaacaacctcgcccgcgccgccgggctgaagcggacgggcaagagctgccggctgcggtggctcaactacctccggcccgacgtgaagcgtggcaacttcagcgccgacgagcagctgctcatcctcgacctccacacccgctggggcaaccgatggtcgaagatagcgcagcacctgcctggaaggacggacaacgagatcaagaactactggaggacccgggtgcagaagcacgccaagcagatcaactgcgacgccaacagcaagcgcttcaaggacgccatgcgctacctctggatgccgcacctcgccgacgacgtcgataccatcgctgcggccaacgacgacgacgaagaccaccaccaccacctacgcctcctcgtcctgcaccaccaccaggcccagcacctgcagcaagctgctgccgcggccggcggcgctgccaacgaccttgctgcgggcgcctacgacgtccgccagctgcacgcgctgccctcgtcaggcatggcggcggtgccgacgacggcgacgacgtcgtcgtccgactcgctcgcgtcggagtcgtacgatgacgggggcctgcttttcgcgaacttgcgcgccggcgagatgctgatggacggcggagattgggcggcgcagcaggaggccgaccaagggctgtggccgccgccgccgccgacgtctgatcttgatcagtcggtggtgcaggctgctggtgccggcgctggccagtttcaggacatggagctcagtggttgggtgcaaggcttctccgagagcattacagataacttttgggccttggaggaaatttggaagatgcaatgagcgagcaattttacatcttacacatccatccaaattaaagacaacatagatacacatatacataccatatattctaacaacaggtgccatatacgatatacatacacaagttgttgtatagttgtattccgcttatatatatatatatttttgcctctc

SEQ ID NO: 2917 - DNA, 1319 bp, Zea mays
  unsure (1)..(1319): unsure at all n locations
  Clone ID: TF_ZmC1497_4
gcacgagccgataccggcctcaacgccctcnnnnncccagcctcacaaccaattcctgtttcagtcgatcgcagttagcatggccacgacacagagctgtcagatggccacgacacagagctgtcagagcaggagcagcgcctgcagcaaggctgctgcttgcttcccggccgccgtagcggtcgacgaggagcacggccaccacagccaccagctgaagggaggagcgcaggaggaggctgagaacgacaataataagccggagctccggcgtggcccctggacggtagacgaggacctcaccctcgtcaactacatcgccgacaacggcgagggtcgctggaacaacctcgcccgcgccgccgggctgaagcggacgggcaagagctgccggctgcggtggctcaactacctccggcccgacgtgaagcgtggcaacttcagcgccgacgagcagctgctcatcctcgacctccacacccgctggggcaaccgatggtcgaagatagcgcagcacctgccgggaaggacggacaacgagatcaagaactactggaggacccgggtgcagaagcacgccaagcagctcaactgcgacgccaacagcaagcgcttcaaggacgccatgcgctacctctggatgccgcacctcgccgacgacgtcgataccatcgctgcggccaacgacgacgacgaagaccaccaccaccacctacgcctcctcgtcctgcaccaccaccaggcccagcacctgcagcaagctgctgccgcggccggcggcgctgccaacgaccttgctgcgggcgcctacgacgtccgccagctgcacgcgctgccgtcgtcgggcatggcggcgacgtcgtcgtccgactcgctcgcgtcggagtcgtacgatgacggaggcctgcttttcgcgaacttgcgcgccggcgagatgctgatggacggcggagattgggcggcgcagcaggaggccgaccaagggctgtggccgccgccgccgccgccgccgtctgannntcttgatcagtcggtggtgcaggctgctggtgccggcgctggccagtttcaggacatggagctcagtggttgggtgcaaggcttctccgagagcattacagataacttttgggccttggaggaaatttggaagatgcaatgagcgagcaattttacatcttacacatccatccaaattaaagacaacatagatacacatatacatatcatatattctaacaacaggtgccatatacgatatacatacacaagttgttgtatagttgtattccgnnnnnnnnnnnnnnnnnnnngcctct

SEQ ID NO: 2918 - DNA, 337 bp, Zea mays
  Clone ID: TF_LIB3245-072-P1-K1-A9
ccggagggaccgtcccgggatgaccgacgcgtccgacgcctcctacctcgcacagggatttaatagtctttttacaaagacaaacaggcgaacaggaaacacacacggtcgaaccgagacacctcaatataataatggcgagcgcctaccgtgctgcgagaagattgggctaaataaggggccatggacgcacgatgaggacaaggtcctggtcggccacatacagagcttctgacacacgaactggagcacgctcgccaaacaagcactgctatttcggtgcaccaagagttctcagctccggtagatcaactacctgagccatgacatcaagcgc

SEQ ID NO: 2919 - DNA, 1388 bp, Zea mays
  Clone ID: TF_ZmC42_25
aagcacggcccaatcgccggccgacactcacaagaacctgcctccctctggatcgctatctcttttctagtgcccagggaaagctagctagctcacagctgagctgagggaagaaagcaaggagagggagccagggaggaaggggaaaaacacgcggagagggtgagcaagaaagaaccgaggcggatcgccttctgttcctcctgccggctccgcgagaggaggcactgctcaggggggaagaaagaggtggaacaacgcccggggcagagcagagatgatgcgggagacgtacatggacgtgctgccgccggtggaccacatagccgcacggagcaactggttcccggcggcggcgcgtctgtggacggcggcggagaacaagcagttcgagcgggcgctcgccgggctcgacctctgccgcccggactgggaggaggtggcgcgggccatccccggccggacggtccgcgaggtcgtcagccacttcaagcacctcgaggtcgacgtccagcagatcgagagcgggcaggtgcccttgccggcctacggcggcggggccagctcgttcaccctgcagtgggacggctacggccccggtccgggggacttcaggcacgggtaccgcttcgctggaggctgcgggaggcggcaccacggccgcacgccggagcaggagcggaagaagggcgtgccgtggacggaggaggagcacaggttgttcctcctaggcctgaagaaatacggcaagggggactggaggaacatatcgcgcaacttcgtccagaccagaacgcctactcaggtggccagccacgcgcagaagtacttcatcaggctcaactccggcggcaaggacaagaggaggtccagcatccacgacatcaccacggtcaacctgacggacgaccagccgccctcgccgtcccagtcctccctgatcaccagccagtcgaacgcaccagctccagctccaggtccggctccggccgcagggatatgccaggtcccattggcggccgacgccaagcgacacggtgccagaactctgcccttcagctcaccgaacaggacctctgcggcgccggcctacaggatggagtttcatgaccaacagggcctgcagtgtggccctctgcatgatcagttgctcgccagccagagcgttctgttctaggcgcggtggcagcccaccctgcggcatggatcgaccaggtcaggtgcctagtgtataatacttgtggtatcgctgtagcttcagcgcctgtattgaagggattagccttttgggagcataacagaaaggaggtcttcatttcatggtggtccataatttgttggagaatgtaacaaaaggaacgccgagaattcgatgccatggtattttc

SEQ ID NO: 2920 - DNA, 1600 bp, Zea mays
  Clone ID: TF_ZmC42_41
cccaatcgccggccgacactcacaagaacctgcctccctctggatcgctatctcttttctagtgcccagggaaagctagctagctcacagctgagctgagggaagaaagcaaggagagggagccagggaggaaggggaaaaacacgcggagagggtgagcaagaaagaaccgaggcggatcgccttctgttcctcctgccggctccgcgagaggaggcactgctcagtcccgtgattcctacagggggggaagaaagaggtggaacaacgccccggggcagagcagagatgatgcgggagacgtacatggacgtgctgccgccggtggaccacatagccgcacggagcaactggttcccggcggcggcgcgtctgtggacggcggcggagaacaagcagttcgagcgggcgctcgccgggctcgacctctgccgcccggactgggaggaggtggcgcgggccatccccggccggacggtgcgcgaggtcgtcagccacttcaagcacctcgaggtcgacgtccagcagatcgagagcgggcaggtgcccttgccggcctacggcggcggggccagctcgttcaccctgcagtgggacggctacggccccggtccgggggacttcaggcacgggtaccgcttcgccggaggctgcgggaggcggcaccacggccgcacgccggagcaggagcggaagaagggcgtgccatggacggaggaggagcacaggttgttcctcctaggcctgaagaaatacggcaagggtgactggaggaacatttcgcgcaacttcgtccagaccaggacgcccacccaggtggccagccacgcgcagaagtacttcatcaggctcaactccggcggcaaggacaagaggaggtccagcatccacgacatcaccacggtcaacctgacggacgaccagccgccctcgccgtcccagtcctccctaatcaccagccaatcgaacgcaccagctacagctccggccgcggggatatgccaggtcccattggcggccgacgccaagcgacacggtgccggaactctgcccttcagctcaccgaaccggacctctgcggcgccggcctacaggatggagtttcatgaccaacaaggcctgcagtgtggccctctgcatgatcagttgctcgccagccagagcgtcctgttctaggcgcggtggcagcccaccctgcggcatggatcgaccaggtgcctagtgtataatacttgtggtatcgctctagcttcagcgcctgtattgaagggattagccttttgggagcataacagaaaggaggtcttcatttcatggtggtccataatttgttggagaatgtaacaaaaggaacgccgagaattcgatgccatggtattttcagactgttgctcgagtggtatggctggaaacgtatcatgcatcctatgaagtggacttgcattcaatcatggatgatcctatgaagtgtcggttaaccttggttgtgaccatctgattctgctgctgtctctgaagatggtgccttatattgaggccttccgagttcaaaccattctgtagtgtccagacatatttatccgtagtaatcagtttgcct

SEQ ID NO: 2921 - DNA, 1893 bp, Zea mays
  Clone ID: TF_ZmC42_48
cattgggtacctcgaggccggccgggaagcccggcccaatcgccggccgacactcacaagaacctgcctccctctggatcgctatctcttttctagtgcccagggaaagctagctagctcacagtcacagctgagctgagggaagaaagcaaggagagggagccagggaggaaggggaaaaacacgcggagagggtgagcaagaaagaaccgaggcggatcgccttctgttcctcctgccggctccgcgagaggaggcactgctcaggggggaagaaagaggtggaacaacgccccggggcagagcagagatgatgcgggagacgtacatggacgtgctgccgccggtggaccacatagccgcacggagcaactggttcccggcggcggcgcgtctgtggacggcggcggagaacaagcagttcgagcgggcgctcgccgggctcgacctctgccgcccggactgggaggaggtggcgcgggccatccccggccggacggtgcgcgaggtcgtcagccacttcaagcacctcgaggtcgacgtccagcagatcgagagcgggcaggtgcccttgccggcctacggcggcggggccagctcgttcaccctgcagtgggacggctacggccccggtccgggggacttcaggcacgggtaccgcttcgccggaggctgcgggaggcggcaccacggccgcacgccggagcaggagcggaagaagggcgtgccatggacggaggaggagcacaggttgttcctcctaggcctgaagaaatacggcaagggtgactggaggaacatttcgcgcaacttcgtccagaccaggacgcccacccaggtggccagccacgcgcagaagtacttcatcaggctcaactccggcggcaaggacaagaggaggtccagcatccacgacatcaccacggtcaacctgacggacgaccagccgccctcgccgtcccagtcctccctaatcaccagccaatcgaacgcaccagctccagctccggccgcggggatatgccaggtcccattggcggccgacgccaagcgacacggtgccggaactctgcccttcagctcaccgaaccggacctctgcggcgccggcctacaggatggagtttcatgaccaacaaggcctgcagtgtggccctctgcatgatcagttgctcgccagccagagcgtcctgttctaggcgcggtggcagcccaccctgcggcatggatcgaccaggtgcctagtgtataatacttgtggtatcgctctagcttcagcgcctgtattgaagggattagccttttgggagcataacagaaaggaggtcttcatttcatggtggtccataatttgttggagaatgtaacaaaaggaacgccgagaattcgatgccatggtattttcagactgttgctcgagtggtatggctggaaacgtatcatgcatcctatgaagtggacttgcattcaatcatggatgatcctatgaagtgtcggttaaccttggttgtgaccatctgattctgctgctgtctctgaagatggtgccttatattgaggccttccgagttcaaaccattctgtagtgtccagacatatttatccgtagtaatcagtttgcctattggtggtggtgcctgcctcaatctatgtttggagtttggacaagtttaattttctcgtatgaacgaatttcggtgaagagaagataaacgaagctgagtttgcaatgagtcactcagcattgctgctacttgtcaatatctctcatatagtcaactttttgctttggttcatcattttcttatagaaaataacagctttcttaaacccgctccactgttaagtgctcatatgtggcgtttttctgtcgatgatgctagctccaccgaat

SEQ ID NO: 2922 - DNA, 1231 bp, Zea mays
  Clone ID: TF_ZmC17859_1
gcccagcgttccatactcctggagatagaaaatatatagacagagctcgttactagtcgtagctagccagggctagctgtagctgaagtcatcatcagataaatatattcatcagcctgtaattaatagctagttttcagtggattagctagcttggcaatatatatttaactaataaggcggcggtggcatggacgcgatcagcagcctgctgctgcaggagggctggaggaagggcccgtggacggcgctggaggacaggctgctcaccgagtacgtgcagcagcacggcgagggcagctggaactccgtcgccaagctcacagggctgcgccggagcgggaagagctgccggctgcggtgggtgaactacctccggccggacctcaagcgggggaagatcaccccggacgaggagaccgtcatcctccagctgcacgccatgctcgggtgcaggtggtcggcgatcgcgcggtgcctgccagggaggacggacaacgagatcaagaactactggcggacgcacttcaagaaggcccggccgtcgcggcgcgcccgggcacagctgctgcaccagtaccagcagcagcaggaggaggagcgccgacagtacctccagagcctgcagctcctgcagcaggagcagcaacaacagcagctgctcctccagcagcagagtcagcagctggtggtgaaacaacagcagctggagcagcaaagcccgccggagcctgatcaccaggccgtgatggcgatgttggacagccagcagagcacggcggaatgctactgcagcccggtgccggtggtgccagagcagtgctgcgcgctcccggccgacgacgacgacgccatgctgtgggatagcctgtggaggctggtggacggggacgggcgcggctgcggcgacggcgacgactccagcggagtcgcatactagccggctagtacgtacgtgtgcgtgtctataccagtgtaaaaaaacaaagcgggatgaagaggaggttcttcaggtttcagctgctgcaaggcaaggatactgctagtggtagtagagacatgctaattttgcaacgagaatagttgatcatgtttcatgttttttttattttacccatgaaccatgagcaagtggcattgtatcaaaaggccctctgtttatacaaggtcgaaataccttcatgtaactttggtttcaagaataaagaccgtgttttagcatggatttatt

SEQ ID NO: 2923 - DNA, 862 bp, Zea mays
  unsure (1)..(862): unsure at all n locations
  Clone ID: TF_ZmC1193_2
gcccgggcccgtnagcacttagcccccaacaacaacaacagcaccaacttccactcctgcaaacccaacccaacccaacccaccaccgagcacaagaaaaaggagagccatcggcggcggcagaccatcgtctaaagagatagtgaggcagcaacgatggggaggtcgccgtgctgcgagaaggcgcacaccaacaagggcgcctggaccaaggaggaggacgaccggctgatcgcctacatcaaggcgcacggcgaggggtgctggcgctccctgcccaaggccgcggggctgctccgctgcggcaagagctgccgcctccgctggatcaactacctccgccccgacctcaagcgcggcaacttcagcgacgaggaggacgagctcatcatcaagctccacagcctcctgggcaacaaatggtctctgatagcagggagactgccggggaggacggacaacgagatcaagaactactggaacacgcacatcaggaggaagctgacgagccgggggatcgacccggtgacccaccgggcgatcaacagcgaccacgccgcgtccaacatcaccatatccttcgaggctgcggcgcagagggacgacaagggcgccgtgttccggcgagacgccgagcccaccaaggcagcggcagcggcgatcacccacgtcgaccaccatcaccgtagcaacccccaccaccagatggactgnnggccagggaagccgctcaagtgcccggacctgaacctggacctgtgcatcagccccccgtcccacgagggacccatggtggacaccaagcccgtcgtgaaagaggaggccggcgccggcggtcggcgtcgtgggcctctgcttcagc

SEQ ID NO: 2924 - DNA, 2224 bp, Zea mays
  unsure (1)..(2224): unsure at all n locations
  Clone ID: TF_ZmC21016_1
ccggccgggccgggctcgccatttccatttccttgcccttgccagccagagcgagactccaccgcttcctctccgccgcgtcctcctcccctcccttccgttcctcacggctctccggactcgccccgcggctggccgtgctgagtttcgttctctggccggcaaagaagcgatttttttgtgctttctggacggatcccggccggagaagggaccgaatttccacgacctcgaccgccggctgctcctctgctgggctctccgtgcgcaagaagagcctaccaaggtgaatccggagatttgagctccgggcccgcctcatggagtccatggcgcaggaaagggacgcgttggattcacctgccttgtcgattgacaaaaggctgcggtcggatgctgtcgaatcacccctggtggatgatgcaacgcaacccaaggagggggcggacggttaccctgtcaaggttcggaagccttacacgatcacgaagcagcgagagaagtggacagaggaagagcatgggaagttcctggaggcactgaagctctatggtcggtcttggcgccagatacaagaacacattggcacaaagactgctgtccagattcggagccatgctcagaagtttttctccaaggtcgtgcgtgaacctggggccagtaattcaattgagatcccaccccctaggccaaagagaaaaccactgcacccataccctcgcaagtgtgccgactccaccgtgacaaatgctccaatgggcgaaccgaagaatgctcctgtttcatcaccatctggttctgaccaagagaatggttcgcctgtctcggtgttatctgcaatgcagtcggatgcttttggttcatcaatatcaaacccatcaactgggggcacgtctcctgcgtcatcagatgatgggaataatgtccctgagatagtgaatggggaggaaaatttgctcactcagcaaatagaagaccgatcccatcaggaatcaaagcaggacaacagtgatggtgagctgtctgaagaagattcatcacgagtccaagaaaccagtttgaagctttttgggaagacagttatcatcccagacccaaagaaagtctgttcctcggatgggggagctggagatgatacacaagaagtgatgcaaacatcctgggttggaggaggggtggcagcataccctgcccataacggatggtttcttccgttccattctttccctgctcatatgtatgagtcaggggatgctaggatttcccctcttcatatgtggtggccttactacggttttccggccggccatccaagagggtttggcacagggctgcttaacgaaggcgccattgagagtgatgccgacaatagcccatcggttgaaactaattctgatcgcacgggcaatgttcatgttcagacgacgacccctaccattcacaacaatgctgtcaaggagtcagttgggccagttgagatgccagagtcgggtccgagcattgagctgaaacccagcgcgaactcggcctttgtaagagtgaagccgagcagcagcgtcagcggagaccaatcactggtaagggggttcgtgccatacaaaagatgtaaggtcgaataacccaacccaacgacatacctgtctgctgctaatcttactggagattgattgatcctgaacagtgtagggactcgagtggcacacatcccttgttccagtgtgcctgccattttttgcctgcaaaattggctgctggtgtatgtgtaatattgtcgttttactgcctgcagcggaatgtaagatgccgcaggcttgttgctgtcacctaggcgtagactgaacagatgttgtgcagggatcgccgatctctgcacccttatgtttgttgtacgaggaaaaccggattctgttgaactctcgtgttcaaaaattcattgattcctgatggaaactgatttgtaaatgaacatggcaatgccgccggacaggtcacagtgtatcctgtaagaccaattcttttggtccttgaacaatggaatgcagactaggttttggtcattcaaataaaaaataaggtaagatgttagagttcgaattcttctagttgcttgttttttgtttttgtgattttctgaactgaaagagtgcgtctgggctgatgctgtganagaaagtgtaggatgataacatataaaaaaatatagaaattaaaaaagagaataagt

SEQ ID NO: 2925 - DNA, 737 bp, Zea mays
  Clone ID: TF_LIB4764-081-R1-K1-H2
ccggccgggaaggaaatacacagagaccgggcatataaatgtaagcaagaccaatgtaaggcctcccccccaggggggcggggcagcagcggagggggaagatgacgccggtggtcctcaggctgttcggcgtggacgttcgccgggttggcgccagcggggagccggaggagtcgccgatggacctgaggaagagctccagcatgcccgacctcaccatcaacccgctgctgacgccggaggagaaagagggctgcaaggggtacgcctccgacgacgcggagctggcgtccggccagcagaagcgccgccgtcgcaaggcacaggacaggaagaaaggaattccatggaccgaggaggagcacaggaagttcctggacgggctaaggcagctgggcaagggggactggaggggcatctccaagggcttcgtcaccaccaggacggcgacgcaggtggccagccacgcccagaagtacttcctccggcagaccaaccccgggatgaagaagcgccgggcgagcctcttcgacgtcggtatcgcggactacaaggacaaccaggtgccaggccctcagagcatcgtcactgccaaaccggcgcctacgcaggagataatccacaccgaccgcggcgacgtccccataccaagacgatatagaggcctcggagagattttaggcagtaacatgcaggttaatcaactgactgactactactattttcacaagaactcc

SEQ ID NO: 2926 - DNA, 1446 bp, Zea mays
  Clone ID: TF_ZmC13262_1
gtcgttgtagtatagtcgccagtacttcggggcccgcggcccaggggggcggggcaccacaggtactcttctcctgcttggcctcttgtgccgcaaccgcgagtgcggcctacggtagcctccaaagcagcacatccaaagcagggaccgaatggacatggaccggccggaggaggaggggcagcagcggagggagacgatgacgccggtgctcctcaggctgttcggcgtggacgtccaccggggtggcggcagcggggagccggaggagtcgccgatggacctgaggaagagctccagcatgcccgacctcaccatcaacccgctgctgtcgccggaggagaaagagggctgcaaggggtacgcctccgacgacgcggagctggcgtccggccagcagaagcgccgccgtcgcaaggcacaggacaggaagaaaggaattccatggaccgaggaggagcacaggaagttcctggacgggctaaggcagctgggcaagggggactggaggggcatctccaagggcttcgtcaccaccaggacggcgacgcaggtggccagccacgcccagaagtacttcctccggcagaccaaccccggtatgaagaagcgccgggcgagcctcttcgacgtcggtatcgcggactacaaggacaaccaggtgccaggccctcagagcatcgtcgctgccaaaccggcgcctacgcaggagataatccacaccgaccgcggcgacgtccccataccaagatatagaggcctcggagagattttaggcagtaacatgcaggttaatcaactgactgactactactatttcaacaagaactcccatgttcccgcggggacttcgctctccatggcctccggcctggaaacggcctcgaccgtcgacagcctggagctcagcatcgccgtcaacggcctggagctcagcatcgcgcccccttcccggtgcgtctgcggcggcgcggcgggggccatcaaggttctgtgactcggccgggacgccgagggagctactcgcatttggcttcccctgcgagcatgcgtttcatcaagtattatcagcctcgtcaggctgccgcgcgcagccgggtttcggtcttgctggttgtgttggtgtgttctgttctgttttgttgtgcgcaaggaatgtttgtgaagtgcattgcgttgtaatacactaatactagcagtgttgtggaatggaattaggggagagggatcagctgggatttgggggttgatgggtccctgtctcgacttcgagtgggttcgtttcgtgttccaatccgaggaggcggcgacgggcgcaaggcgtcgtgtgggtgtggctctgagctccccgatcccgcccaataattggaccgtgccgtccaaaacgcatacgccaactaatcttcggaagaaagtcgcagctttacgttcaggggagagggatcc

SEQ ID NO: 2927 - DNA, 1912 bp, Zea mays
  Clone ID: TF_ZmC16180_1
tgtctctccctcagctccctccagccgccgattaatcgatcgatcacctattcacctagctagccggccagttgctggttctcttcttcgcatgctgccgattaatttattccacgctcgattgcggtggcggctttagttaatagttatagggagcttcaagatagcaagcaagaaacggtgcaggattattggaggaatagagcttcaattcagatagcagctgcaggctgctgttgattcggcgatcggtcgatcgaggatgtgcacgaggggccactggaggccgtcggaggacgagaagctgaaagagctcgttgcgctgtacgggccgcacaactggaacgccatcgccgagaagcttcaagggagatcaggtacgggtgctgtgtgctgatgctactatgtctgtatgattatcaaaactaaaaatcgtatattattaagcatgtatatacatgtctgagtttttttttcgggttggatttggtgagctatatatatccaccaagagctaatttccttccttctcgttgatccaccaatattgttcgcgttggggtttgactttgcaattggggcatgcatgcatatgggtttagttagttaaaggaagtttagatctgttagggtgtcatatcagagagaggtgccattttttagctccactatatactctcgccttgatgtgcatgtcatatccgtgtcacttgtagagcaattttgtctagaaatataccctctctatatatctaccgagttcagcttttcttgctttctaatttacctgagtacgtggccgtgttccttctcgcacgagctactggccatggagtagctaagctagctagcttgcgcatgcacgccccaagagagaacagctagctagctagcgtgattgaggagctgtataataacctaattaaaatgaaaaattgaatcttttcagggaaaagctgcaggctgcggtggttcaaccagctggacccgaggatcaaccggagccccttctcggaggaggaggaggagctgctcctcgcctcccaccgcgtccacggcaaccgctgggccgtcatcgccaggctgttcccggggcgcaccgacaacgccgtcaagaaccactggcatgtgatcatggcgcggcggtgcagggagcggatgcggctgtcgaacaggcgtgccggcggcgctgcttccggtgctggtgctggtgccgtcgtcgccaccggtgctgctgccgaagatggcagtaaccctaggagcgccaataagaagccgaggcctgacgcgagcggcatggcctccttgctagacaagtaccgaagagaattttccgccgccgtcccgtttgccattaaccatgatagcaatcagcagcagggctattgttcaaatactaacgaaggtgaatactgctactactacgtactgcatgtatgctagctactaccatatatacaagacaaatttttcatcaactttactaattacatgccatttcgaatctgatctgcagacgcaaacaaatcagtcgaattctacgatttcctccaagtgaacgcgaactcgagcgacaccaagtgtggttcgagcattgaggagcaagaggcggagagccgggatgacgatcaagccgaagggcaggtgcagttcatagatttcctggaggttggggcttcccatcgccgccggtgatttttatctatatatttaactagggatgcatccaaagcaggttgtaatgctttgtgaaagaggcaggcatgctgcaaatagcaatcgtcgtctaacaccaaacgtacttgtagaggaagcaaaatgcaccgtgcatatgacatattgtaatttattgttgtatacatatatctgtccatatatatccaccgttggggggacatgtgcaaaattaaac

SEQ ID NO: 2928 - DNA, 1088 bp, Zea mays
  Clone ID: TF_ZmC14028_1
aaaaccacccgcgctccgccaatccagagagccagccagcccgaggtcacacagcagcgagctcggtcttctcgccaggacacgaacacgaccccagcaggcggcaggcaagccacgctctctcgacggacggacgttaatcgagacatggggcgctctccgtgctgcgagaagatggggctgaagaggggtccgtggacggccgaggaggacaggattctggtggcgcacgtcgagcgccacggccacagcaactggcgcgcgctgcccaagctaagcaggcgggcctgctccgctgcggcaagagctgccgcctccgctggatcaactacctgcgccccgacatcaagcgcggcaacttcagccgggaggaggaggacgccatcatacagctccaccaaatgctcggcaacagatggtcgacaatcgctgccaggctgccggggaggacggacaacgagatcaagaacgtctggcacacccacctcaagaagcgcctggagccaaagccagccagccagcaggcgcccaagcgcaagcccacgaagaagcagcagccgcagccggagcccgagcccgtaacgacgctcgaggggccggccggagccgtgccgccggtgtcgccggagcggtcactctccacgacgacgtcgaccaccaccagcaccgcggactactcggccgcctcgtcgctggagaacgcgggcgacagcttcacgtcggaggaggactactaccagatcgacgacagcttctggtccgagacgctggcgatgacgacgacggtggacagcttcgagtccggggtgcagcaggcggagggcagcttcggcaagtcggcggcggcgccgtcgtcgaccaacgacgacatggacttctggctcaagctgttcatgcaggccagcgacatgcagaatttgccccagattatttaggcgggaaacggacctagacggtttgttatctctcggctgatgatgatattctttggcgcgcgctcacgattctttgaatctttgttctgctccgttttcggtggatgtatatatcccactgaaaccttgtgaagcggaaagcaattgcttcgt

SEQ ID NO: 2929 - DNA, 945 bp, Zea mays
  Clone ID: TF_UC-ZMFLB73085C02_FLI
ccacggcaatcgatcgatcggtgctttgatctctgagcctgagcaagcggtcgagctcaccaaccgccacgctcaagacaggtcgagtagctagctagctgccggagtggaaaaggaggcggtgcagtggcatggggaggccgccgtgctgcgacaagatgggggtgaagaaaggcccgtggacccccgaggaggacctcatgctcgtctcctatgtccaggagcacggccccgggaactggcgcgccgtgccgaccaacaccgggctgatgcggtgcagcaagagctgccgattgcggtggacaaactacctccggccgggaatcaagcgcggcaactttaccgagcaggaggagaagctcatcgtccacctccaggctctccttggcaacaggtgatggtcactcgcctgtcgtcgtcttaaagcttttgttcccgttttgttttttccgctgtaacaaatggatcggacaaaccaaatcatccacggcacgaggtgatcgtgtgctgagcttgttgatctgcatgccgtgcacttgttgatgtgtcgtgcaggtgggcggccatagcatcctacttgccgaagaggacggacaacgatatcaagaactactggaacacgcatcttaagaagaagctgaagaacatgcagggcggcgaagggggcgcgggagggaagcgcccggccgttcccaaggggcagtgggagcggcggctgcagactgacatccacacggcgcggcaggctctgcgcgacgcgctctcgctggagccttcggcgacgccgctggccaaggtggagcctctgccgacggctccggggtgcgcgacgtacgcgtctagcgccgacaacatcgcgcggctgctggaggggtggctgcgcccgggcagcggcaaggggccggaggcgtcgggttcgacgtcgacgacggccacgacgcgcca

SEQ ID NO: 2930 - DNA, 1414 bp, Zea mays
  unsure (1)..(1414): unsure at all n locations
  Clone ID: TF_ZmC13187_2
cattgggtacctcgagggccggccgggaaaaaaattttcnnnnaaaaaaaaaaaaaaaaaaaaaaaaaaaaaaaaaaaaaaaaaaaaaaaaaaaaaaaaaaaggcaaaaccagtaggcccgggaggcaactaagacaaagtggcgtactcttctctgtactagctttcttcttcctcctcctcttcctcctcccaaacagactggatttcatcaagataatcctgaaactggagccaacaagcagacagagaaagaagagcaagaagaccggctcccagccgatacaaggtaggagtgagcagcgttagatcagttttcatcacaggatcgatatggtgacagtgagagaggagactcgcaaggggccatggacagagcaggaggacctgcaactggtatgcactgtccgtctgttcggtgaacgtcgttgggatttcattgccaaagtatcaggtttgaggggtggggatccacaaattaggtagctaaattgaagtcacccgcgctaagtcgcaaaagcagctatcagcctctctgaccgactctattcttgcttcccctctccccttctgtatcttcatgcagggctcaaccggacaggcaagagctgccggctgcgctgggtcaactacctccaccctggcctcaagcgtgggcgcatgtctccccatgaagagcgactcatcctagagctgcacgctcggtggggaaacaggtggtccaggatagcacgccgcttgccagggcgcactgacaatgagatcaagaactactggaggacacacatgagaaagaaggcacaggagaggaagaggaacatgtctccatcgtcgtcctcgtcttcgctgacttaccagtcaggctacccagatactccatcaaccattggagttgagggacaggagcttcatggtggcagtggctgcatcacaagcatcctgaagggcacccctccggacatggatggctatcccatggaccagatatggatggaaattgaggcgccacagatgccctcggaggagagctttgttggggggaaccataatgtgtgcagcagccttgccaccccgctgccaccaccaactgtctgggaatactacccagatgcctgctggaaggttgacgatgagatcaagatggcaacacaatttcaatttggttatagtgaaggagttgggccctgcttctgatgccataaatattgggtcagattactaagttatacacctacctagcagaagtgaagtgcttttgtagaaacaagctttagcatggatctgaatatttatctccgcgcttagaattgcaggtctatggatctatgcatggttgctatgtatctatctagtgtgcaagacaagattatcttaatttgtccttgatgctatggaatacaagggcaaaggtact

SEQ ID NO: 2931 - DNA, 1601 bp, Zea mays
  Clone ID: TF_1491932
agccagcacagcacacacactggaaagtgcaagctgtagtgagacctgcgcgactgccagcgtgtatccgcgcggcaaggagcgtagcgccggtcgtcggcccgcacggccaccaactcccttggacgcacgcgcgaccagctgctaaccgtgcgcaagtagtagtgcgacttcgccgccggccgggatcgctagctcgatcgatcggcgggaccacatacgactccggtgtggccagtggcggccggcccggggaacgcacgtcctgcgagcgagcgagggcagacgctagctgttgccgggagctagccggcgcgcgatggggagggcgccgtgctgcgagaaggtggggctcaagcgagggaggtggacggcggaagaggaccagttacttgccaactacattgcggagcacggcgaggggtcctggaggtcgctgcccaagaatgcaggcctgctccggtgcggcaagagctgccggctccggtggatcaactaccttcgggcggacgtcaagagggggaacatctccaaggaggaagaagacatcatcatcaagctccacgccaccctcggcaacaggtggtccctgatcgccagccacctccccggccgaacagacaacgagatcaagaactactggaactcgcacctcagccggcagatccacacgtaccgccggaaatacaccgccgggcctgacgacaccgccatcgccatcgacatgagcaagctgcagagcgccgacaggcggcgcggcggcaggaccccgggccggccgccgaaggctagcgccagcaggaccaagcaggcggacgccgatcagcccggcggcgaggcgaaaggcccggccgcggcggcgtcgagcccgcggcacagcgacgtggtgaacccgggcccgaaccagcccaacagcagcagcggcagcacgggcacggccgaggaggaggggcccagcagcgaggacgcgagcgggccgtgggtgctggagccgatagagctcggggacctagtctggggggaggccgacagcgagatggacgccctgatgcctatcgggcccggcggcacgactcggctgccctcgaagggcttggcgcggtcggctgagaggcccaggtggacgacctgttcgacatggactgggatggcttcgcggcccatctgtggggcgggccggagcaggacgagcacagcgcgcagctgcggcaggccgccgagccgctggaagttgctgctgctgctgctgctgcgacggcggcccgcaccccggacgatcgcgagctggaggcgttcgagacttggctcctgtccgactcgttctgacggctccggtcaccggaccgatcagacagaccaaccaaggtggcccggccatatggtcgacgccgctagtaggcgttgctcgtgtgtacagtttttttttcttttttgtagattttgttcttagctcttgctgtttcgtgtatggcatgtagaatagagagcagagagtcgtatggcattgtaaaggtagttctcccgccggtgaagtgaagaccaataaaaaaaagcagcgcagcagtaggcgctgctgcagcctgcacggcggcgttttggca

SEQ ID NO: 2932 - DNA, 661 bp, Zea mays
  Clone ID: TF_ZmC1193_8
gctctcgaccgatcggcgccacgagtgctttgctttctggctgctgggagcgcgccatggggaggtcgccgtgctgcgagaaggcgcacaccaacaagggcgcgtggaccaaggaggaggacgagcggctggtggcgtacgtccgggcgcacggcgaggggtgctggcgctcgctgcccaaggcggcggggctgctgcgctgcggcaagagctgcaggctgcgctggatgaactacctccgcccggacctcaagcgcggcaacttcaccgacgacgaggacgagctcatcatccgcctgcacagcctcctgggcaacaagtggtccctcatcgccgggcagctgcctggccggacggacaacgagatcaagaactactggaacacgcacatcaagcgcaagctcctcgcccgcggcatcgacccgaagacgcaccgcccgctcggcgccggcgccgacgccgccgcgccacccggcgtggtcgcgcaccgggcgctgctgcaccgcgcagccctcgtcgagctcgccgtgaagccggcgccggcggagtcatccgacgacggcggccggagcagcggcaccagcagcggcggcggcggcggcgccagcgtggaggagccgcggtgccccgacctcaacctcgacctgtccgtgggcccgcc

SEQ ID NO: 2933 - DNA, 1808 bp, Zea mays
  Clone ID: TF_ZmC29713_1
cgccagcacggcacacacactggaaagtgcaggctgtggtgcgacctccgcgactgccagcgtggctcccgggggcatcgagcgtcgcgccggtcgtcggtacgcagggccaccaactcgctacgacggagccgctaccagctgcgaaccgtgcgcaagtagtagtgcgacttcgccgccggccgggatcgctagctcgatcgatcggcgggaccacatacgactccggtgtggccagcggcggccgggccggggaacgcacgtgctgcgagcgagcgagggcagacgctagctgttgccgggagctagccggcgcgcgatggggagggcgccgtgctgcgagaaggtggggctcaagcgagggaggtggacggcggaagaggaccagttacttgccaactacattgcggagcacggcgaggggtcctggaggtcgctgcccaagaatgcaggcctgctccggtgcggcaagagctgccggctccggtggatcaactaccttcgggcggacgtcaagagggggaacatctccaaggaggaagaagacatcatcatcaagctccacgccaccctcggcaacaggtggtccctgatcgccagccacctccccggccgaacagacaacgagatcaagaactactggaactcgcacctcagccggcagatccacacgtaccgccggaaatacaccgccgggcctgacgacaccgccatcgccatcgacatgagcaagctgcagagcgccgacaggcggcgcggcggcaggaccccgggccggccgccgaaggctagcgccagcaggaccaagcaggcggacgccgatcagcccggcggcgaggcgaaaggcccggccgcggcggcgtcgagcccgcggcacagcgacgtggtgaacccgggcccgaaccagcccaacagcagcagcggcagcacgggcacggccgaggaggaggggcccagcagcgaggacgcgagcgggccgtgggtgctggagccgatagagctcggggacctagtctggggggaggccgacagcgagatggacgccctgatgcctatcgggcccggcggccacgactcggctgccctcgaagggcttggcgcggtcggctgcgaggcccaggtggacgacctgttcgacatggactgggatggcttcgcggcccatctgtggggcgggccggagcaggacgagcacagcgcgcagctgcggcaggccgccgagccgctggaagttgctgctgctgctgctgctgcgacggcggcccgcaccccggacgatcgcgagctggaggcgttcgagacttggctcctgtccgactcgttctgacggctccggtcaccggaccgatcagacagaccaaataattgggtcacgtgtgctcgctcgctcgctcgctgccgtcgcgtgggtcttggttcagatggccaaataattgggaaaaaaattctacgcgccagggccgtaaagccaccaccgtgcgctcctgatgtcgatgcctgccgcgtggagctcttgcgtatctaacgctcccacgacaatcacccttccagacggctcgaattacatacgacaggatcggctccgctctactccgttctgttcgcttctgctttaggtgcgtgcctagcagatggtgaggcggcgtcgcgcggccctcccgacggctcgccggccgcgctacggggcctgctgcagcagcccctcctccacgcctgtaaaagagctttgtatttacctgtttgtttgtgcttttgtgcaatggaataaacaatgatattatactgaataaacatgaatgttctgagac

SEQ ID NO: 2934 - DNA, 897 bp, Zea mays
  Clone ID: TF_ZmC234163_1
atcgtctccggtctccctcttcaacttccccgaaacgaaagcttacttttttatactaacttctagggtttcaggactaacctccctcccttcgcgccatctcccgcggtgctgcctcctctggcgccgattcgccgctgggagccccaattctataacccctctgttcgatctgggatccgctagattcgttggggcggtgatgagggcgatggcggaggtgatgcaggaggggtgcgtggagaatcggcagccactggcggcttcgagctcgtccgtgtcggatggcagcagctgtggcggcggagagcgggcggggacgtcgccgccggtgtcaagctccgggaattccatctccgttctgagacgaacaagtggaccgataagaagaactaagggtggctggacactgaaagaggatgaaacactgcggaaggcagttgaagctttcaagggtagaaattggaaaaaaatagctgaattttttcaggacagaactgaggttcaatgtttgcatcgttggcagaaggttcttaatccggaacttatcaaaggcccttggactcaagaggaagatgaaaaaatcattgaccttgtgcgcaagtatggaccaacaaaatggtctatcatcgcaaaatcattgcctggccgcataggcaagcaatgccgagagaggtggcataatcacctgaatccagaaataaggaaagatgcttggactcctgaggaggaaagggcccttattgatgctcatcaagtgtttgggaataaatgggcagaaatagcaaaagttcttccgggaaggactgataattccataaagaatcattggaacagttctttggaaaagaagtagaaagctatagtaacagcagtgttctttcagttttcaagctg

SEQ ID NO: 2935 - DNA, 626 bp, Zea mays
  Clone ID: TF_LIB4761-014-R1-K1-G7
accctcgaggctggccgggcagaaataaaaaggaaaaatccgggagaggataacaaaaaagaaaaaaacccaaagagattcctctcaccaccaccaaccctagacgatcctcccccgccatgatgcgggacggcgtgcctccgtcggtggccggctccggcggcgcggcgggcggcgacgggcccaggcgatgctcgcagtgcgggcaccacgggcacaacgcgcgaacctgcacggggcggcccgtcaagctcttcggcgtgcgcatcgggggcaagcccatccggaagagcgccagcatggggaacatcgcgcacctcgccgcggagggcagcggcggcagggaggaagggtacggctccgacggggagcgcccgcacaagaagcgaggtgaggcatggactgaagaggagcacaagaagtttctgcttgggttgaataagctagggaaaggcgattggcgtggtatatcccgtaaatatgttgtttcaaggacacctactcaagtggctagccatgcgcaaaagtatttcaatcgccaaacaaatgtgcctggaagaaagagaagatcaagcctattcggtttggtgattgttgacccgtctgctcaacttccgctctcgcgt

SEQ ID NO: 2936 - DNA, 1497 bp, Zea mays
  Clone ID: TF_ZmC2821_1
cattgggtacctcgaggcaggcgggggggcttcgaacccctagcgtccggaaaaaagaaaaaaaccacaaagagattcctctcaccaccaccaaccctagacgatcctcctccgccatgatgcgggacggcgtgcctccgtcggtggccggctccggcggcgcggcgggcggcgacgggcccaggcgatgctcgcagtgcgggcaccacgggcacaacgcgcgaacctgcacggcgcggcccgtcaagctcttcggcgtgcgcatcggggacaagcccatccggaagagcgccagcatggggaacatcgcgcacctcgccgcggagggcagcggcggcagggaggaagggtacggctccgacggggagcgcccgcacaagaagcgaggtgaggcatggactgaagaggagcacaagaagtttctgcttgggttgaataagctagggaaaggcgattggcgtggtatatcccgtaaatatgttgtttcaaggacacctactcaagtggctagccatgcgcaaaagtatttcaatcgccaaacaaatgtgcatagaagaaagagaagatcaagcctattcgatatggtgattgatgacccgtctgatcaacttccgctctcgcgttcatcttcacaagaaatggagcagcaacatttagatgatccacagcctgttgcagccctgcctgcacctgtggtctctccagctactgtggtacctcctgtgcctgtggaagtgtctgcttcagttccatcgccagttcaggtcccagttccagtttcagccccagtgatgacatctcagcctatggaacaggactcagataccacaagttcaattgctggagaggcaggaacggtgatgccaggagccatgcccccctatctttatccaatgatgattcctcctccatactaccatactgcttttgtaccaatgccctgctacggttatgttcctttttactgtgagccacaaggtgctgcacaggctccgcatgaggttgtcaagccagtggctgttcattcaacgcctccactgaatgccaaagacctttacaacatgtctgaattgagcctgaagggcgactcgaatgcaaacggtggtgtgcctgcttcccccttgcctccgaagccgatcggtagaccagagaggcaatctgctttccatggcaaaggacctacacctaccggtggctcgtcaggtggactgattcctgcagtcaagtgaattcgattatgctcctaaacatgccttcatgtgtatgtaatactagaaatagccaaatcgtaatagccgcctgtgctgctaaaatggtggtgtgttttctagcaaaatatctatactgctcattttagccttcaccagtttggaagtcatgatccgagggtaaatatattgttagcttgttgtttttgcaatagtcttctttttttccccatcaatttgccccaattttcttcatcaatccttaaagttatcaattattatttgtttt

SEQ ID NO: 2937 - DNA, 868 bp, Zea mays
  unsure (1)..(868): unsure at all n locations
  Clone ID: TF_ZmC2204_2
ctcgaggccggccgggacaaagataagactagtggcttcttctccctaatagctaccttcttcctatcaggctggagttcatcaaggatttgaacctggaactggagcccacaagcacacagaggaggaagaacaccaagactggttcccaacctatccaaggtagaagcgagcaacgttagtgtggtagtaacatggtgactgtgagagaggagatgcgtaaggggccatggacagagcaggaggacattcagctggtatgcactgtccgcctgtttggtgaccatcgttgggacttcattgctcaagtctcaggtttgaggggttggagaactacaacttaggcctcaacaggacaggaaagagctgccgcctgcgctgggtgaactatcttcaccctggcctcaagcatggccgcatgtcaccacaagaagagcgcattatcattgagctccatgctcggtgggggaacaggtggtctaggatagcaaggaggctgccagggcgcacagacaatgagatcaagaactactggagaacacacatgagaaagaaggcacaggagaggaagatgggcatgccatcaccttcatcctcatcctcctcactgacataccaaacctgccttcttgacaccattccagtcattgggatgggcagtggtgacactcacaatggtagctgtgtcaccagcaccctcgagaacacacagagtgtcatggatggatatcccatggatcagatatggaaggagattgaggcaccacatgcacctaacttgctgagtattgctgaagggaaagagaagacgtgcagcagtagcccctgtcatctaccatcaccctgtatgtgngactacaatgccctg

SEQ ID NO: 2938 - DNA, 778 bp, Zea mays
  Clone ID: TF_LIB4739-022-Q2-K1-A2
aactgatcatcttctctagatcttctcatcataccgataccggcctcaacgccctctttttcccagcctcacaaccaattcctgtttcagtcgatcgcagttagcatggccacgacacagagctgtcagagcaggagcagcgcctgcagcaaggctgctgcttgcttcccggccgccgtagcggtcgacgaggagcacggccaccacagccaccagctgaagggaggagcgcaggaggaggctgagaacgacaataataagccggagctccggcgtggcccctggacggtagacgaggacctcaccctcgtcaactacatcgccgacaacggcgagggtcgctggaacaacctcgcccgcgccgccgggctgaagcggacgggcaagagctgccggctgcggtggctcaactacctccggcccgacgtgaagcgtggcaacttcagcgccgacgagcagctgctcatcctcgacctccacacccgctggggcaaccggtaattagtcaacttttccctcccaagtccgagatcgatcaccgacacgtcgtcttagcttgcacgtgccggagttcttggactggaaatcgtgtggacggccgcacggtagccctgttaaaaacggcagcttgctctccagtccagtagtaatagaagctagtgcccacgtacatgatgcacctgtcactgcaccgagatcgtatggtatttgtacgtacgtgcacaggtatatacaactatcccccggcccgtaccgtatagacgtggagccgtacgta

SEQ ID NO: 2939 - DNA, 1055 bp, Zea mays
  Clone ID: TF_UC-ZMFLMO17291G03_FLI
gagcagactgcaatgaatcatatcctcaagaggataaaaaaactattacctcctgtgcagggcatcagcgacaggaaaagagagatgaatgaacgaacctaatccatccatcagcagcgtaaccaaatcaggcacaggtttgagtattaaaccagtggaagtgatgagctgggagcaggcctaacccttttccaccaactctacaagagctcccgcgatccagtcaagtgccctataaaatccagccccgcttggcttcacccacccttgggctcgcaatcgcagcaacgatggggagatcgccgtgctgcgagaaggcgcacacgaacaagggcgcgtggaccaaggaggaggacgaccgtctggtggcgtacatcaaggcgcacggcgaggggtgctggcgctcccttcccaaggccgccggacttgtgcgctgcggcaagagctgccgcctccggtggatcaactacctgcggcccgacctcaagcgcggcaacttcacggaggaggaggacgagctcatcatcaagctccacagcctactcggcaacaagtaggcagcccgaccgacctcaagcactaaggcacccactaaggcactaactgtgttgtctgtgtatgatctgtttgttgggtcacagatggtccctgatcgctggaaggctgccgggcaggaccgacaacgagatcaagaactactggaacacgcacatccggcggaagctgctgagcagggggatcgacccggtgacacaccgccccatcaacgagcacacgtccaacataaccatatcgttcgaggactggggccaggggaaggcgctcaagtgccccgacctgaacctggacctctgcatcagcccgccgtgccaggaggaggaggaggccatgctgctgaggccggtgaagcgggaggaggccgggctctgcttcagctgcagcctggggctccccaagagcgcggactgcaagtgcagcaacttcctcgggctcaggaccgccatgctcgacttcagaagactcgagatgaaatgagagcttccatccatctctgc

SEQ ID NO: 2940 - DNA, 1403 bp, Zea mays
  Clone ID: TF_ZmC2941_1
attgctctccaaccaacaggcaaccaaacctcgtctcgtcttctctccgctaccaccaccactgctcgttttacagaaaccggaaggaaccaaacgcctttccgccccgggccgccgctacccaagcccagcaaccaccactcgttgtcgtcgactactaggcggcaagcaggcgtcctgtttttttttttttggtcctcgtcgtcgtccggactccggacaggacaggacatgggcgcggaggcggcggagcgcgacagaatcaggggcccgtggagccccgaggaggacgaggcgctgcggcggctggtggagcggcacggcgcgcgcaactggacggcgatcgggcgcggcgtcccgggccggtcgggcaagtcgtgccgcctgcggtggtgcaaccagctgtcgccaagggtggcgcgccgccccttcacggccgacgaggacgcggccatcgcccgcgcccacgcccgcctcggcaaccgctgggccgccatcgcgcgcctgctccccggccgcaccgacaacgccgtcaagaaccactggaactgctccctcaagcgcaagctcggcgccgccgccgccgcgtccggttcggcggtttccgctgacgactccgccgccgccgccgagaccgaggcgcgccggggcaagatgatgatgatgagcatctcgccgcccgacagcccctcggggtcggggtcggggtccgaccgtagcgacctcagcagccacggcgccgggtccgggtccgggtccgggtccggccagatttaccgccccgtggccgcgcgctccggcgggttcgagccggcggactgcgccatgagccgtccgcaggaggaggacccgctcaccgccctcagcctctcgcttcccggcacggaccagcggtttcaccaccacagcgccgccgccgacagccacttccaggagctcccgccgtcgccctcctcacccgcgccctcggcctacccgttcagccccgagttcgcggcggcgatgcagcagctgatccgcaccgaggtgcagcggtacatggcgagcgcgggcctgcgcgccggctgcggcgccgttggcgcgaccgacctctgcatgccgcagctggtggacggcgtcatgcgcgctgccgccgaacaggtcggccggatgcagtagccccgcgcccccggcgggggcatcaaaccgtcagtgctcccaaatcgtcgtctagctagggcgaccgcaacgcaacggttgttggagtagcaaacttggttttaaggtggagggaaaaattggctgggctgaaagcagaaagccttgtaatgtacatgaaagaaacggaacggatggcgcgctacaatctgagctcgccattgccgcatatatctgctttaagagagcattgcgctgccttgcct

SEQ ID NO: 2941 - DNA, 957 bp, Zea mays
  Clone ID: TF_ZmC28328_1
ggcagcgacgatgagccggcggtgcgcaaggggccgtggacgctggaggaggacctcatcctcgtcagctacatctcccagcacggggagggctcctgggacaacctcgcgcgcgcagctggactgaaccgcaacggcaagagctgcaggctgcggtggctcaactacctgcggccgggggtgaggcggggcagcatcacggcgggggaggacacggtgatccgggagctccacgcgaggtgggggaacaagtggtccaagatctccaagcacctccccggccgaaccgacaacgagatcaagaactactggaggaccaggatccagcagaagaagcagcagggagccaagacgacgcagcagcgggaaccgtcgacgaccgccagctccggcgccggggacgactactggtgcaccaagcccgaccccaaccagcaagcgcactactgcctgcagaaagccgccatggcagctgcgactgcgacgacgagcgcggtcgtcgtcagcagcgaggacgacgcgccgtcggcggcgctgacgagccaggacagctccgcggcggccggcggagactggtacatgcaccagcagcagcagatgtgctacccgtactgctccgagctgagctttgtcgccgccggccacgatgaaacggtcggcctggacgctgtgacgatgcagttcttgtcgtcgcacttcactgccagcttttggacgaacggcgtggatgatttctgggagtcaaaaccgatcgattactgatgcgttctgaacactcatacaaacgtacttacttctgatactagctacaacttaacgggcaacaaaagggaagagtatatatatttgtcgatatagaactgtagaagcgttatatatatataccttgtactagagcactttattactctttttgtgatgcgtggtatgatgatctcacttaatttttcattattg

SEQ ID NO: 2942 - DNA, 1117 bp, Zea mays
  Clone ID: TF_ZmC13262_2
tctcgccgccaccaacagcgcctcgccgtcggcctcctcctcctcgtcgctcgtctcggtggaggaggcacgcacccgagaagatggcccacgggtacctctccgacgggctcatgggcagggcggcgcaggagaggaagaagggcgttccatggacggaggacgagcacaggcgattcctggcgggcctggagaagctcgggaagggcgactggcgaggcatctcccggcacttcgtgacgacgcggaccccgacgcaggtggccagccacgcccagaagtacttcctccggcagagcagcctgacgcacaagaagcgcaggtccagcctcttcgacgtggtggagaacgccgagagggcggcgacgagctccatcaagggcatggagcgcctgcggctcaaggacgccatcacgaccgcgaccgcgactggctccgcagaacccggaaccggaacgacggcacagctcccgccggccctgtcgctcggcgtcggcaggccaccagcgaggcccgaccacgccgcgctgcctccgagcagcctgctgtccctgcagctgccgcggtgctcggcgggaattggccgcacggcgccgagcctggccctggcgccgccgaaacacagccacccttcttcgccgctgacggcggcaaaggctggtggcctggcgccggacctggagctgaagatctcgaccgcccggcagagcgagcaccagcagcaggtccagatggggccatcgctgccgccgccgccgccgccgccgcagaggacgccctttctggggaccatcagggtcacatgacatgaccggcaaagacggcggcggttagtagggaatatcctgctggtaggagaagagcttttgcccatctgaagctggagaaggttgcttcaaaagataggacggggtgggaaaactggaaagaaggaagcttttggcagcgtgtgcgtgtgtgtgtgttgctggcacctggcagtggcagccgagacgacgatggcgtcgtgtatcatgtgggtgttgtgtatatcatatcatcatcatccgaaagatggaaactttactggcctaaaaaaaaaaaaaaaaaaaaaaaaaaaaaaaaactcgaggagggg

SEQ ID NO: 2943 - DNA, 890 bp, Zea mays
  Clone ID: TF_ZmC42_22
ttgggtacctcgaggccggccgggtccagcacggcccatcgccggctgacactcacaagaacctgcctccctcggtctggatcgctatctcttttctagcggctccagagggagggaaagctagcgcacagccgagagaagaaagcagagagggagggagaacaaagagagagaaaaaaaaaccagagaggttgagcaagaaccgaggcggatccgccttttgtccctcctgcccgagggctagcctgcccccgcgagagatcgagaggaggcgccgttcagttcaggggggtgagaagtcgggggggaagaaatgatgcgggagacgtacatggacgtgctgccgccggtggaccacatagccgcctcacggagcggcggttggttcccgggcgcggttcgtctctggacggcggcggagaacaagcagttcgagcgggcgctggccgggctcgacctctgccgcccggactgggagaaggtggcgcgggccatcccgggccggacggtgcgcgaggtcgtcagccacttcaagagcctccaggtcgacgtccagcagatcgagagcggcctggtgcccatgccggtctacggcgccggggccggctcgttcaccctgcagtgggacggctgctacggccccgcggactcgaggcacaacggctaccgcttcggaaacggaggctgcgggaggcggcaccacggccgcaccccggagcaggagcggaagaagggcgtgccgtggacggaggaggagcacaggctgttcctcttaggcctgaagaaatacggcaagggggactggaggaacatatcgcgcaactacgtccagacgcggacgcccacgcaggtggccagccacgcgcagaagtacttcatcaggctcaact

SEQ ID NO: 2944 - DNA, 1364 bp, Zea mays
  Clone ID: TF_ZmC1597_2
cgtctgcaccgaatcgatcgatcggtgcttttaatctctgagcaagcgatcgagctcaccaacaaccaccgcgctcaagagtagcagccggccggagccgaaaacgacgaggcggtggcatggggaggccgccgtgctgcgacaaggtgggagtgaagaaagggccgtggacccccgaggaggacctcatgctcgtctcctatgtccaggagcacggccccgggaactggcgcgccgtgccgaccaacaccgggctgatgcgctgcagcaagagctgcaggttgcggtggacaaactacctccggccgggaatcaagcgcggcaactttaccgaccaggaggagaagctcatcatccacctccaggctctccttggcaaccggtgggcggcgatagcgtcctacttgccggagaggacggacaacgatatcaagaactactggaacacgcacctcaagaagaagctgaagaagatgcaggccggcgaagggggcgggggagacggcgacggcgcagcaggtgcctcggaaggcggcgccgtcgccaccgcaggcgcgggagggaagcgcccggccgtgcccaaggggcagtgggagcggcggctgcagaccgacatccacacggcgcggcaggctctgcgcgacgcgctctcgctggaaccttcgccttcggcgccgccgccggctaaggtggagcctctgccggcgaccgccccggggtacaagacgtacgcgtctagcgccgagaacatcgcgcggctgctggagggctggctgcgccccggcagcggagggggcaaggggcccgaggcgtcgggctcgacgtcgacgacggccacgacgcagcagcggccgcagtgctccggtgagggcgcggcgtccgcgtcggcgagccacagtggcggagcgcccgcgaacgcggcggcgcagacgcccgagtgctcgacggagaccagcaaggtggccggcgcgggctccgcgccgccggcgttctcgatgctggagagctggctgctcgacgacggcatggggcacggcgaggacgggctcatgaccgacgtggtgccactaggggaccccagtgagttcttttaatcaaggccgctgtacaagtaccactaaaagcaaattaatcaagtagagatgcaagaacaaaagggaaaaaataatcgccgagttattaggtaataactagttaagcagaaatccaacgaaccaaatttctttgaattctcggtgatatggatcgagttgagtgtcgatctagtttgttttaatcccctcttttatcttttttacgctgttgtttctctgatgttagggattggaactgatcgtgtaagcttatactaatgacaggttcct

SEQ ID NO: 2945 - DNA, 1991 bp, Zea mays
  Clone ID: TF_ZmC21354_1
gccaactccggcgacgggacgcctccgtcgccgcgcgagctctacaccatcccggcatcatccggttggttccggtgggacgggatccacgagacggagcggcgggcgctgccggagttcttcggaggggcaggcggcgctgggttcgggacggcgacgcggaacccgcggatctaccgcgagtaccgcgacttcatcatcgccaaataccgggaggacccggcgcgccgcctcactttcaccgaggtccgcagggcgcttgtcggggacgtcacgctcctccggaagctctttgccttcctcgactcctccggcctcatcaacttctcggcctcctcgtcctcggtccccgcgtcgcggcagcaggaggtgggggtcgtcgtggaggcgcccgtgggtctgcaggtgacgccgcgtcctccagcgtcctacttcgccgaagagaagcgtgtagcggcgggcggggagaaggagaacgaattccggttgccgccgctgacctcctacagtgatgtgttcggggaatgggcacctgggaaggcgcctatatgcggtttttgcggtgaggagtgcaatggtgcggatgttgagacgctgcaggatggttttaaagtatgttcaaaatgttccaaaagcaataatgataatatcaaggaagaggcgaataaatgtcctggtgacaaaaaagagaatatggaaaatcatgcttccagtgcatggacagacactgagacgttactccttttagaaggagtcctaaaacatggagatgattgggatcttatcgctcagcatgtccgcacaaagaataaatcagaatgcatagcaatgcttattcaattaccttttggcgaacatatgctgggcacaataaatggtaaattcgttagcaggctccacataaaccagacagatgatggaaaaacgaaccagcacattatggagtcttcaagtcactcaaccgaaatggctgatggcatgcagattgatggaagtgaagatagtgctgataaatcagttgaagaatatcctacaaaacgcagacgattgtttttttcaatggatgctaccacttcattgatggagcagttagctatcctgaccacagcagctagcccagatgttgctgctgctgctgctgatgccgcaattaaagcatttggcaatgaaaacccgcaagcaaggaaagcctttcgcctcaacgagcaagaatataagactaaggcttttgcttctaatcatgtccaacagattgaccacaaagttagcaataaggatacggcgatgcatggccagagtggttctgataagcaggaaaagaagttcattgctagcgcatatcaattgagggcagctgttgctactgctgttggtgtagctgctgcccgtgctaaaatgcttgcagaccaggaggagcgagaaatggagctcctaatggcgtctgtaattgaaactcagctaagaaagatgcaatacaagatcaaacactttgaggagctagattcactcatggatcaagagtacaccgctatacagcaaatgaagggatccctcatgaatgaatggataaaggtccttgagcatgcattccgggctggagtgtctctaccgagagatgaattgctcaccaaactgttgctgaactagccgcccatcccatgaggacctggctgtagtcgagtagttctctgatatgcgtcacccccttgactgttgctggtagatagcttcctgcgtgggtgcgtctgtaaaggtgccgattgtgctttcgatttctcagaattttggggatcagaacaacccttcgtaactctttgccctgttgtaccaaactaggttagatggcaaaattgctgaaattttcttgtagctgttgacatgtatggtttcgttcgtatggatgtgaaaatggtacctcagttttggagtttcagaaaaaaaaaaaaaaaaaaagaacccacgcgtccgcccacgcgtccgcccaccgtccg

SEQ ID NO: 2946 - DNA, 852 bp, Zea mays
  unsure (1)..(852): unsure at all n locations
  Clone ID: TF_LIB4766-044-R1-K1-H8
cattgggtacctcgaggccggccgggcattcatttcttaggagtaggtgttcccttcttcatctcttctcctcacaaggcttcctcccaccacctccagtcctccaccggaccaccacctccagtcctccaccggaccaccacctccaccactcctctctcagaacacgcgcaaaccgctcgaaccctagctggtggcgggaggcggaggtggctccgggatgacgcggcggtgctcgcactgcagccacaacgggcacaactcgcggacgtgccccaaccgcggggtcaagatcttcggggtgcacctcaccgatggctcggccatccgcaagagcgcgagcatggggaacctctccctcctctccgcgggatccaccagcggcggcgcgtcccccgccgacgggcccgacctcgccgacggcggcgggggctacgcctccgacgacttcgtccaggggtcgtcctccgccagccgcgatcgaaagaaaggtgttccttggactgaagaagaacaccggaggtttttgctgggattacaaaagctcgggaaaggggattggcgaggaatttctcgtaattttgtggtctcaagaacacctactcaagtagcaagtcatgctcaaaagtattttatacgccaatcaaatatgagcagaaggaagagaaggtctagccttttcgacatggttcctgatgagtccatggaccttccgccccttcctggaagtcaagaaccagagacctcaatgttaaatcaaccgccactgcctcctgctgtgngaggagaggtgggatcgatggagtcagatacttctgctgtcgcagagaagtctggagcttctgctctcat

SEQ ID NO: 2947 - DNA, 1877 bp, Zea mays
  Clone ID: TF_ZmC152_2
catggcatacctcgagaccggccgggggaagcgccggaacgaacgaacgcgcggcgccaccacccacatcactgccctgccgtcgtagcccagccccacccacccagcgccgcccgcccacgccaccacgcggaccgcagccgcgccgcagctgctcacacacacagggcaacagacgcctcctccatccccacgcgagcggacgacacgacgcggccatcgccgcacgttgagatcccctccgctcctcctctcgatggtctccgccagcgcgccgccgccgccgccgcaggcccagtccgacgcggccgggtcgggggaggaagccagcaagaaggtgcggaagccgtacaccatcaccaagtcgcgggagagctggacggagcaggagcacgacaagttcctcgaggccctgcagctctttgaccgtgactggaagaagatagaggcttttgttggctccaagaccgtcatccagattaggagtcacgcacaaaagtactttttgaaggttcagaaaaatggaaccagtgaacatgtcccacctccacgaccaaagcgaaaagctgcccatccatatcctcagaaagcttccaagaatgaaccaaactatggtctcaagacagattcatcttccatacataggaactctggcatgaatgtgtctgtttcttcatggcctcataggtctatcccgcaagctgttgcttcatcgatggtgaaagatttaggtgctggaacaccaggtccaaacaatttttgctcaagcagtactgaaggccctccaagaacttggcaacctggtgaaacaaatggtccaataaatcaaattccgtcactccgccttatgccggattttgcgggagtgtacagcttcttaggtagtgttttcgatccaagcacaagtgatcatctgcagaaactgaaggagatgaatccaattgatgttgagacggcgctgttgttgatgaggaatctctccatcaatttgaccagtcctgattttgaagatcaaaggaaattgttgtctttatatagcgcttctgatggacctgagctagggagctccaggagttcagctctagcaactagtgcacctttcatgtaaggattaagggtggatagtgtggccaggtctgtccgcatataatttcagttggacagacctcaggatggtgccctggcgtagcaccgatgagtgacgaaggaggcgcctggaccttttcgcttctcgctagcttcaggactgctgattgtgtaagggtgcggccatgaaaggtgagattggtctgcggtcatgaaaggtgagattggtctgcggcctgatgtgtatataaaatttttgccacgaaggaggcgcctgcacctatcccaaaagctcggccatctagggcattggatgctgcttcagttcagataatcaaggctgtccttggaaatgggacgagaggaaagatcccttccccattcgttgagttcagttctctgattggtttcttgctgccctcttgatacggggacctgtgcgccatgtggccgtctcgctgtttatgtgggcaagtttcacttgaggagttgagagggcttgaggcgatcgtggttttgtagagcaacgagtgcaccttccgaatattccttgttcctgtgtgaatcgtctatattgcatcaggcgtcgttgccattgtgtaaaagggaaataaaatcacaatgtaaaggatacactaccatttgaattgtattcagtatcgaagccctgtagtgcatcaggtgttgttgcccacgtgtaaaaggaaaataaattcacaatgtaaaggagacttgtgcgttagcactaccatttgaatttatgaaatgtcaaagcaaaaaaaaaaaaaaaa

SEQ ID NO: 2948 - DNA, 1932 bp, Zea mays
  Clone ID: TF_ZmC34_1
ctcgagccggcgggtgttctttttctagcattttgatggggaagtaggtcagaagtgatttagagtgattctggtggggattaaatgaagtggtggagaggaattttctgtagccatattggctgtccaggagtgattctcacaagaatctggagctgggagcaattactagtgctttgcatataatttgaactgagctgtgctctgtttgttttacattggtacctcgaagtccgcggggggcacttcttcatctcttctcctgtcggcatctcttctccttcctggcttcctcccaccacctccagtcctccaccggaccaccacctccaccactccctctctcacgacacgcgcaaaccgctcgaaccctagctggcggcgggaggcggaggtggctccgggatgacgcggcggtgctcgcactgcagccacaacgggcacaactcgcggacgtgccccaaccgcggggtcaagatcttcggggtgcacctcaccgatggctcggccatccgcaagagcgcgagcatggggaacctctccctcctctccgcgggatccaccagcggcggcgcgtcccccgccgacgggcccgacctcgccgacggcggcgggggctacgcctccgacgacttcgtccaggggtcgtcctccgccagccgcgatcgaaagaaaggtgttccttggactgaagaagaacaccggaggtttttgctgggattacaaaagcttgggaaaggggattggcgaggaatttctcgtaattttgtggtctcaagaacacctactcaagtagcaagtcatgctcaaaagtattttatacgccaatcaaatatgagcagaaggaagagaaggtctagccttttcgacatggttcctgatgagtccatggaccttccgccccttcctggaagtcaagaaccagagacctcaatgttaaatcaaccgccactgcctcctcctgtggaggaggaggtggaatcgatggagtcagatacttctgctgtcgcagagagttctggagcttctgctctcatgcccgagagtttacagcctacctatccgatgattgttccagcttatttctcgccgttcttgcaattctcagttcctttctggccaaatcaggaagatggaggcgatcttccccaagaaacacacgagattgtcaagcctgttgcagttcattcccagaatccaattaatgttgatgaactcgtgggcatgtcaaagctaagcatatgggagcatggtcaggagacagtgtctacttctctgtcgctaaatctgctagggggtcaaaataggcagtcggctttccatgcaaaccctcaaacaagagctcaagcctgatcatcccctaccagcacagaaactgtattttagatggaatcctgggcaaaataagctttgctctttttttcttcttctaaatttaagatcaccgagtcacaaggtcactggttggaagtagcttctccgtatttgcggggaaagcctgccctggtttctctccatcatcagagccttcaatattgtcttttttatatatttaagattgaccgtgctctgtagcttgtatcatgtgctgtaagttatgctatgtatgaatgtacctgtagtttgtatggcacgcatggtatgacactcttatgttagcaaagtcattaatgttagtgctgatctttatggttgtaatgttataaacttctaaaaaaaacgtataagccagttgttttcaacaaaaaaaaaaaaaaaaaaaaaaaaaaaaaaaaaaaaaaaaaaaaaaatcattaaaattagtgctgaaatttatagttgtaattttataaacttctaaaaaaaaagtataagccagttcttttcaaaagcactcaaaaaaaaaaaaaaaacacaataccaaacccttccgaataataaattgccccgcct

SEQ ID NO: 2949 - DNA, 1389 bp, Zea mays
  Clone ID: TF_ZmC34_2
cattgggtacctcgaggccggccgggattctcacctcctctcctccacggcttcctcgcaccggctccggtcctcctcccatcaccatcaccaccgtcgttcctctcacgagtcccgacacacgcaaaccgcacgaaccctggctggcggcgggatgacgcggcggtgctcgcactgcagccacaacgggcacaactcgcggacgtgccccaaccgcggggtcaagatcttcggggtgcgcctcaccgatggctcggccatccgcaagagcgcaagcatggggaacctctccctcctctccgcggggtcaaccagcggcggcgcgtcgcccgccgacgggcccgacctcgccgacggcggcgggggctacgcctccgacgacttcgtccaggggtcgtcctccgccagccgcgagcgtaagaaaggtgttccttggactgaagaagaacaccggaggtttttgctgggattacaaaagcttgggaaaggtgattggcgagggatttctcgtaatttcgtggtctcaagaacacctactcaagtagcaagtcatgctcaaaaatattttatacgtcaatcaaatatgagcagaaggaagagaaggtctagcctttttgacatggtgcctgatgagtccatggaccttccaccccttcctggaagtcaagagccagagacctcagtgttaaatcaaccaccactgcctccccctgtggaggaggaggaggaggtggaatcgatggagtcagatacttctgctgttgcggagagttctgcagcttcagctcttatgcccgagagtttacagcctacctatccgatgattgttccagcttatttctcaccgttcttgcaattctcagttcctttctggccaaatcaggaagatggaggtgatctgcctcaagaaacgcacgagattgtcaagcctgttgcagttcattccaagaatccaattaatgttgatgaacttgtgagcatgtcaaagctaagcataggggagcctggtcaggaaacggtgtctacttctctgtcgttaaatctgctggtgggtcaaaataggcagtcggccttccatgcaaatcctcaaacgagggctcaagcttgatcccgcttccgcacagaaactgcattaagaaggattccctctctttttttttctatatgtaagattgaccgtgctctgtagcttgtatcatgttgtaagttatgctatgtatgaatgtacctgttgtttgtctggcacgcatgacatgccactcatgataacaaactcataatgttagtgctgatctttatggttgtaatgttgtaaacttttctgagagaaaaaaacgtactagccagttgttttcacatgctgtgttgctttttgggttaaggaggaaa

SEQ ID NO: 2950 - DNA, 872 bp, Zea mays
  unsure (1)..(872): unsure at all n locations
  Clone ID: TF_ZmC34_3
cattgggtacctcgaggccggcggggctcttctcctccaaaggcttcctcccaccacctccagtcctctccaccggaccaccacctccaccactccctctctcacgacacgcgcaaaccgctcgaaccctagctggcggcgggaggcggaggtggctccgggatgacgcggcggtgctcgcactgcagccacaacgggcacaactcgcggacgtgccccaaccgcggggtcaagatcttcggggtgcacctcaccgatggctcggccatccgcgagagcgcgagcatggggaacctctccctcctctccgcgggatccaccagcggcggcgcttcccccgccgacgggcccgacctcgccgacggcggcgggggctacgcctccgacgacttcgtccaggggtcgtcctccgccagccgcgatcgcaagaaaggtgttccttggactgaagaagaacaccggaggtttttgctgggattacaaaagctcgggaaaggggattggcgaggaatttctcgtaattttgtggtctcaagaacacctactcaagtagcaagtcatgctcaaaagtattttatacgccaatcaaatatgagcagaaggaagagaaggtctagcctgaaaccaagcaacccaatccaaaccagacaagcaaggaatcccccgatggctcatcgcgttctcctcctcctctctctcgcgtcggncgccgcggttgccgccgccgtcgacgcggaggacccgctgatccggcaggtggttcccggtggagatgacaacgatctggagctgaacgcggagtccactttctgagcttcgtgcagcggttcggcaagtctacaagacgcgacgagcacgcgtaccggctgtcg

SEQ ID NO: 2951 - DNA, 1471 bp, Zea mays
  Clone ID: TF_ZmC34_4
ttcgcttctcctcccagcccacctctcctctccccttccggcgcgcgcggccgcctggttcctacaccggcgggtgcgctggcggccccggggatgacgaggcggtgctcgcactgcagccacaacggccacaactcgcggacgtgccccaaccgcggggtcaagatcttcggggtgcgcctcaccgatggatccatccgcaagagcgccagcatggggaacctctccctgctcgggggatccaccagcggcggcggcggcgcatcccccgctgacgtcggccacgacgccgccgcagagggctacgcctccgacgacttcgtgcagggatcatcatccgccaaccgcgagcgcgagaaaggggttccttggactgaagaagaacatcggaggtttttgcttggattgcagaagcttggaaagggtgattggcgagggatctctcgtaattttgtggtctcaagaacacctactcaagtagcaagccatgctcagaaatattttatacgccaagccaatatgagcagaaggaagagaaggtctagcctctttgacttggtgcctgatgagtcggacctgccaccccttcctggtaatcaagaacctgaggcccagatattgaatcacccaccattacctccacccatggagggaggaggaggtagaatctatggagtcagatacttctgtcattgcagagagttcttcagcttctgctatcatgcccgagagtttgcagcctagctatccgatgatagttccagcttatttctcgccgttcttgcaattctcagttcctttctggccaaatcaggaagatggaggcgatcttccccaagaaacacacgagattgtcaagcctgttgcagttcattcccagaatccaattaatgttgatgaactcgtgggcatgtcaaagctaagcatatgggagcatggtcaggagacagtgtctacttctctgtcgctaaatctgctagggggtcaaaataggcagtcggctttccatgcaaaccctcaaacaagagctcaagcctgatcatcccctaccagcacagaaactgcattttagatggaatcctgggcaaaataagctttgctcttttttcttcttctaaatttaagatcactgagtcataaggtcactggttcgaagtagcttctccgtatttgcggggaaagcctgccctggtttctctccttcatcagaccccactcatatgggagccttcaatattgtcttttttatatatttaagattgaccgtgctcggtagcttgtatcatgtgctgtaagttatgctatgtatgaatgtacctgtagtttgtatggcacgcatggtatgccactcttatgttagcaaagtcattaatgttagtgctgatctttatggttgtaattttataaacttctaaaaaaaaagtataagccagttcttttcaactgcaaaaaaaaaaaaaaaaaagcggcc

SEQ ID NO: 2952 - DNA, 579 bp, Zea mays
  Clone ID: TF_LIB3592-047-Q1-N6-E1
ccacgctaacaagacaaaaatgcaaacgagggttccaattagatggctctcggccttaacagcacacaggctgaactaactgacgtctcctaggcttgaccagcatacggcacgatctgtctttactcttgcgcccgagtcttcatatcttgctgatggaagagaagagcaatcatcttgatggtctctgcatcttgaagaacctgcttctccagctccgacttatgtagctctgttgccaagcgtggcgtgaagcttgacgatcacgtcctcctcctcctccgtgatgttccccctcttgagacccgccctcaggtagttgatccaccgcagcctgcagctcttcccgcaccgcagcaacccagcattcttgggcagtgatctccatgagccttccccgtgctcctcgatgtacctcgccaggatctcgtcctcctccctggtccacctccccttcttcaaccccaccttcccgcagcacggcgccctccccatctgtttgcgaggtgcaactgcaagaaatgcggcagcttgcgtgtgcctgcctcgcctgcgctgtggagtggaggggaaaagtga

SEQ ID NO: 2953 - DNA, 786 bp, Zea mays
  unsure (1)..(786): unsure at all n locations
  Clone ID: TF_LIB4969-013-A1-XP1-F1
gccggccgggtcgggatcaaccaaccccgcacaccgccgcgggaagcagaagagactggaagagcctacaaaagcttagaggagtgccccccacaaacctttccttgcattccactgaaatcttcctatctgcaaccatgcagttgctcaattctggcctcagctgaagcccaaccatccattgttatataagtcgctgcagcctttgcaatttcccactccttcagccaccatcggtcattgaaggagcttcgtgccaccagagaaggtgttcgccgtgcataatcacaggctatatacattccacaggcctgtaaagctctgtgaatttggagctcccacaggttctgcattggcgttgagatggggaggcattcttgctgctacaagcaaaagttgagaaaggggctctggtcccccgaggaggatgagaaactcatgaaccacataacaaagcatggccatggctgctggagttctattcccaaactcgctgggctccaaaggtgcggaaagagttgtaggctgaggtggataaactatctgaggccagacctcaagagaggggcattctcccaagacgaagaagacctcatcattgagctgcacgctgtccttggaaacaggtggtctcaattgcagctcagctgccagggaggactgantatgagatcaagaatctatggaactcgtgcatcaagaaagagctcaggcagaaaggcattgatcccaacacccacnagccccttactgangctgatcgcagcggagcagctccaccatcag

SEQ ID NO: 2954 - DNA, 845 bp, Zea mays
  Clone ID: TF_LIB4742-042-R1-K1-A11
ccggccgggacctcctgcaccccgacatccatcgatcgatcgatcgagctctagcaacaagaagaagaaggagaaggaggagatggggaggtccccgtgctgctgccacgacgccggcgtcaagaaaggcccgtggacggaggaggaggaccgcgccctggtggaccacatccagaggcacggcggccacgtcagcagctggcgcaacctgcccaaggccgccgggctcaaccgctgcggcaagagctgtcgcctccgctggaccaactacctccgccccgacatcaagcgcggcaacttcaccgacgacgaggagcgcctcatcatcggcctccatgcccagctcggcaacaggtggtcgacgatcgcgacgcacctggacgggcggacggacaacgagatcaagaactactggaacacgcacatccgcaagaagctgctgcgcatgggcgtcgaccccgtcacgcaccagcgcctgccccccgacgacctgctgctcgccgtctccgcctcccccacgacgacgatcctctcggcggcggcgagccagctgcggggcctcaacaccgctctcatgcaggtgcaagcgctgcagtttctgctgcaggccgtcagtggagttggaaacgacgttaacgccgccgccgctgctgctaatggtggtggtggtctcgtccctagcctcagcgcagccgcagataataacgccgttctgaacgcgagccgtagcgtcgttccaggcttccaggacctgcagctgacgacgatgaccagggcctcttctcgtgtctcacgcgaatcacgggtcagctgatcatcatcccagctacatcgcaactgatgat

SEQ ID NO: 2955 - DNA, 833 bp, Zea mays
  Clone ID: TF_ZmC10786_1
ccgacaccacagtaacccccaatcctcttgccaagctagctagtgctccttccttcctccttcgtcctgctcggagctctccgctcccgcgtcctctgccgcgacattatttctcctctggctggcaacaagcagatactaatggggtgcaaggcgtgccagaagcccaaggtgcagtaccgcaagggcctgtggtcgccggaggaggacgagaagctccgcgactacatcctccgctacggccacggctgctggagcgctctgcccctcaaggctgggctgcagcgcaacggcaagagctgcaggctgcgatggatcaactacctgaggccggggctgaagcacggcgtgttctcccgggaggaagaggagaccgtcatgagccttcacgccaagctgggcaacaagtggtctcagatcgcacggcatctgccgggccggacggacaacgaggtgaagaactactggaactcgtacctcaagaagcgcgtcgagggcggcgcgcagggcaagcacggcgcggcggacccggcgacacccggccgttccgacgtccacgggagcccggacgaccccagcgagaacaacggccaggggtccgtcgtcagccggccggcgaactctgactcgtccgagccggcggtggagtcgtcgtcggccgacgactccagctgcctcaccgtcaccgagcctgcgggcgcgcgcgcaagcgcaaccgccgcggtgcgaccgcacgcgccggtgctcccgaaggtcatgttcgcggactggctggacatggactacgggaccagcctggtggcgctgggtccggacgccggtgtcttcgacgt

SEQ ID NO: 2956 - DNA, 927 bp, Zea mays
  unsure (1)..(927): unsure at all n locations
  Clone ID: TF_21215256
ccacgcgtccggtgccctataaaatccagccccgcttggcttcacccacccttgggctcgcagtcgcagcaacgatggggaggtcgccgtgctgcgagaaggcgcacacgaacaagggcgcgtggaccaaggaggaggacgaccgtctggtggcgtacatcaaggcgcacggcgaggggtgctggcgctcccttcccaaggccgccggacttgtgcgctgcggcaagagctgccgcctccggtggatcaactacctgcgccccgacctcaagcgcggcaacttcacggaggaggaggacgagctcatcatcaagctccacagcctcctcggcaacaagtggtccctgatcgccggaaggctgccgggcaggacggacaacgagatcaagaactactggaacacgcacatccggcggaagctgctgagcannnnnatcgacccggtgacacaccgccccatcaacgagcacacgtccaacataaccatatcgttcgaggactggggccaggggaaggcgctcaagtgccccgacctgaacctggacctctgcatcagcccgccgtgccaggaggaggaggaggccatgctgctgaggccggtgaagcgggaggaggccgggctctgcttcagctgcagcctggggctccccnnnnnnnnnnnnnnnnnnnnnnnnnnnnnnnnnnnnnnnnnnaccgccatgctcgacttcagaagactcgagatgaaatgagagcttccatccatctctgtctgtctctctctgtaacttcacccctgataacacgcagtagtagtagtcaccaactgatttgtcgcaacnnnnnnnnnnnnnnnnnnnnnnnnnnnnnnnnnnnnnnnnnnnnnnnnnntgtaaattagcatcaccatgggcaattaataatacttgttgctgctgcaaattgccc

SEQ ID NO: 2957 - DNA, 1221 bp, Zea mays
  Clone ID: TF_ZmC1193_3
gtgcggacgctcgaggccggccgggttgcgaggcctaacccttttccaccaactctacaagagctcccgcgatccagtcaagtgccctataaaatccagccccgcttggcttcacccacccttgggctcgcaatcgcagcaacgatggggagatcgccgtgctgcgagaaggcgcacacgaacaagggcgcgtggaccaaggaggaggacgaccgtctggtggcgtacatcaaggcgcacggcgaggggtgctggcgctcccttcccaaggccgccggacttgtgcgctgcggcaagagctgccgcctccggtggatcaactacctgcggcccgacctcaagcgcggcaacttcacggaggaggaggacgagctcatcatcaagctccacagcctactcggcaacaaatggtccctgatcgctggaaggctgccgggcaggaccgacaacgagatcaagaactactggaacacgcacatccggcggaagctgctgagcagggggatcgacccggtgacacaccgccccatcaacgagcacacgtccaacataaccatatcgttcgaggactggggccaggggaaggcgctcaagtgccccgacctgaacctggacctctgcatcagcccgccgtgccaggaggaggaggaggccatgctgctgaggccggtgaagcgggaggaggccgggctctgcttcagctgcagcctggggctccccaagagcgcggactgcaagtgcagcaacttcctcgggctcaggaccgccatgctcgacttcagaagactcgagatgaaatgagagcttccatccatctctgtctgtctctctctgtaacttcacccctgataacacgcagtagtagtagtcaccaactgatttgtcgctccattaattctgtctctctctctctctctctcgctatgtaaattagcatcaccaactgattgattgatcatgggcaattaataatacttgttgctgctgcaaattgatgatgactttatgacacatggttggttagttttttcgtaggtaacaaatacgcgatggtgagcgagtgaaagagagattttgtgccctgggtcatcctccctgctctctcttgatgctccatattgcctcctatgtcccccctctctctctctgtatctctgtaattaccatcgccaaatgatcatggggggcaatataatataatacatgctgctaatgctagaa

SEQ ID NO: 2958 - DNA, 1329 bp, Zea mays
  Clone ID: TF_ZmC3305_2
atccagtctcccttcttgccccacgcagccgagcgtgcctacccctcctcgacccttctctggggccgccgttggacgctcatggagaggagtcgtccgggcgccgcgccgaaaccatcgccagaggaggaggtggcggcggagggccatgcgcatggtgacgatgtgacggggcaggaggaggaggaggaggcgacgccagtggtgctcaagaagggcccgtggacggcctcggaggatgccatgctcatggaccacgtccggcaccacggcgaggggaactggaacgcagtacagaggatgaccggcctgctgcgctgcggcaagagctgccgcctgcgctggaccaaccacctccgccccaacctcaagaagggctccttctcccccgacgaggagctcctcatcgcccagctccacgcgcagctcggcaacaagtgggcgcgcatggccgcgcactggttggcttggtgcgcgcccgcagctgcccgggaggacggacaacgagatcaagaactactggaacacgaggaccaagcgccgccagcgcgccggcctgcccgtgtacccgccggaggtgcagctccaccttgccctctccaagcgctgccactacgacgactacgacttcccgccgctcgcgtcgtccccgcagctgtcggcgacgacgacgaccgatgtccaggcgctgggcgccgggcccgggtacgccagctcgcgcccggcgccgctcgacctggctcgcagccagctcgccgcgacgacgacccagcagacggcgcagttcctctcgccgccgcccttctcggcgccgtcgtccccgtgggccaagccgttcgcgcggaacgcgcagtacttccagctcgcgcactcgtcgcccgtgtccccgtcgacgccgaccgggccggtgcacccggccatgccggacctgtctctcggcggccacggcgcgcgcgccgccgccgctgccgaccagagcaggctcccaccgctctcgccgtcccccggccccagagtggagctcccttcaaaccaatacggccagccggcgccgccgacctcggccgccgccgtcgccgccggacttgcgctgccggatcatcagaacgcggcgagcctcgaacagatgctgcaggagctgcacgacgtcatcaaggtcgaaccgcaggcgctggtcccggccagcggcggcggcgctgcactggagcggcatgattgcggagtttcagtcccagagagcagaatcagcggcctgcagcgtcggggtgacgacatggacacgctgttcggcctggtgcacccagcgctcggcgcgccggagacggcgcc

SEQ ID NO: 2959 - DNA, 722 bp, Zea mays
  Clone ID: TF_ZmC3305_1
gcctcaaaagggcagacagccaaatgccccaccacagcgtagcccctcctcactgactcgcctgcaaaaaccacttgcaaaccacacaaaccgaaaacgccagctcccctgcctccatttttagcaacttttcccttctgtcttcccatcacagtcacccttcttgcccccacgcagccgagcgtgcctacccctcctcgacccttctctggggccgccgttggacgctcatggagaggagtcgtccgggcgccgcgccgaaaccatcgccagaggaggaggtggcggcggagggccatgcgcatggtgacgatgtgacggggcaggaggaggaggaggaggcgacgccagtggtgctcaagaagggcccgtggacggcctcggaggatgccatgctcatggaccacgtccggcaccacggcgaggggaactggaacgcagtacagaggatgaccggcctgctgcgctgcggcaagagctgccgcctgcgctggaccaaccacctccgccccaacctcaagaagggctccttctcccccgacgaggagctcctcatcgcccagctccacgcgcagctcggcaacaagtgggcgcgcatggccgcgcacgtaagcaccctatcctttgccctggataacaaatttatttatggcgagtggcggcgacctgctgatgtgactgacgtttgcgagttcgttcctcgagcgaattccgagcttact

SEQ ID NO: 2960 - DNA, 730 bp, Zea mays
  Clone ID: TF_ZmC659_5
attactccgcggcatcaggcaggctagccgtgctccctcccatctcttctcttctcttgtcttctcttctctcccccaaggaggtcaaagacacagcgcatctgcatccggcctcctccgcgcgcgcgaattcgggagggagaggggcggtaatggggagggctccgtgctgcgagaagatgggcctcaagaggggcccctggacgccggaggaggacaagatcctggccgcccacatccacagccacggccacggcaactggcgcgcgctgcccaagcaagccggcctgctgcggtgcggcaagagctgccggctccggtggatcaactacctgcggccggacatcaagcgcggcaacttcaccgacgaggaggagcagtcaatcatccagctgcaccagctgctcggcaacagatggtccgcgattgccgcccggctgccggggaggacggacaacgagatcaagaacgtgtggcacacccacctcaagaagcggctcgaccccggcgcgcaggagcagctcgaggaggccagcgccgccaagaagcgcaagaagccggcggcggcggcgcggaagcgcgagggcaagatcaagatgaggaagctcgacgcgctgaccgccaaggcggcgcccgtgctgtcctcgccccgacgctccgtctcgtccacgctcaccgagtcacgtcaccggcctcgggcgggggaggagcagcacggcaactcgggcag

SEQ ID NO: 2961 - DNA, 1241 bp, Zea mays
  Clone ID: TF_ZmC17037_1
ggctcgcactcgcgccggtcgttcgctgcagcacacaacgcaatcgccactgtcgtcgctcgtcagtccaccgactccaccgccaccggcagaaccagaacacatcgagcggcatcggagcgcgaatctgtgcggcggcgtcgcctctgccgggcgggtgggcggcatggggaggtccccgtgctgcgagcaggcgcacaccaacaagggcgcgtggaccaaggaggaggaccagcgcctcatcgcctacatcaaggcccacggcgagggctgctggaggtcgctaccaaaagccgcagggctgctgcggtgcgggaagagctgccggctgcggtggatcaactacctgcgcccggacctcaagcgcggcaacttcagcgaggaggaggacgagctgatcatcaagttccacgagctgttcggcaacaagtggtcgctcatcgccgggaggctgccgggcaggacggacaacgagataaaaaactactggaacacgcacatcaagcggaagctgctcgcccgcggcatggacccgcagacccaccgcccgctggccgcagcgccagcaggagggccgcagcagcagcattgccattaccagatggagccacagaagcgggcggcggcggcggaccattccgaggccgccgttgccaccaactcgccggaaggccagcagccgcagcagcgacgacgacgaggcgccggcgctggcgccaccgccgcggcggcggcagcgccacctcgacatcgacctgaacctgtccatcagcctcgcggcctaccagccgccggagggaaccggcagcgccatcgagccactgacggcgacgacgaagcgggaggagggaacggcggcggcggtgtgcctctgcctcaacagcctcgggtaccgggcaggcgtcgagtgcgcctgtggcagcggcggctcgccgtcgtcccgttcgcagtgggctcgggattttttacaggcggcgccctgctacagaggctagcattgatcagtgagacagtgacatgatcgggagggcttttactgaggggaggggcagagcagatatagttaactagtagtactattagtaaaaaggcaagcgtgcttagtaggctttagcagctcatgcattgcatgcatcatgggttatttacgaggagatgtgctctttgtcttttgtcgattctggctctggcctcggacacagactgatcgatcatgccttggcgaaaaaccccccacaccc

SEQ ID NO: 2962 - DNA, 1059 bp, Zea mays
  Clone ID: TF_ZmC30034_1
ggccgggacatccaaacactgtaacaacttgtgtagtacttaatccctcgcacctcatgaatcccaacttcaacagtgtgtggagcgctcccgagatcaatatgatgaactcactcatcactagtcacatcgccaacaacacctacacaaacaacaaccagcatgttgtggcaagtcgtagtgccattgtgaaccacaataactttgggatgccaacggaggtcgttccacccgtggacaacatggacatgatgcaaggctatctaatggatgatacggatgccatgaggcttgttcagggacaacaacatatgccaaatgttgttcctaatcaaaggaggcatgcagtgaagttttggactacagatgagcacaggaatttccttcgtggtctagaagtgtttggccgtggtaaatggaagaacatctccaagtacttcgtccccacaaggacaccagtgcagatctctagccatgcacagaagtatttccgcaggcaggagtgcaccacagagaaacaacgctttagcatcaacgatgttggcctctacgacacacagccatgggtgcggcagaacaactcttctagcagctgggaggcgctcaccttcactgctggccgtgcgtacaatagtacaaactactgtgcctttaacagcctcccgtatgccagcagccaggcaagtaacaaccaggtagctacatggattacagatcagcaggcaactgcaagttcttctatagctcctccagcgacggaggagagccagatatataaccgataatatatataatggtcatcagcagctgggagaggctttcttcatatataatcaataggtagatagatatggacaacgtccattgactagtttaatttctatctatatgttttgtatccaatgatgcatgtaaaacctagttggttgttaaaggtcattagtaccatactatatatgggctagaaacagtttcattgaaatttgcccctgagcaatacaatgaaattttaccaatgtgttatttatatattaatgtgtctaaaaaaaaaaaaaaaaa

SEQ ID NO: 2963 - DNA, 1568 bp, Zea mays
  Clone ID: TF_ZmC337_1
aggacctaccgtcgtttgagtcaccataaaaaagcaatgtttagtattcaaattcaacgcgcgctggcgcgcgccattgactagtatttatatagtgggctctccgtaagtttctttgagccgggtagctacacagtacgcacacctatcccggctgcagcgcggttccagccactggtgccacgtggtttgtgctcttgtgggcacactggcctccacccatctctctcacgtctccccatccgcagcaaaggcacacagtacagattcggcccatcgttttatagccacaccatggctaggaagtgctcacactgtggcaactgcggccacaactccaggacctgcgggagagaaaccatgctctgcgaagctggcgacgccaggaacggcggcggcggcctaaggctcttcggagtgcaggtccgtatcggcggcggcgtcggcgcaggctcggcgtccatgaagaagagctacagcatggactgcctgcagctcgcggctcctatcggttgttccgcctcgtcatgccagtcgccgtcgacgtccctcctcgtcgtcgtcgctgctgctgatgtcgattgaggagggatcggagaggggggcgccaaatgggtacctttctgacggacctcatggcagagctgtgcaggagaggaaaaaaggagttccatggagcgaggaggagcacaggcagttcctttccggcctggagaagctgggcaagggcgactggcgaggcatctccaggagctacgtgccgacgaggaccccgacgcaggtcgccagccatgcacagaagttcttcctcaggcagagcagcttggggaagaagaagcgccgctccagcctctttgacatggtgccgatttgcgagaacagtgcgagcatctccgatccgctgagcagcgaaggggcctcaacctctctgtcgctgaacgtgccacgccacggcgtcacctccgtctccgagagggcggccttggacctgaattcgacggaggaagacgacagcggggcggacgcgtcgtcggcatcggcatcaggtgcagggaccagaccaccgttcccggcagcgcagacggagccgctgcagccttcgtcgcttggccgtggacgcggtcaccactgctctccgttggacctggagctgggcatgtcgctgcctgccccatccatcggaacatgacgcgccgccgccgccgtacttatcgccatggaatcccacgcaggtcgcgccagaattcgtcagcgcaggttgccaaggccgaggccgtgcgtgcctgctgtctcgcacaaacgtcccacgtgtaatcagaatcgggtctgctcctgtatgagtatgactatgccatgttccccgcgcaggattgaaaccgtaaggttacgctagttgctagctttttttttgaacccttgtgaatgatattgttacgaaaaatagctcctaacataggttcactgtgatatatgttatgtacactgtgatatatgttacgtagaccatatgttcgttttgatattaaatttattttttatggttattaaatatgactatgtgtcatctc

SEQ ID NO: 2964 - DNA, 1067 bp, Zea mays
  Clone ID: TF_ZmC337_5
ggtaccctcgtatgctcggccgggtaggagaagccgatgaaggagctagaataatcggttggttggtaacgtagcagctggtgtgtttctaagcataagcaatactgcaggagttccatggagcgaggaggagcacaggcagttcctttccggcctggagaagctgggcaagggcgactggcgaggcatctccaggagctacgtgccgacgaggaccccgacgcaggtcgccagccatgcacagaagttcttcctcaggcagagcagcttggggaagaagaagcgccgctccagcctctttgacatggtgccgatttgcgagaacagtgcgagcatctccgatccgctgagcagcgaaggggcctcaacctctctgtcgctgaacgtgccacgccacggcgtcacctccgtctccgagagggcggccttggacctgaattcgacggaggaagacgacagcggggcggacgcgtcgtcggcatcggcatcaggtgcagggaccagaccaccgttcccggcagcgcagacggagccgctgcagccttcgtcgcttggccgtgggcgcggtcaccactgctctccgttggacctggagctgggcatgtccctgcctgccccatccatcggaacatgacgcgccggcgccgccgtacttatcaagatggaatcccacgcaggtcgcgccagaatcgtcagcgcaaggccgtggccgtgcgtgactactgtctccctcagctgtgtcagccagatggagatgatgcgctagccaatacagtactgttcgtgatcgtgaaaacggtgtgcaaacactagcacagcggcactaaactaggatgtcgctcctcgcaccattgggtactgtaaccgcgttgatccacgtcatctctatctcttcagcaccgttggatcataggctgtcagtttcatctatccgtccatgtgtcatactcattcgcaatacggtgacttagcgagtgtttgggatgggatggctccagattccagcttcagtgtggagctgtagtttataatcccaatttaaatagttttcaacctactttcaatcg

SEQ ID NO: 2965 - DNA, 1241 bp, Zea mays
  Clone ID: TF_ZmC42_49
ttgggtccctcgaggccggccggggcggaatttgcgtacggttccgttcacctcaccggcccacactacccgaatctttataaattcgcggagaaaaccagcggcacacggcgccgccgacccatcatccgtccacagccgcaacgaacgagagacagccagccagcaacgccgcgcacgcaaacgcaacgcagcgaccgtgtcgatcgaccagcggagcggaggtttgtttgagtcgacgggcatggacttccaccacagcagcagcagcagcgtccacgcgcacgcggcagcggcgcggccgtggatcaaggcggaggacttcaaccccagcagcagcgtccacgcggcggggccaccggcggtaccggctgcggcgcggccgtggaacagggcggaggacaaggtgttcgagagcgcgctggttgcgtggcccgagcacacgcccgaccgctgggcgctcgtcgcggcgcagctccccgggcgcacgccgcgggacgcctgggagcactacgaggcgctcgtcgccgacgtcgacctcatcgagcgcggcgcggtcgacgcgcccagctgctgggacgacgacgacggcgaccaccaagtccgcggcgccggcgctgaccgggcgcgccgcgaggcccggcgccccgggataccctggagcgaggaggagcacaggctgtttcttcaaggtctggagaagtacgggcgcggggactggcgtaacatctcgcgcttctcggtgcggacgcggacgccgacgcaggtggccagccacgcgcagaagtacttcaaccggcagttcaaccccgccagccggaactccaagcgcaagagcatccacgacatcaccaccccttgaccctgcccgccgacggcgaaacaagcagtagccagccaagtagggagctttgctgtggacgatctgagaaacagaggcagggagttccagtcagcagctagcacatggtctaggctcactcgtactagtcattaaaatagagttaggattgttgaaacatctaatggagtctgacgtggcaccgtcgtgtcgagtctaggcggatgcagatcgtcaatggagtgagtcactgttaggatggatggtgcctttatagttttgtatgtatgccggcgtggcggtgtcgaagctgcagtggatagacttgcacagttgttgtctccgggcgttccttccaaagcaaacaggcaaatgcatactccgatccacgcaggtggcc

SEQ ID NO: 2966 - DNA, 945 bp, Zea mays
  Clone ID: TF_168591
agccagcacagcacacacactggaaagtgcaagctgtagtgagacctgcgcgactgccagcgtgtatccgcgcggcaaggagcgtagcgccggtcgtcggcccgcacggccaccaactcccttggacgcacgcgcgaccagctgctaaccgtgcgcaagtagtagtgcgacttcgccgccggccgggatcgctagctcgatcgatcggcgggaccacatacgactccggtgtggccagcggcggccgggccggggaacgcacgtgctgcgagcgagcgagggcagacgctagctgttgccgggagctagccggcgcgcgatggggaggacgccgtgctgcgagaaggtggggctcaagcgagggaggtggacggcggaagaggaccagttacttgccaactacattgcggagcacggcgaggggtcctggaggtcgctgcccaagaatgcaggcctgctccggtgcggcaagagctgccggctccggtggatcaactaccttcgggcggacgtcaagagggggaacatctccaaggaggaagaagacatcatcatcaagctccacgccaccctcggcaacaggcgccacctgatgatcgaagcggattactcaccgccctcgactgttcgatgcctgccgcgtggagctcttgcgtatctaacgctcccacgacaatcacccttccagacggctcgaattacatacgacaggatcggctccgctctactccgttctgttcgcttctgctttaggtgcgtgcctagcagatggtgaggcggcgtcgcgcggccctcccgacggctcgccggccgcgctacggggcctgctgcagcagcccctcctccacgcctgtaaaagagctttgtatttacctgtttgtttgtgcttttgtgcaatggaataaacaatgatattatactgaataaacatgaatgttctgagac

SEQ ID NO: 2967 - DNA, 1421 bp, Zea mays
  Clone ID: TF_ZmC20189_1
gattgagctcgtggccggccggggagaccccagagcgaagaagccccggccctcctgtagagctggtctccctctgaccctctctcctctgcgcttccgctgcgtcggccctgctcgtagcttggaggcggcggcattctccggcaatggggtgcaaggcgtgcgataagcccaagcccaactaccgcaagggcctgtggtcgccggaggaggaccagaagctccgcgactacattctcctccacggccacggctgctggagcgcgctccccgcgaaagccgggctccagcggaacggcaagagctgcaggctgcggtggatcaactaccttcggccggggctgaagcacggcatgttctccccggaggaggaggagacggtgatgagcctccacgccacgctcggcaacaagtggtccaggatcgcacggcacttgcctggcaggaccgacaacgaggtcaagaactactggaactcgtacctcaagaagagggtcgaggccaaggaccaggggcccagcacgcccgcgccggcggcgtccaattcggacgacgactcgcactgcgtcaagcagcgcagggacgacggcgacacggcggcgggagccaacggcccggcggactccggcgcgtcggagccgcgcgagtcgtcgtcggccgacgactcgagctgcctgacggacccgcacgcctgcaggccccacgcgcccgtgccgcccaaggtcatgttcgcggactggctggacatggacatggactacgtgggcggtgccctgccgtcgacagcaccagcagcacctggtctgctcggcgctgcgggcgtggccacggccagcacgggcgaccgcgaccgcgatcagcatcaggtgatgagcatgagccaggggtccgtgcaggtggatgggccatccggtgccgatgtgtccctgcacggcttcggtgacagcggcgccggctgttgggagttccaggagcacttcgatgccatcgatcacatgcaggcggccggcttctgcgacctgctctccatgaccgactacttcggcctcgactagactccaaccctggttggtgatccatcgttggtgaaaggatttgcgtttttttttaattacactttgttagaagtctcggtgaaaggcttgcttgtggctgtaaattactgtcgtgtacgtatagatagaggaattttaaaagcagataaaagtcaaggacctacattgtaaaaatgttgtcgtgtttcttgtggttcgctttgtagagtagagcaccgacggaaggaaaaggaacagatgtagtagttatactagcaagtacacatacgttgctacctttacatttatacttgagtgtcaaatataaatataaagacatgtgtgttttattgtctaggtagaaatgattgtgggtttagagtcaac

SEQ ID NO: 2968 - DNA, 1111 bp, Zea mays
  unsure (1)..(1111): unsure at all n locations
  Clone ID: TF_ZmC20189_3
cattgggtacctcgaggccggccctgctcgtagcttggaggcggcggcattctccggcaatggggtgcaaggcgtgcgacaagcccaagcccaactaccgcaagggcctgtggtcgccggaggaggaccagaagctccgcgactacattctcctccacggccacggctgctggagcgcgctccccgcgaaagccgggctccagcggaacggcaagagctgcaggctgcggtggatcaactaccttcggccggggctgaagcacggcatgttctccccggaggaggaggagacggtgatgagcctccacgccacgctcggcaacaagtggtccaggatcgcacggcacttgcctggcaggaccgacaacgaggtcaagaactactggaactcgtacctcaagaagagggtcgagggcaaggaccaggggcccagcacgcccgcgccggcggcgtccaattcggacgacgactcgcactgcgtcaagcagcgcagggacgacgacggcacggcggactccggcgcgtcggagccgcgcgagtcgtcgtcggccgacgactcgagctgcctgacggacccgcacgcctgcaggccccacgcgcccgtgccgcccaaggtcatgttcgcggactggctggacatggactacgtgggcggtgccctgccggcgacagcaccagcagcacctggtctgctcggcgctgcgggcgtggccacggccagcacgggcgaccgcgatcagcatcaggtgatgagcatgagccaggggtccgttcaggtggatgggccatccggtgccgatgtgtccctgcacggcttcgatgacagcggcgccggctgctgggagttccaggagcacttcgatgccatcgatcacatgcagggcggccggcttctgcgacctgctctccatgagcgactacttcggcctcgactagactccaaccctggttggtcatccatcgttggtgagaggatttgcgtttttttttatttacactttgttagaagtctcggtgaaaggcttgcttgtgttgtanattactgtcgtgtacgtatagatagaggaattttaaaaagcagataaaaatcaaggacctacattgtaaaaat

SEQ ID NO: 2969 - DNA, 332 bp, Zea mays
  Clone ID: TF_LIB3061-045-Q1-K1-A8-R2B
aacgatcggtgcttttaatttgtgagcaagcgatcgagctcaccaagaaccaccgttgctcactagttgcagccggtcggagcctagaacgacgaggcggtggatggtgatgccgccgtgctgcgacaaggtgggagagaagattggtccgtggaccctctaggaggacctgatgctcgtctgctatgaccaggagctcggacccgagaactggcgcgccgcgccgaccaacagcgggctgatgcgctgcagctagagctgcaagctgcggtggacaatctaccttcggccgggaatgaagcgcgtaaactttaccgacctggaggagaagc

SEQ ID NO: 2970 - DNA, 689 bp, Zea mays
  Clone ID: TF_ZmC42_23
cccacgcgtccggtcgacgtacagcagatggagaactgcgaggtactcttcccgggaggcagcagcggggccaacgcgttcaccaggccagagcaggagaggaagcgcgggcagccatggacggaggaggagcacaagttgtttctcttgggcctgaagaaatatggccggggggattggaggaacatatcgcgcaattttgttcagaccaggacgcctactcaggtggtcagccatgcgcagaagtacttcatgaggcacaactccggcggcaaggacaagagaagatccagcatccacgacatcaccacagttaagctgagcgacgaccaggaccagcctccgtcctcgccatcccagtcctctctgatcactgaccagttcaacgcattagctctgacatccggcgctgcgtattcgccctccaattaacctttgcggctttgccggactactgggatatgtatatgccaatctttggaacggggtttgcaagatcaacgcctgcagtgtggcccgttcaattggatggaagctagaacattctgttttttttgggtgcaattcagtctgcagcaccatgaatctatcagatttctatctacttgtatagtacagactggagagaccgggagtgttaacaagtttgttgtatcatcttgtgtggtgtaataaacctggaatttgat

SEQ ID NO: 2971 - DNA, 2477 bp, Zea mays
  Clone ID: TF_ZmC42_54
atcgccggctgacactcacaagaacctgcctccctcggtctggatcgctatctcttttctagcggctccagagggagggaaagctagcgcacagccgagagaagaaagcagagagggagggagaacaaagagagagagaaaaaaaaaaccagagaggttgagcaagaaccgaggcggatccgccttttgtccctcctgcccgagggctagcctgccgccgcccccgcgagagatcgagaggaggcgctgttcagttcaggtgaaattttgccttgttctgggtggggtctctcgggctctctgtggtgtttggtggtgtaaattggagtgggatttagaggtagttaggtctcgtctgctaggataggtgcggtggtctcgttaatttgtgggctccggaggtcaatttgttcacgatcccggtcctgttcgcggttcagttcaggagcgagtgttcctgagcccaatctaattcgtccataaagtcgatcccttaggtcgaggataataacctgtttgcagctggttccaggtttcacttgcaaaagatgcgccttgatatctcctccaatcccatgttcatcttatatgatttgatttctagcgacgacaagaatttgtgttcagagagagagagggggcgggggagagagagagaaatcctttaataattgttacagtgctctcggaatctttatcttgttctgagtgagatgcccaaaaaggcaaagggaaatctaacctttcttccagtcctgtgattccttcctacaggggggtgagaagccgtgggggaagagatgatgcgggagacgtacatggacgtgctgccgccggtggaccacatagccgcctcacggagcggcggctggttcccgggcgcggcgcgtctctggacggcggcggagaacaagcagttcgagcgggcgctggccgggctcgacctctgccgcccggactgggagaaggtggcgcgggccatcccgggccggacggtgcgcgaggtcgtcagccacttcaagagcctccaggtcgacgtccagcagatcgagagcggcctggtgcccatgccggtctacggcgccggggccggctcgttcaccctgcagtgggacggctgctacggccccgcggactcgaggcacaacggctaccgcttcggaagcggaggctgcgggaggcggcaccacggccgcaccccggagcaggaccggaagaagggcgtgccgtggacggaggaggagcacaggctgttcctcttaggcctgaagaaatacggcaagggggactggaggaacatatcgcgcaactacgtccagacgcggacgcccacgcaggtggccagccacgcgcagaagtacttcatcaggctcaactccggcggcaaggacaagaggaggtccagcatccacgacatcaccacggtgaacctgacggacgacgagcgggcgccctcgccgtcgcggtcctctctgatcaccaccaccagccagccaaacgcgccggctccggccgcagcggtgataggcgggcccttctcgtcggcggcggcggccgaggccaagcagcaccagcacggcgctgggaacctgccaccgaaccggacctccgtggtgccggctgtttacaggatggacgattcgcaggaccacggcctgcagtgtggccctctgcgtcatcaactggtcgccagccaccacagcgttctgttttaggcgcaagcgcaatcccactttgaggcgcgccatggtcatggatccatccatcaggtgttgtctagtgtgtgtgtgtacgatgcgtgtgttctttgctgtagcttcagcgcctgtatcgaagtgattagccttttggggagggggggcgtaacggaaaggggatcttcggttccacggtggtccaggtccacaatttgttgttggtgatgccgagaacgtaacaaaaaaaaggacgccaagaattctgagtggacttggcattcaatcatggaccctgcttttgctcgccacggcccgcggatgatgatcagcagaacctaattctggatccttcttggtcggctgatgtatcccttgagtgaccttggtggccatctcatcctgctgctgtctctgaagacggcgacgcgcttgtattggagggtttcagagttcagatcacattgctgtagtgtagtctagacatgtttacccatagtacgtaatcagttctttttttttttttgctaaaaaaaaaaaaaaaaaaaaaaaaaaaaaaaaaaaaaaaaaaaaaaaaaaaaaaaaaaaaaaaaaaaaaaaaaaaaaaaaaaaaaaaaaaaaaaaaaaaaaaaaaaaaaaaaaaaaaaaaaaaaaaaaaaaaaaaaaaaaaaaaaaaaaaaaggggggcccttttaaaaagaaccaaattttactacccggggattgaaaggaaaaattttttttatggggcccccaaaataaaataaatgggccggtttttaa

SEQ ID NO: 2972 - DNA, 1667 bp, Zea mays
  Clone ID: TF_ZmC24814_1
cgacgacagaccccaaaatccagtctttgaaaatgaactcttttcaatcttacaacactgactacttttatgctcatggtgctcaaacccaaaacttttgtgccgaagacctactcaacttcgacagcaccgtctttcttgatgactctgaaagtgaatccatctccactctccaaagtggatccaagaaaatcaccaaaacctctcctgctgtccaagccaagcaagccagctacaaaaagagcaagagagcaagaaacccatggactcctaaagaagatgccaaattaatggagctcatgaagaagtatggccaaagctgggctatgatctcctctcaattagaaggaagaaccggcaaacaagtcagagatcgttacctcaacaagcttagaccaaatattaaacttggtgactggagtgttcaagaagatgaacttgtcgtcaaactcttgaaggaagtaggcaacagatggagtttaatcgccaaccatctccccggcagaactgaaggacaggtcaaaaacagattctattctttcatcaaaaagagattacaacctgacggtaccctttgtcaaatctccgacagcagaactagttctgaagaatacactagcttctccaactctccccaacccgaaaccggatttgactttggctatgaatttgatgtcaatgctgctaatggatccgccatcaactttgctccccaaaccttcaactgtgctatcacgaagggcgcttatgttaccgaggaagaaatctattctgaaggaagcaccactcaaggccccacctcccaagttggaaacagccctttcagaggagaagtcgaccctactgatgtcatttcctatgacctccctgaagctttcttctataagcaaccctcccaacacagacatttcaacctcgcccctattgaacatgatagccaagttgatgctattcttaccaatgttaccaactactttgctgaaaacaacaagttctacatgccttctgaggttgattcctttttcactcaagctgaaacccaaggacaagctcctcaggatgatagacttaaccaattgagcatgagaaaggcttatctcgaattagctcttgccaaaaccctcaacgaaatgaaaagcctttaaatgagcggccagtccatttagcaccatgctaaactgaaaaaactatcttgtcttttgtctctcaattttttctttttagtctttcgaatctcagtccagcccttcaaataaattatctttttctgtcttgtttgagcaaaccaatgtcttactttatatgtctagtctagtctcgtctcgtttcatatttgtcttgtctcagttttatcttttgtctcgtctttatttgtcttgttttaacttatgtctctaatcatctttataagtctatacttgcaaaaacctaaatacgaaataaataagtaatccattcattgtcatttatgcataatttgtaatattataattatgcataagactttgaatttaaaatctttctttcttctattcataactttatattggtattacatattttttgtaaagataaattgattaaattcaattcatttgcaaaataaaaaaaaaaaaaaaaaaaaaaaggcgccgtctaaggaccaagcttacgacgcggcaggacgt

SEQ ID NO: 2973 - DNA, 1126 bp, Zea mays
  Clone ID: TF_ZmC13187_3
cattgggtacctcgaggccggccggaggcaactaagacaaagtggcgtactcttctctgtactagctttcttcttcctcctcctcttcctcctcccaaacagactggatttcatcaagataatcctgaaactggagccaacaagcagacagagaaagaagagcaagaagaccggctcccagccgatacaaggtaggagtgagcagcgttagatcagttttcatcacaggatcgatatggtgacagtgagagaggagactcgcaaggggccatggacagagcaggaggacctgcaactgggctcaaccggacaggcaagagctgccggctgcgctgggtcaactacctccaccctggcctcaagcgtgggcgcatgtctccccatgaagagcgactcatcctagagctgcacgctcggtggggaaacaggtggtccaggatagcacgccgcttgccagggcgcactgacaatgagatcaagaactactggaggacacacatgagaaagaaggcacaagagaggaagaggaacatgtctccatcgtcgtcttcgtcttcgctgacttaccagtcaggctacccagatactccatcaaccattggagttgagggacaggagcttcatggtggcagtggctgcatcacaagcatcctgaagggcacccctccggacatggatggctatcccatggaccagatatggatggaaattgaggcgccacagatgccctcggaggagagctttgttggggggaaccataatgtgtgcagcagccttgccaccccgctgccaccaccaactgtctgggaatactacccagaggcctgctggaaggttgacgatgagatcaagatggcaccacaatttcaatttggttatagtgaaggagttgggccctgcttctgatgccataaatattgggtcagattactaagttatacacctacctagcagaagtgaagtgcttttgtagaaacaagctttagcatggatctgaatatttatctccgcgcttagaattgcaggtctatggatctatgcatggttgctatgtatctatctagtgtgcaagacaagatcatcttaatttgtccttgatgctatggaatacaagggcaaaggtact

SEQ ID NO: 2974 - DNA, 1011 bp, Zea mays
  Clone ID: TF_ZmC13187_4
ctcgaggccggccgggaggcaactaagacaaagtggcgtactcttctctgtactagctttcttcttcctcctcctcttctcctcccaaacagactggatttcatcaagataatcctgaaactggagccaacaagcagacagagaaagaagagcaagaagaccggctcccagccgatacaagggctcaaccggacaggcaagagctgccggctgcgctgggtcaactacctccaccctggcctcaagcgtgggcgcatgtctccccatgaagagcgactcatcctagagctgcacgctcggtggggaaacaggtggtccaggatagcacgccgcttgccagggcgcactgacaatgagatcaagaactactggaggacacacatgagaaagaaggcacaggagaggaagaggaacatgtctccatcgtcgtcctcgtcttcgctgacttaccagtcaggctacccagatactccatcaaccattggagttgagggacaggagcttcatggtggcagtggctgcatcacaagcatcctgaagggcacccctccggacatggatggctatcccatggaccagatatggatggaaattgaggcgccacagatgccctcggaggagagctttgttggggggaaccataatgtgtgcagcagccttgccaccccgctgccaccaccaactgtctgggaatactacccagatgcctgctggaaggttgacgatgagatcaagatggcaacacaatatcaatttggttatagtgaaggagttgggccctgcttctgatgccataaatattgggtcagattactaagttatacacctacctagcagaagtgaagtgcttttgtagaaacaagctttagcatggatctgaatatttatctccgcgcttagaattgcaggtctatggatctatgcatggttgctatgtatctatctagtgtgcaagacaagattatcttaatttgtccttgatgctatggaatacaagggcaaaggtactac

SEQ ID NO: 2975 - DNA, 890 bp, Zea mays
  unsure (1)..(890): unsure at all n locations
  Clone ID: TF_ZmC13187_5
cattgggtacctcgaggccggccgggaccgcacaggctcgcagcaacttgagctcggtggcctccacatcggtgctcgtcttcgcctcgtctttgaaaattgacaagggctcaaattcggctcgagcccttctgtatcttcatgcagggctcaaccggacaggcaagagctgccggctgcgctgggtcaactacctccaccctggcctcaagcgtgggcgcatgtctccccatgaagagcgactcatcctagagctgcacgctcggtggggaaacaggtggtccaggatagcacgccgcttgccagggcgcactgacaatgagatcaagaactactggaggacacacatgagaaagaaggcacaagagaggaagaggaacatgtctccatcgtcgtcttcgtcttcgctgacttaccagtcaggctacccagatactccatcaaccattggagttgagggacaggagcttcatggtggcagtggctgcatcacaagcatcctgaagggcacccatccggacatggatggctatcccatggaccagatatggatggaaattgaggcgccagaggtgccctcggaggagagctttgttggagggaacgaaaatgtgtgcagcagccttgccacccctctgccaccacctaccgtctgggaatactacccagaggtctgctggaagcttgacgatgagatcaagatggcaccacaatttggttatatagtgaaggagctgacccctgcttctgataccatatatattgggtctgattactaagttatacccatcctagcagaagtgaagtgcttttgttgaccnagctttagcatggatctggatatttatctcccgctttagaatngnangnctatggctctatgcatgatt

SEQ ID NO: 2976 - DNA, 737 bp, Zea mays
  unsure (1)..(737): unsure at all n locations
  Clone ID: TF_LIB4729-111-A1-K1-E11
aagctgacagagagagctagcaacgctctgcaagatccgccatctaaactttgcagcactctactccaccactctcctccgtctgcgactgcgactaggtcccaaatggccgctccaccggtggccgccgctctgtctgcgctccatgaggcacaagagacccacggccatgacgacagccgcgctgggcacgcgagaggccactggcggccagccgaggatgccaagctcaaggacctcgtggcgctgtacggccccaagaactggaacctcatcgccagcaaactccacggcagatcagggaaaagctgccggctgcggtggttcaaccagctggacccgcgggtcaaccgccgcccgttctcggcggcggaggagcagcggctggtggcggcgcaccgcgcccacggcaacaagtgggcgctcatcgcgcgcctcttcccaggccgcaccgacaacgccgtcaagaaccactggcacgtcctcacggcgcgcaggcagcgggagcggaccggcgcgccgccgcgccgacgcaagccctcctcgtcgtcacccgccgcccaccaccaccgtgcaccatctcctctgccgttctgcgccggcaaggccacccgaccccgctcggtgcggcgacggcgacggcgacggnggcgggtccgacgagtccgcgtcgtccacctcctccggnaccgacctctcctccctaggctccgtgtgcgcccccgccgtcccctgct

SEQ ID NO: 2977 - DNA, 1409 bp, Zea mays
  Clone ID: TF_ZmC2941_2
aattcggcacgagggacgtcccaatcgagctaatctcacaccgccagtgccagtgccagcggcagctgctaatccgtgccgtgttccagcagcgatgggagtggagtcggagtgcgacaggataaagggcccctggagccccgaggaggacgaggcgctgcggcgtctcgtggagcgccacggcgcgcggaactggacggcgatcgggcgcggcatcccggggcggtcggggaagtcgtgccggctgcggtggtgcaaccagctgtcgccgcaggtggagcgccgccccttcacgcccgaggaggacgccgcgatcctggccgcgcacgcccggctgggcaaccggtgggccgccatcgcgcgccttctcccggggcgcaccgacaacgccgttaagaaccactggaactcgtcgctcaagcggaagctcgccaccgccacggcgacctccagcggcagcgatgctgagcgggcgtgcaagcgcgcaagccctggcccggggagcccgacggcgtcggaccgcagcgacctcagccacggctgcggcgccgcgcaggtgttccgtcccgtcccgcgcgccggaggcttcgacgccatcagcgccgcagacgtgcgccctccgcccccgccagcagtcgcagacgaggacccgctcacctcgctctccctctcgctgccggggctggaccagtcgccgtcgggcttccaccacgacagcgcccggagccacttccaggagctctccccctcgtcgtccccgtcgccgcagtctactccacccgccttccctccgcaggcggctccgtctcagtcgtcgtacgcgttcagcggcgagctggttgccgcgatgcaggagatgatccgcgccgaggtgcgcaagtacatgtccggcgcggggctccgcgccggatgcgggcccggggccgtgggcgaggtgtgcatgccgcagctggtggagggtgtgatgcgcgccgccgcggagcgcgtcggcgtcgtcacacggccgtagaaacccggaaacggaccaaatcagatctgatcaatgcgaagcattgtgttaattaagatcccgtccgtcctgtgtagcagcgctacgtagactactactactactagtcgttctctggccgttgtatttagcagaggagctcgcgtttgtttattcttcggcggctgtcgctctgaatccagaaaggaacagagcggcggtgtaaagccgggagcggaagcggaggttggcaataatcgagatcgagcctgccatttctataaccggatgtgaccgcaacttgatccaaaaaaaaaaaaagcaaaaaaaaaaaaaaaaaaaaaaaaaaaagcctcctctcggccgctctgtacgggaattaatcggattggaccggaatgcaccgaaaagagggggcccg

SEQ ID NO: 2978 - DNA, 1069 bp, Zea mays
  Clone ID: TF_ZmC42_34
gacggcggaggaggtgcggcggcactacgaggcgctggtggaggacgtggccgctatcgaggccggccgcatcccgctcccgcgctacgctggggaggagtcgtccgcggcgacgcccgagggctccggtgccgccggcccgtccacgcccaaggacggaggaggagggagcgggcaccgacgcgaagaacggaagggcggcgtcggcgctgacgcggggaagagttgctctaaggccgagcaggagcggcgcaagggcgtgccgtggacggaagaggagcacaggttgttcttgttgggtctggacaagttcggcaagggcgactggcggagcatctcgcgcaacttcgtcatctcgcggacgccgacgcaggtggcgagccacgcgcagaaatacttcatccgcctcaactcgatgaaccgggacaggcgccgctccagcatccacgacatcaccagcgtgaccgccggcgaggtggccacggccggcgcgcccatcacgggcggcggcccgaccgcggcgggggcgatgccgatggggccgggcggcatgaagcaccaccacccggttccgccgatgggcatgtacgggcatgcgcccatgggccacccggtcgctgggcacatggtggcgccggcggccgtcggcacgccggtcatgttcccgccgggccatcactcgccctatgtcctgccggtgggatacccggcgccaccgaccaagatgcaccagtgatcgtctacgaccggcatttgcgcatctgcacaactgcattcctttgctcgttctttcttgatttcgttgatgatcttgtgtagccaaagctatctatatccatcctttcctcatctcccgggtctttgatttttgacgtaacatatagatgacttgagcgagtgcagggcaggcaggcgaataatgagtatcgctacttacaggaaggctcaaggaatgtgtaattagtagcagccttcctgggtgcaaatattcatcatttgtgcaactggggactgacagaatctcatttcccggatgtaaatcgattgtctataatatctcatctgtgcg

SEQ ID NO: 2979 - DNA, 231 bp, Zea mays
  Clone ID: TF_ZmC177016_1
gacgaggagaagctcatcatccacctccactccctcctcggcaacaagtggtccgccatcgccaccaagctgcccggccggaccgacaacgagatcaagaactactggaacacgcacctccgcaagaagctgctcgccatggggatcgaccccgtcacgcaccagcgccgcaccgacctcaacctcctcgcggccggcggcttcaccaacctcctcgccgccgccaacctc

SEQ ID NO: 2980 - DNA, 466 bp, Zea mays
  unsure (1)..(466): unsure at all n locations
  Clone ID: TF_LIB3600-012-P1-K6-D11
aggtggaccaaccacctgcgccccgacctcaanaanagcgtgtggactgaagaagacgacatggcgctgatcaaggcgcacaagcggtgcggcaaccactggtcgaccatcgccacgttcctgcccgggcgttccgagaacgccgtgaagaaccactggaacgccaccaagcggagcctcaaagccaagcgccggctgaagaagaagagcaacgcgcagcaggtgccggccgggcagtggtccgtcctggaggagtacatccgcagcctgtaccctgacctcgccgacggcgccggcgccgaccagaccccgccggcggccgaggactcccccccgtcgtcctacaacctcgggtcgtactcgtacggcgaggtgatcagcagcccagcgtccgccgccgcgccgcccggcagctttgaccagatgaccgccatggggctgtacctgggcgcgtcgtcgtcgtcgc

SEQ ID NO: 2981 - DNA, 1652 bp, Zea mays
  Clone ID: TF_ZmC17058_1
ctgcagggccagcgaaagcttcgttgttccggcgggcagttgcaagcaaacaactgccgcgcgcataacgccattgaggtaactggctagtgctagtcccaccctttgcacggcagcttgctagctagctacctacctcgggcgcgcgcggcatggcgaggcggacgagcggccccaagaagaagctgaggaggggcctctggtcgccggaggaggacgataagctcgtcaaccacattgccaagtatggccacggctgctggagttccgtccccaagctagcaggtctagagaggtgtgggaagagctgcaggctgaggtggatcaactacctcaggccggacctcaagaggggagcgttctcgcaggaagaggaggacctcatcatccatctccattccatgatgggcaacaagtggtctcagattgcttcgcagctgccggggcggacggacaacgaggtgaagaacttctggaactcgtacgtcaagaagaagctccggcagcgcgggatcgacccggccacgcacaagccgctcccgctggccgccgagggcatcagcagccgcacggcggtgttcagcgacgccgagctcatcctgtcgtcgccggcggcggcggcggggcggcacatgccgccgccgccagtggcggcatcggcggcggagagctacgtgtacagctacagccacagcagtggcggcgcgagcgacggctctctgcagtcgctgtcggggtacaacagcaacagcaagcaaacagctgcggatcacttgggtgccgcagccgcagcggggtacctgcagcaggagcaggacccagcagcagcagcagcagcagccgacgcgctgcactgcggaccctccggtgccccggcggtcgttctcccgtcagtgtccagctccagcacgctgaactcgatggctggcctaagccccgcggccaccaccaccgacgaacagtgcaccaacaactgtagcagctgcagcttccacagcgggttggagccgtggctggagctgggcagcacgagcggctactacggcgcctccgccgccgtggaccactacggcgcggcgctggacgagctcaagtggtccgactacgtgttcgacggcggctacggtggccagccgggacagggcatctacggcgacagcaaggacgccgtgcagttcgtggacgccaacgcgctcagcagcagcagttggtgcttgaattgatccccgtcggtcgatcccaacgcgctcggcggcgagcaattaactaatcggccggccgccaattccaactccatctccagcacagcagagacacacactgatacacgtgtgcatgtgttcctacgtgcctacctacgaggctacgactacgattgattggttgattggtgatacataaagtagctcatacatgtttgcattggtgagcttcttgtttgtaaattcaattttcgtcttctttcggattggattacagggtttgttaattttccggcgcggtcggtcgacatgtagagagtgcatatggtgacggtgattggggagtgacgagacatacatgtaatggaacatatatatagagagagagattacatatataataataatacatatttattatattatatttaaacaaaaaaaaccccaaaa

SEQ ID NO: 2982 - DNA, 836 bp, Zea mays
  unsure (1)..(836): unsure at all n locations
  Clone ID: TF_LIB4969-008-A1-XP1-D12
gccggccgggcttcgagaaactaagacaaagtggcgtacttttctctgtactagctttcttcttcctcctcctcttcctcctcccaaacagactggatttcatcaagataatcctgaaactggagccaacaagcagacagagaaagaagagcaagaagaccggctcccagccgatacacggtaggagtgagcagcgttagatcagttttcatcacaggatcgatatggtgacagtgagagaggagactcgcaaggggccatggacagagcaggaggacctgcaactggtatgcactgtccgtctgttcggtgaacgtcgttgggatttcattgccaaagtatcttgtttgaggggtggggatccacaaattaggtagctaaattgaagtcacccgcgctaagtcgcaaaagcagctatcaacctctctgaccgactctattcttgcttcccctctccccttctgtatcttcatgcagggctcaaccggacaggcaagagctgccggctgcgctgggtcaactacctccaccctggcctcaagcgtgggcgcatgtctccccatgaagagcgactcatcctagagctgcacgctcggtggggaaacaggtctgattaccaaaagataataaaaaaggacggtttttctctctctctctaaaatttgttgacatgttcaataacttgtcctanacaggtggtccaggatagcacgccgcttgccagggcgcactttgacatgagatcagaactactggaggacacacatgagaaagaaggcacaggagaggaaagagaacatgtctccatcgtcgtcctcgtcttcgctgacttacag

SEQ ID NO: 2983 - DNA, 797 bp, Zea mays
  unsure (1)..(797): unsure at all n locations
  Clone ID: TF_LIB4764-078-R1-K1-F4
gggtacctcgaggccggccgggagcagcacagaccacactggaaagtgcaagctgtagtgagacctgcgcgactgccagcgtgtatccgcgcggcaaggagcgtagcgcgcggtcgtcggcccgcacggccaccaactcccttggacgcacgcgcgcgcgcgaccagctgctaaccgtgcgcaagtagtagtgcgacttcgccgccggccgggatcgctagctcgatcgatcggcgggaccacatacgactccggtgtggccagcggcggccgggccggggaacgcacgtgctgcgagcgagcgagggcagacgctagctgttgccgggagctagccggcgcgcgatggggagggcgccgtgctgcgagaaggtggggctcaagcgagggaggtggacggcggaagaggaccagttacttgccaactacattgcggagcacggcgaggggtcctggaggtcgctgcccaagaatgcaggcctgctccggtgcggcaagagctgccggctccggtggatcaactaccttcgggcggacgtcaagagggggaacatctccaaggaggaagaagacatcatcatcaagctccacgccaccctcggcaacagcttgcactctagtgcggggccgtggccgagtggaggcaggaagacgagcagcaagctagcgacagtgtcctgacagctggcgatgacggttgggtgggcgggcacgatgatgaactgacggttggacgtcaattggacagcgngcacaacgctaggacgagcgctaaagcggggttggatgctacaaac

SEQ ID NO: 2984 - DNA, 766 bp, Zea mays
  Clone ID: TF_LIB4767-023-A1-K1-E7
ggccggccgggagcacagtacacacactgggaaagtgcaagctgtagtgagacctgcgcgactgccagcgtgtatccgcgcggcaaggagcgtagcgcgcggtcgtcggcccgcacggccaccaactcccttggacgcacgcgcgcgcgcgaccagctgctaaccgtgcgcaagtagtagtgcgacttcgccgccggccgggatcgctagctcgatcgatcggcgggaccacatacgactccggtgtggccagcggcggccgggccggggaacgcacgtgctgcgagcgagcgagggcagacgctagctgttgccgggagctagccggcgcgcgatggggagggcgccgtgctgcgagaaggtggggctcaagcgagggaggtggacggcggaggaggaccagttacttgccaactacattgcggagcacggcgaggggtcctggaggtcgctgcccaagaatgcaggcctgctccggtgcggcaagagctgccggctccgttggatcaactaccttcgggcggacgtcaagagggggaacatctccaaggaggaagaagacatcatcatcaagctccacgccaccctcgggaacagggatacagcagcgcaccagtcttgatgggaaatggtgttccggcagcggttcgaggtactggacaggtctacctgaagttaacttcaggaaagacgctcgtgctgaaggacgtactctatgtgccatcgatgagccggaacctcatatcagtgtcgctgctatgtcgac

SEQ ID NO: 2985 - DNA, 824 bp, Zea mays
  unsure (1)..(824): unsure at all n locations
  Clone ID: TF_LIB5117-052-A1-PF1-E5
atgcttcgctcgctgggcgacagcatcnggaggaaagaaaggttgcctctcccccgccttggatttgatagccgctagctgattaagcgtaacacgctctgtccctaccagcagctagcacaaaaaaatatctccaagaaaagagctgaaatcgcagcagcagcggcaacgtgctcagcttagttagcagtagcagtgctatctctttcagctaagtgggagagctcgctcgctagctgaggagtgcgcgccattaatggcggaagcggaagggcagctcgcggcctgctgggggaagcaggacgacgagtggaggaaaggcccgtggacaacccaggaggacaagctgctcctcgaccatgtcgcccagcacggcgaagggaggtggaactccgtctccaagctcacaggtctcaagagaagtggcaagagttgcaggctgcggtgggttaactacctcagacctgatctaaagagaggcaagatgacaccccaagaggagagcaccatagtccagctccactccttgtgggggaacaggtggtcgacgattgcacgcagcctcccggggaggacggacaacgagatcaagaactactggaggacgcactacaagaagggcaagccgtccaagaacatcgagcgcgccagggctcggttcctgatgcagcggcgtgagatgcagcagcagcagcagcagcagcaacagaagctgctacttgggcagggcaaggacgccgagctcgccagcgccactgccgaggacgacgtcgacgagaagatgaccggcaacgtaggcccggcagcgacggcgctggctgaca

SEQ ID NO: 2986 - DNA, 713 bp, Zea mays
  unsure (1)..(713): unsure at all n locations
  Clone ID: TF_LIB4744-081-Q1-K1-A2
ccggccgggacacccactgcgccccggcctgctgcccggctcccatatgtatgccctccgttgcacttgcactgcaccccctgtctgtccccacccttctgccctggcttatctctttccgcttccccctgttataatagcaaccaaaccaaaccaaaccagagctcaggaggagcttccacgcaaactcaggggaggcgcgcgcaagcaagcacacgagggagaaccaggcatggggaggtctccgtgctgcgagaaggcgcacacgaacaagggcgcctggaccaaggaggaggaccagcgcctgatcgcctacatcagggcgcacggcgaagggagctggcgctcgctgcccaaggccgcgggactcctccgctgcggcaagagctgcaggctccgctggatgaactacctccgcccggacctcaagcgcggcaacttcaccggcgacgacgacgagctcatcatcaagctccacgccctgctcggcaacaagtggtcgctcatcgcggggcagctgcccggccggacggacaacgagatcaagaactactggaacacgcacatcaagcgcaagctgctcagccgcggcatcgacccgcagacgcaccgcccgctcagcggcggcgcgggcagcgcgctcaccaccacgtncagcaccgccggcttcccgtcccccggcccgcgtccaggtccaggcccacgcccacgcc

SEQ ID NO: 2987 - DNA, 683 bp, Zea mays
  unsure (1)..(683): unsure at all n locations
  Clone ID: TF_ZmC1193_14
ccggccgggagcatccaaccaaaccaagcagagctcaggaggagcttccgcgcaaactcaggggaggcgcgcgcaagcaagaccacgagggagcagcgggcaggcaggcaggcagccatggggaggtctccgtgctgcgagaaggcgcacacgaacaagggcgcctggaccaaggaggaggaccagcgcctgatcgcctacatcagggcgcacggcgaggggagctggcgctcgctgcccaaggccgcgggactcctccgctgcggcaagagctgcaggctccgctggatgaactacctccgcccggacctcaagcgcggcaacttcaccggcgacgacgacgagctcatcatcaagctccacgccctgctcggcaacaagtggtcgctcatcgcggggcagctgcccggccggacggacaacgagatcaagaactactggaacacgcacatcaagcgcaagctgctcagccgcggcatcgacccgcagacgcaccgcccgctcagcggcggcgcgggcagcgcgctcaccaccacgtncagcaccgccggcttcccgtcccccgcgccggcgttcaggcccacgcccacgcccccgcccgccgtcgncgtcgtcccgcccaatgcgatcttcgcgcgcncggcgcccgtcgtagacggccacagcagcagcggcgcgagcac

SEQ ID NO: 2988 - DNA, 1556 bp, Zea mays
  Clone ID: TF_ZmC192589_1
ggccgcttttttttttttttttttgacataataattcacatttttatttaaccgcatggcccactcatcatatctctgtccctctctctctctctgcagtatttatactaattaacaacagcgtatgtattactttacatgtgtgttaaacacttcaaatgtactcatcacatgaacttttatccgctgctaatcaacacagcaacatgagaatagaaagggggaggggtaacaccagatgaaatgcccgtaagaatttgcatctgcagactatatatagacagtaattaattcacactgatggactgtttcttgttccgtggtttctttgcattgagtacgtgatggattactggactagcaccagttgcttagcccgccatggacactcgaagtgcaccggggacgtcatccttgccgccgtagacacactgccccggctgcagggcgccttgctggctctcggcggcctggaaggcactgtcgaagtactccgaccacctgagctcgtccagcgcgccggcgtagcagctgccgacgacgtggccgccggcgtcagccaccgcgtttgccccgagctccagccatgggaggttgccgccggcggcgacgttgttggtgctgcagtgttccgcttccgccatcgaggtcagcgtgctggagctggcgctggcggaggccgacgggacgaccggcgccggcgggatggggccgcagtgctgctgcagcgcgtccatgtcgaagcagcccccctgcaggtagcatggccttgacgttaccccgtcgccagcgacgggccagtccagctccaccgctagcttcacgctctccagcattgggccgccctcgaacgacggcggcggcacctggattgtagtagtagtagtagtcgggatgaggtcgacgtccccaaacaccgcgcggcgggagaccgtggtggtggtggtggcagtggctgcggcggcaggctcggcgagcggctggtgggtggcggggtcgatgccgcgctccctgagcctcttcttgatgtacgagttccagaagttcttgacctcgttgtccgtccggccaggcagctgggccgcaatctgagaccacttgtttcccagcaaggagtggaggtgtatgatgaggtcctcctcctcttgcgagaatgtgcccctcttgaggtctggcctcaggtagtttatccacctcagcctgcagctcttgccacacctgtcgaggcctgcaagcttgggtacggagctccagcagccgtggccgtacttggcaatgtggttcatgagcttctcgtcctcctcgggggaccagagccctctcctaagcttcttcttgtggcagcacgactgcttcgccatgccgggatagcctggcgccaggagctagcaagctaaaaccccagccggccgttggcctcgcgcgcgcgccgaccgatccttgacgatgatcgctcgttatatggaaggcgagatgtgatggcggcaggctactaggagccgaattgaagagaggccaggagaaagagaaagagagagagagataaaaggatgcca

SEQ ID NO: 2989 - DNA, 3387 bp, Zea mays
  Clone ID: TF_ZmC335_2
ggccggccgggaacagaacccaaacctcgccgattcgctccccttcctcaccgcgcgcgtacgccgccgctgcgctcaccttaacgaaccctaaacctgagccaccgccctcccccggaggtccgccgctccgtgtgggactctaggcgtcgccggagccccctccaggggctagcggcggaggaagtcggaaaccgattacccctcccctccccttaccgggggagggagaaactagcggaggaggcgaatcaggtcagagtggggcacgatgaggatcatgatcaagggaggcgtgtggaagaacacggaggacgagatcctcaaggcggccgtgatgaagtacggcaagaaccagtgggcgcgcatctcgtcgctgctcgtccgcaagtccgccaagcagtgcaaggcccgctggtacgagtggctcgatccgtccatcaagaagaccgagtggacaagggaggaggatgagaaattacttcatcttgctaaactcatgcctactcagtggaggacaattgcacctattgtaggtcgaacaccatctcagtgtcttgaacgttatgaaaagctgcttgacgccgcatgtgcaaaggatgaaaattatgaggctaatgatgatcctaggaagctgcggcctggcgagattgacccaaaccctgagtcaaagcccgcacgtcctgatcctgttgatatggatgaagatgaaaaagaaatgctttctgaggctagggcccgcttagctaacactaggggtaaaaaggccaaacggaaggcaagggagaaacaacttgaagaagcaagaaggcttgcttcactacaaaaaaggagagaattgaaggcagctggtattgatacacgccacagaaaaagaaagagaaaggggattgactacaatgctgagattccatttgaaaagagaccaccttcaggtttttatgatactgttggtgaggacagaccacctgaacatgtacagtttccaacaaccattgaggggcttgaagggaagagaagagcagatatagaggcacaattaagaaaacaggatattgccaggaacaagatcctgcagcgacaggatgcccctgctgctataatgcaagcgaataaactaaatgatccagaagctgtcacaaagaggtcaaagctaatgctgccgcctcctcaaatttctgaccacgagctagaggagatagcaaagatgggcagtgctggtgatcctgctttagctgatgagcttggtgaaggaagcactgccacaagaaccttgcttgccagctattctcagactccaaggcttggtatgacaccattgcgaactccgcagcgaactccagctgggaagggtgatgcaatcatgatggaggcagaaaatcttgcacgtctcagagaatcacaaacgcctttattaggaggtgataacccagagcttcatccatcagatttctctggtgttacaccacgcaagaaggagatacagactccaaatccaatggcaacacctttagcaagccctggccctggtatcactccaaggattagtatgacaccatccagagaggggcacagctttggtttaacaccgaaagcaactcctcttcgtgatgaacttaacataaatgaagtggaaatgcaggacaacactaaacttgagcttcgtaggcaagccgaactgaggaaaagcctgcgatctggttttgcttctattccacaaccaaagaatgagtaccagatagtcatgccacctattacggaagatgagaaagaagaagctgaagagaaaattgaagaggacatgtcagacagactggcacgagaaagggctgaggaacaagctaggcatgaggcattgctcagaaagagatccaaagtgttgcagaggagtctgcctaggccaccggctgtttcagtagagattatccggcaatctcttattagaagtggagaaagcagaagcagaagcacctttatgcctcctacatcacttgaacaagctgatgaactaataaatgaggaactccttaggcttcttgagcatgataatgcaaaatatcctcttgatgaaaaaactcaaaaagagaaaaagaaaggaagcaagcgtcagcaaaatggaggacctcttgtccctgaaattgatgattttgatgaagatgaactaaaagaggctagctctatggttgaagaggagattcaataccttcgagtggccatgggtcatgaaaatgaatcttttgaggacttcgtgaaagcacatgatgcatgccaagacgaccttatgttttttcctaccagcaatagctatggtttagctagtgtggctggaaatgctgataagatttctgctttgcaaaatgagtttgaaactgtgaagaagcgaatggatgatgaagctaagaaggcttctcggcttgagcagaagattaagcttctgacacaaggatatcagatacgggctggaaaactgtggtcacaggtccaagatacattcaagcagatggacactgccgcaacagagctcgaatgcttccaagagctgcagaaacaggaacatctcgctgcttcatatcgaatccaaaatttgtctgaagaagtgagtaaacagaaggcactagaaaggaccctccagagccgctacggcgagctggtttctggtttccagaggatccaagaacaggtcgaggagcacaagaggcaactcaaggtacaagaggcggtagaagccgaaagtcacgctcaggaagaggaagctgcggcatcaaatcatgctgctgctgaggaagaggatgaaaggaaggaagatgatgaaaggaaggaagaggatggaagcaagtctctcagctctgaagagaaaccacagcagacaagtacggctaccgatgaagaacctgcaggaagcaaaggaaccaccgaggatcagatggacgtggacagcgggaatggagagggtggagttgtaggccctgtcccaccagcaccagacactgaagggggtaatgatgaagtatcagttcaagagatcagtgaagcccagcccttgccttgaagacggcgctcctttcccttcaagctccgctttcttctcccgcacctggcgatcttcacgatgttgttgttgcacagcaggtccggactgagtatttcctatttggttatatttttagtgcactataatatcgcaagcgaagctacaattggttgtgagctaaatttgcatatccttccctttgttgtattcccttgaacaatgaatcagaacaactgtttaccatttttctaaaggatcgacggcttatgtactcaaaaaaaaaaaaaaaaaaaaaaaaagaaatctgcgttgttaccactgctggctgaataccagccaagtaagcatgacatgct

SEQ ID NO: 2990 - DNA, 838 bp, Zea mays
  Clone ID: TF_ZmC3484_2
cattgggtacctcgaggccggccgggagctagccaagcagacccgatcgaccgccgtcgttgcaatgcaagtggccgcccgcggtcggtcaccggcgttgcattgccccgtctcttagtttgtcgccgtcgtcggccgtcgatcggggcagagaatgggacggctctcctgcggcggcgtgcagcccaagctccgcaaggggctgtggtcgcccgaggaggacgagaggctgtacggtcacatcattcgacacggcgtcggctgctggagctctgtccctaagctggcagggctgcagcgttgcggcaagagctgccgcctgcggtggatcaactacctccgccccgacctcaagcgcggcggcttctcgcagcaggaggaggacctcatcgtggcgctccacgagatcctggggaacaggtggtcgcagatcgcgtcgcacttgccggggcggacggacaacgagatcaagaacctgtggaacagctgcctcaagaagaagctccggcagcgcggcatcgacccggccacgcacaagccgatcgccgcggaggcgggctcggcgctgctgcaccacgacgaccagagcaagccgcagcagcagcctgcggcggcggccgtgttcgacccgttcccggtgaccgacttcggcttcgacctgggcgcagcggcattgtacggcgaacgtccgacgcgtcgtcggacgccgggttcgtggccgactacagcagcgtgctggacgtgtcggagaacctgggctacggggagagctccagcaacagcagcggctggactgcgcggagatgggcatgccgtgctcgacagcgaggcgctgcac

SEQ ID NO: 2991 - DNA, 691 bp, Zea mays
  Clone ID: TF_LIB4741-010-Q1-K1-H11
aagtgtcttcccagttaactccgttgtacgtctctctccctttactagctccgatcttctgctagctcctccgaaccacttgtcgacacgatcgatcgtcgtcgtacgcctgcttggcgtacatactgctactaatggagacggcgctgcagcagagtgctgctactactgctggcggcggcatgaggcccggcgcggcgacgacggtgaagaaggcgaggcaagagctggagcaggagttgcggtttccgcaggcggcgcccgcggatcagggcggccttgacgaggagctccggcgcgggccgtggacggtggacgaggacctcacgctcatcaactacatcgccgactacggcgagggccgctggaacgcgctcgctcgcgccgccgggctgaagcggacggggaagagctgccgcctgcggtggctcaactacctgcggccggacgtgaagcgcggcgacttcaccgccgacgagcagctcctcatcctcgacctccactcccgctggggcaaccggtggtccaagatcgcggcgcacctgccaggccggacggacaacgagatcaagaactactggcggacgcgggtgcagaagcacgccaagcagctcaactgcgacgtgaacagcaagcgcttcaaggacgccatgcgcttcctctggatgccgcgcctggccgagcgcgccgc

SEQ ID NO: 2992 - DNA, 914 bp, Zea mays
  Clone ID: TF_ZmC29713_11
ccacgcgtccggcaagctgtagtgagacctgcgcgactgccagcgtgtatccgcgcggcaaggagcgtagcgcgcggtcgtcggcccgcacggccaccaactcccttggacgcacgcgcgcgcgcgaccagctgctaaccgtgcgcaagtagtagtgcgacttcgccgccggccgggatcgctagctcgatcgatcggcgggaccacatacgactccggtgtggccagcggcggccgggccggggaacgcacgtgctgcgagcgagcgagggcagacgctagctgttgccgggagctagccggcgcgcgatggggagggccgccgtgcttgcaagaaggtggggctcaagcgagggaggtggacggcggaagaggaccagttacttgccaactacattgcggagcacggcgaggggtcctggaggtcgctgcccaagaatgcaggcctgctccggtgcggcaagagctgccggctccggtggatcaactaccttcgggcggacgtcaagagggggaacatctccaaggaggaagaagacatcatcatcaagctccacgccaccctcggcaacaggcgccccctgatcgccggccccctccccgccccgccctcggctgttcgatgccatcatgataatttgtcacttgcatgcacggatcgcgacgcgatgcgatcgagtagcggcaaactcatcaacgtgctgttccaggggcttcggttggtgttgctatactctgagatactgtgcattgtatgtcaaaaacctcgctgttagatactgactactgtgtgacccgttgaatgaatagtacttcaataatatatatatgcttgtttaagttaactggcacgtatatatgcatgtacttgtatcttttatgggaaaagacaacacatatttaattaaaaaaaa

SEQ ID NO: 2993 - DNA, 3901 bp, Zea mays
  unsure (1)..(3901): unsure at all n locations
  Clone ID: TF_ZmC2165_1
gatcaatggtcatattgattctatagagagtgaatgcttatcgagaaataagannaaagaaagggtatgtgctactctttgaaagaaaaaagaataggagttcccgaagtaatgtctaaacccaaggatttcacaaatcaaagataaaggattccggaacaagtaaacacgattttcaaccgtctcaacaatagaattagatctgaataaggaataaaagtcaatttgttcgagatgagataaagaaaagagtttagagacgactcaaaaaatttcgaagggtttttcttttgaagtttgtcagtaaaaattagccaacttgagtcatgagtataaatgaaatttgttttttcttttctttaaggaaattaatgcaagtcataatcgaatttctatctatttgcattatagacagattgcattatagacagaaattcgaatcattttctcgagccgtatgaggagaaaacctcctatacgtttctaggggggggttgtttatctacatctatcccaataagctatctatcgaatcgttgcaattgatgttcgatctcgaagagaaggaagagatcttcgaaaagtaggtttttatgatccgataaagaatcaaacttgtttaaatgttccagctattctctatttccttgaaaagggtgctcaacctacaagaacagtttatgatattttaaggaaggcagaattctttaaagataaagaaagaactttgagttaattgaagaactaaatgaataaaaaagtaggagagggtccttagtaccccttaattatttagacacaatttgcctctttcttagtcctattttttttttgctgcatttatgtcgtgccaatccaacaaaagtccctattttatttcctttttatatctaattacattgtatttgcattgacaaaggtctattgaacaaatagaatttgtagatagatgggtctctttattgtcactccatattaggtatttctgtctacacttcattcaaatgatagggttgcccctcttgcatgtactctcatacacatacaagattattttacttctttaaattgccaaaaaaatcacaattttgccattgtgattggggctgcttttttttttttacccttagccttagtgaaatttaaccggatctgttcatttttgtatttgagtgtttttaatggattagaaaatctttcttttgatgtcttgctaattcaatgtggtataatttcatcgatttttagattttgatcgtatctaagagatcctattttatccgggttgctaactcaatggtagagtactcggcttttaagtgcggctacgggtacctcgaggccggccgcgatctagcggcagagaccaaagtgcccatcgcaccatgtcggccgccgaaaccgctgtttctccgacgacgacgccgcagccgcagctgcaatcggatccgaacgccgccgccgacgcggccagttccaattctctctgggtggccgacgagacgcaaaccctaaccgaggtcctgctccaaccccaaccaaaccacctgtcgcctcctccttctggtgaaggggacgacgggatcactgcctccggtgctcctgttggtggggacgccgcggcatctgcttctgctgcggcggcggctaacgcgacgatagaagagcgggtgagggggccgtggtccccagaggaggacgcggtgctgagcaacctcgtggagaagttcggggcgcggaactggacgctgatcgcgcgtggcatcccgggccgctccggcaagtcctgccgcctgcgctggtgcaatcagctcgacccccaagtcaagcgcaagcctttcactgaagaggaggaccgcattataatggcagctcatgctgtccatgggaacaagtgggcatctatcgcaaagcttttggatgggagaacagacaatgccatcaagaatcactggaattccaccctgaggcgtcgctactgcaatgatggccaatgcaagcatggtggttctgtggagcgaagtatcccaaaggtgtccagggaagtttcagaagaaccttggcctttaaacgatcttaattccttcaccgctatggatgtaaaggatgatcctgtgcaaacagctccagatacttctcctcgggcaaggcacatcacagatcattgttctattactcaagtcgttgatccaccatacctgtcccgaccagcggcaaagattggtgctttcagaccatattatctaggacacacggaacctacccaacaagaaatgccaggtgctgtcgtcatgtttgactcaactcataaagtctcgactcctgaaagcgaggtattcaagtttgttgatcctatatgctttgctgctgaggtgccagacaaatgtgggtatggttgctgcggtgctcatgagcagcatcgtaagaactcattgctgggtcctgagttcagtgagtttgaaggtcatccacctgttttaaatattagctttgcttcattggtatcagaaattagcagcattgcctggatgagaagtggtatgcaaagcagtgattccagcaacttgatgcaatcaattccaccaacctgacaaagtaggaatcttttgtcagtggcggatccagaaacagatcaaatgaggggctaaattatggattggggaggctggagatggctgcaatgcgaatgaatggaaccaccatgtaaataatgtgcgaattacaaacgcgtgtgggttgctgtgtgccgtgcacatgggtgatgaactgatggacctgcattgtgctgttatgcgcctgcatcttgtaatcgtgggccttcttcgtattactatgctgtttctgggtctagtgaataaatggatagagcctggctctaattctggtaaaataaaaaaaaagcaacgagcttaacttcttaattggttaattggaaggattccccgatctaattagacgttaaaaatagattagtgcctaatgtggggaaaggttaggttttcctatgaatggaccctttactttttttttttagaaatcctaattattcttgattatggattgaaaagagatgttatgaattgaatgtgtaaaagaaacagtatattgataaagagactgtattccaaagtcaaaagagcgattggcctgcaaaaataaaagatttgttcttgtttgttttataattagaacaaacataaactaattagatagaaaaggagtggaaaaagttctatggattagactccctttctttcctgggtttgtattatgcaacaccttgttctgaccatattgcactatgtatcaaaaatcactacatggtactaagtgttacttaggcttctggaccggggctgcagccccgccagccctggtcctggatccacccctgcttatgaacttgcatgctggagtattctgtagttgtttgctatattgagaaatgctttttttctctatttcaagtagaaaaaaaaatggaaaaattcgaagggtattcagaaaaacagaaatctcgtcaacactacttcgtctacccacttctctttcaggaatatatttatgcatttgctcatgattatggattaaatggttccgaacccgtggaaatttttggttgtaataacaagaaatttagttcactacttgtgaaacgtttaattattcgaatgtatcagcagaatttttttaattaattcggttaattatcctaaccaagatcgattgttggatcaccgtaattatttttattctgagttttattctcagattctatctgaggggtttgcgatcgttgtagaaatcccactctcgctagggcaactatcttgtccaaaaaaaaaaaaaaaaaaaaaaaaanaaagtnctctgcgttgttaccactgcttaagggcgaaaa

SEQ ID NO: 2994 - DNA, 1036 bp, Zea mays
  Clone ID: TF_ZmC22694_1
ttgggtaccccctcgaggggccgccccgcgtccggaaaaaaaaggccgtgcagagtgcaggtgaagatgatgaagaactaccctggtcctgctagcagcagtagtgttgctgtagaggtgaagaaggggtcatggagccccgaggaggacgccctgctgaccaggctggtggagcagcacgggccccaccgctggagcctcatcagcgccccaatccctggccgctccggcaagtcctgccgactccgctggtgcaaccagctcagccccgacgtgcaccaccgccctttcacgccgcacgaggacgcgctcatcctcgccgctcacgcccgctacggcaacaagtgggccaccatcgcgcgcctccttcccggccgcaccgacaactccatcaagaaccactggaactccaacctccggaggtgcaggcgccgagcggcggcggcggcggtggcctcccgaccgcaggtgcaggacagcgacgacgctcctgctgctgctgctgctcatgatgatcagccggcggctgtggttgctgctggtggtttaggtggtggcaacagcagcagcggtctgccgcctgcagcagcaggggccgcaactgccgaggccgagccgtctctgtccctcagccttggcctcccgctgccagcagcagaaccagctgaagccgcggctgacgacgagagccgcaacagccagggccaggcatcgccgttactggaggaaggagaaggaaacgcgcagctgttggcagtggtgcgccggatggtcagggaggaggtgcaacgccagacgggacagctcgcctactcgctcatggccgcagcagcagccagagccaagggacaccaccgttaatctgtgtgtgatccattgtgcatgctgctgctgctgctgcttcttggatttcccctcctttctccgatatgatcctctctgccaagtgtattttgttttccttcgtttcttgtactaccttcccttgtgttcgtttatgcgattgcgattggacttaaaacaaaaaaaaaaaaaa

SEQ ID NO: 2995 - DNA, 1286 bp, Zea mays
  Clone ID: TF_LIB4732-032-F12_FLI
ccggggacccacacggccacacccaccccaccattcggttgaattgaattggtgctgtatgtactgtgctgtgttagttgcatcggttttgccggccggcaggccagcatggggaggtctccttgctgcgacgagaatggcctgaagaaggggccctggactcaggaggaagatgagaagctgctgcactacatccagaagaacgggcatggcagttggcggaccctgccgaggctggccgggctgaacaggtgcggcaagagctgccggctgcggtggaccaactacctgcggccggacatcaagcggggcaagttctcgcgggaggaggagcagaccatcctccacctgcactccgtcctcggcaacaagtggtccgccatcgccacgcacctcccaggccgcaccgacaacgagatcaagaacttctggaacacgcacctcaggaagcgcctcatccagatgggcttcgaccccatgacgcaccgcccccgcaccgacttcttcgccgcgctgccgcagctcatcgcgctcgcagccctacgcgggcagctgcccgccgaccccgacccgccgcagcaggccgggacgacggcggcggcggcggcggctctcgccggtctcatcggcgccctctgctcgccgccgcaactgacgctcctcgacaccaccaccgctactaccgctgctgctgccccgccggtggtgtcgtcgtcgtccgcggacgacgatgccgcccaccagtactacttaccgcgcaccacgttccccgacgcgcccggcagcggtgaagctgcccaccagcggcaacagcaagcagcaggcctcatcagctatggccgacgacccgacgacgccggcggtgatgttgacgtgttcgcgtgctacggtggtggcggtggaagctcgctgccgcccctgaccgacctctccgacgacgcagccaccctgctgcagctgcaggtggacacggcgtcgtccgaattcggcagtggcggctccagcccgctcctcccttggccggagttcttccccgacgatcccttcatcactgatttcctatgacatcgtcacactgtatatttgctcgtcgactcgtcgtgcaatcgtacatgcggatccatatatgtacgtcgtatctccctctgaactttgtaagctttgcgtactgtactctacacacacaaacacatacgtgcattcctttcagaacagttggaaagtgtgcagagcagggtcgagtgaggcttttccctccctttctgtttctgcttttgttggcgacc

SEQ ID NO: 2996 - DNA, 619 bp, Zea mays
  Clone ID: TF_ZmC344_2
tcgcggagctacctcagctgccgtgtcctgcacagccgccgcttccgcaccggttccgacggagcaaaggcgaaagcgagtagcaacaagcaaaagcccagatcgataatacgatggggcggtcgccgtgctgcgagaaggcgcacaccaacaggggcgcgtggaccaaggaggaggacgagcggctggtggcctacgtccgcgcgcacggcgaagggtgctggcgctcgctgcccagggcggcgggcctgctgcgctgcggcaagagctgccgcctgcgctggatcaactacctccgcccggacctcaagcgcggcaacttcaccgccgacgaggacgacctcatcgtcaagctgcacagcctcctcgggaacaagtggtcgctcatcgccgcgcggctcccggggcggacggacaacgagatcaagaactactggaacacgcacatccggcgcaagctgctgggcagcggcatcgaccccgtcacgcaccgccgcgtcgcggggggcgccgcgaccaccatctcgttccagcccagccccaacaccgccgtcgccgccgccgcagaaacagcagcgcaggcgccgatcaaggccgaggagacggcggccgtcaaggc

SEQ ID NO: 2997 - DNA, 1285 bp, Zea mays
  Clone ID: TF_UC-ZMFLB73162H04_FLI
acccgggagcagacagtgacaggcgaaccaagacacgcagggacagggagacatggggcgagggcgagcgccgtgctgcgccaaggtggggctcaacaggggctcctggacgccgcaggaggacatgcgcctcatcgcctacatccagaagcacggccacaccaactggcgcgcgctgcccaagcaagcaggtttgctgcgctgtgggaagagctgcaggctgcgctggatcaactacctgcggccggacctcaagcgcggcaacttcaccgacgaggaggaggaggccatcataaggctgcacgggttgctcgggaataaatggtctaagatcgctgcctgcctgccggggaggacggacaacgagatcaagaacgtgtggaacacgcacctgaagaagaaggtggcgcagcgggagaagaagaaggccggcgcggggagcggcgacgccggcacgcccgccactgcgcccttgtcctcggcgacctcctcgacgacgacccacaacagctccgggggcagcgactccggcgaccagtgcggcacgagcagggagcctgacgcgaccgacgtgtgccccctccagctagaggacatggacgtctcggacatgctggtggacggcgcgcccccggcggcgcagccaatgccgtcgccgtcctcctcgtcctccctgacgacgtgcgtcggcggcgtggaggagctgatcgagctgccggtgatcgacatcgagccggaaatctggagcatcatcgacggcgagagcgctgtggcgcgccatggtggcgatgcagccgcgccatgtacgggcaccggcaccgccgtcagcaccagcgaagcagaggaagcggcggcgaacgattggtggctggagaatttggagaaggagctgggcctgtggggctacgcggaggaggatactcaggcccaccctgacctactggaccactacacaggtttgagcccactctgcgccctggagggggacccagtctccacctacttccagaccgggcccgccgccgcggaacctgagctcctggtggtcgtcgaaccatctgccgttctgctatgactatgagcaacatgacggacggtcacagcaacgaacatcctggttcttggagatgttcggtggatcaaattcgagtagtttgtttgatgcagtggcagattaatatctctacaggccaattagaatgcacattcagaacagaaccgtccaaagaaagcctgtagagtgaaggctagtactctcttattcttaacagtgtttaacgcagat

SEQ ID NO: 2998 - DNA, 1441 bp, Zea mays
  Clone ID: TF_ZmC372_1
ccacgcgtccggtctcctctccccatcttctctcctggaagccgcctcggtcggacccggacaagatggccgccttcttcggtgctgcaccgccgccggctctcgcttcgttccgccacgaggaggaggaggagcagcatcaggacgccgccgaggaggtgtaccacgtggacgatgtcgacgagggcagcggtgacggccgtggccacggcggcgccggccaggggaagctgtgcgccaggggccactggcgccccgccgaggacgccaagctcaaggagctcgtcgcgcagttcgggccccagaactggaacctcatcgccgagaggctggacggcagatcagggaagagctgccgcctgcggtggttcaaccagctggacccgcggatcaaccggcgcgccttctcggaggaggaggaggagcggctcctggcggcgcaccgcgcgtacggcaacaagtgggctctcatcgcgcgcctcttcccgggccgcaccgacaacgccgtcaagaaccactggcacgtcctcatggcgcgcaggcagcgggagcactcgggcgcgctccgccgccgcaagccctcctcgacctcgccctcgccggcgccggcgccggcgccgcacctggcgcccgtcgtcgtcctccaccaccaccaccactacgccggcggctcccctcccatgccgccgttgcacgccgccgacgcccacacgcagtacacggcagcggcggcggcagcggacacccgcgcgcacagcggcggcgagtccgacgagaccgcctccacgtgcaccaccgacctctccctcgcttccgccgccccctgcttctaccagagtggctacgacgtggccccgcgcgccgcggcgttcgcaccgagcgcgcgctccgccttctccgcgccgccggcgacggcgcgctccgacgacaaggtctcgctgcccttcttcgacttcctcggcgtcggcgcggcgtgatgggggggccggcccgggccggccaggcggcggtgtacaggagggcggaggcggtcaaaggacgagagccccggcggcggtgaacccgtgcccgcgcgtagtttagctttagagcccgagttaaatcatcgagaacagaacatggcctgagcctgagagaggaggagaatggcgatccaccattgaactggtgcccgtggcattgcagactaacagctccgcatccgttcggctgctgatgttgctagtagtaatggtacggtgattactctctgctttgggttgggagagacgaatctgcaagcaccaccagaccaagcaagggcgacgatgggtatgggtggatgtttgcagaagaagaaaaaaccgcttgtaacacaaactgcaggacaaaggcagatcagagatcctctgctaactctctttttacaaaaaaaaaaaccaagggcggccgctctagagga

SEQ ID NO: 2999 - DNA, 367 bp, Zea mays
  Clone ID: TF_LIB3245-422-P1-N1-B11
ggcaagagctgcaggctgcggtgggtcaactacctgagaccagatctgaaacggtgtaagatcacaccccaagaggagagcgtcatagtccagctccatgctttgtgggggaacagtactgtactgtacgtcgtacgacgtgcataagcaggtggtcgacgatcgctcgcagcctccccggcaggacggacaacgagatcaagaactactggcggacgcacttcaagaagggcaagccgtccaagaacgttgagcgcgcgagagcccggttcctcaagcagcgccgggaaatgatgatgcagcagcagtctcttggcggcagcacctgcacctcgacgagggcggtgaccagcgccgcggcgcgtgc

SEQ ID NO: 3000 - DNA, 428 bp, Zea mays
  Clone ID: TF_jC-zmX700203880a1
cgacgaagctagaatttggtcgaggcggcgcactttatcaatggggtgccggtcctgtgacagggcgaatttaactaccgtaaggcgctatggtctcctgaggaggacacagaagctcaagcactacatcctgacggatggacttggatgctgaagtgctggcccggtaaaggctgctgttcagagaaacggcaagagctgacggctgggctgaatcaactacctgcgccctggactgaatcgtggaatgatgtcccaggaggaggagagacgtcttaatctatctccaagccaagttggggaacaagtgggctcaaattgcgatacatctgccggggaggaccgacaacgaggcgaagaactactggaactcgtacctgactaagagggtgacgccagaggcccagagcgccgtcgtccaatttcag

SEQ ID NO: 3001 - DNA, 1028 bp, Zea mays
  Clone ID: TF_ZmC42_31
ataaactccagccacttcggcatgcgccgggaatttgattcttctgcctaaaatagtcacgctaccttccacctccccctactactctgactctccctcgtcttcttcgctaccaagatgatggcggaggcgtggacgccggtgctgttgccggcgacggcgccctgcttctggcagcaggacacgcactcggttttgtggcggagaggagacgcgtggacggcggaggagaacaagctgttcgagaaggcactggcgcagatcgaccggaacgcgcccgacaggtgggagaaggtggcggcggtgctgccctggaagacggtcgacgacgtgaggagccagtaccacgccctcgagaaggacgtgggcgtcatcgaggccggcgggctcgtgccgttcccgcgctacagcggctcggtcccgccgccgtccgggttcgccctcgaggactggggcggcggcgaccgcgggttcaggcgcgcgcgcggctcggaggagatgcaggagcggaagaagggtgtcccctggacggaggaggagcacaagcttttcttgatggggctgaggaagtacgggagaggggactggaggaacatctcgcgcaagtacgtgacgacccggacgccgacgcaggtggccagccacgcgcagaagtacttcatccggctcagctccggcggcaaggacaagcggcggtccagcatccacgacatcaccaccgtcaacctcccaggcgacgccccgcgctcgtcgccgcccgcggccaccaccaacccctccgccggcgccctggtggtggacgtgaagcccttcgtgtgacgaggataaaaagtggcacagcctcgtcgtccagctgccagctcgcggcagctccgagcgactgcgttcatcgagaacaagacgccatgggcggcaatgcggcatccgtttcagttcagtgtacataattcggcaagtacagagcccaacaacttccacgtaaaaggtactgaataataaagcattcgaggaaaaaaaaaaaaaaaaaa

SEQ ID NO: 3002 - DNA, 2722 bp, Zea mays
  Clone ID: TF_ZmC54113_1
acgtggcttcccgaccaaccgccgtggtcccctcactcgcggacactctccgggcgcccaccacctccgcctcttccgccgccgtgtgtgccggcgacgatgccgcgcaaggcctcctccaactcagatgcgcgggccaagtcgcggaagcggaagcgcgccgccgccagcgcctccccgtccaagcagccggacgaccactcagacgactccgacaccgccgcggcggcgaacggcgacgatgagacgtcccgcgcagcatccgttaacgggggcggaggaaccctagccggcgtcggcggcgatgacgaccccgtgctcgaccttcgtgcggcggaggtgctctcctcctccgccgagcccgtttccgccttccccgccgccgtccgccgtgccgtgagccggcctcacccctcggtgctggctgtaatcgccgccgagcgtgcggcggccagttctgacgatgctccggtcaccccagcctcggtacccgttctcgagaatatttcgcacgggcaactccaggtgatctcggcgatgctgcccgaccatccgtccctgtcctacgaccctgacaagccgtccacgtatgtctgcaccccacctccactgatggagggatgcggagtgcacaaacagttctatgacaaacttcacatcgtgcccaggcactcagattggtttgtgccacagacagtgcacaggttggagaggcaggttgtgccacagtacttctctggaaaatctcaggggcaaacaccagagaagtacatcatgttgaggaacaaggtgattgcgaaatatttggagcgacctgggaaaaggcttgtgtttgctgagtgccaggggcttgtcacaagcacacctgaattgtatgatcttagtaggatagttaggttcttggaatcttgggggatcattaattaccttgcaacagggtcagtgtaccgtggcccgaggacggcatcatctctgatcaaggaagagacaacaggggagcttcagctggtctctgcaccaatgaaatcaattgatggtttgattttgtttgatcggcccaaatgcagtatccaggcaaatgatatatcttcgttggtgtcaacttcatctgctccatttgtggttaatcatgacggtgattcagcaaatttggatgagaagatttgggagcgcttatcagagagttcttgtagtttctgctcacaaccttcccacgcgtccgactatgagtcacaaaaggagacagacattgctctttgttcagactgcttccacaatgcaaaatttgttactgggcattcaaacttagattttcagagagtggatgcgatgaaagatggatcagacactgatggggacagatggacagatcaggaaactttgctgttgttggagggcatagaaaagttcaatgataactggaatcatatcgcaggtcatgttgggacaaaatcaaaagcacaatgtattcaccatttcattcgtctcccggtggcagatggtttgttagagaacattgaagtgccagaagcatcccttccatctggaatgcaaagcagtggatttttgcattcagattccaatggcagtacttcaggtagccaacctggaaaccagattccattcattaattctgctaatccagtcatgtcactggttgcatttttagctgctgaagtaggaccaagagttgcagcatcctgtgcaagtgcagcattatcggttttgacaagggaagattccaggatgaatgcagaaggcattgatgctatgggccatggtactcatctcaactatggaccctcatcatccatttcttctgaaactgtgaaaaatgctgcaagctgtggcttgtcagcagcagcaacaaagtccaagctttttgcagaccaggaggagcgtgaaattcagagattatctgccaccatcataaatcatcagttaaagagactggagttgaaactgaagcagtttgcggaggttgagacaatgctcttgaaggaaagtgagcggttagatctgatgaggcagcagctggtaactcagcgtatccggatgttatcaacccggttcacttccacaggtggtacaatacctggaggcagcagcggtatggtttcaaacctgatgaatcaggccagcggccttagaccgccgctgatgatgccaggctcggtgacccagtccagcatgccggcaatgtatgcaaataacatgcaggggcatccccagatggctctgctgcaacagcggcaacagatgctctcgttcggacctcgtttgcctctctcggccatcaaccccggctcatcctcgtcggcacccaacatgatgttcaaccatggcatgcccaactcggcagctcctaatcatcaccctttgctgagatcaccctcaggggacaattcaaatgtaggttagtgagatgagtttttcattttttgggtcttagattcctgagctgtagcccttgactcgtgatcattaaccattgtaattcgattgcacaatcacatatagaggttgttaccagcgataggttctcattttctcttaggctgtggaccgtgtgtgcgtgactgtttgctcggatgagattgatgttgctagtggcttaggcgatgcacagaggatgtagagtttctttcaccctgactaattgttattactgcgccaccttagaatgatgtaaaaaatgaatccgcatgaattcccccttctt

SEQ ID NO: 3003 - DNA, 1410 bp, Zea mays
  Clone ID: TF_ZmC21015_1
ggaaactgctggagagggtgagagcaaggggagcagcggtcgggcagccatggggcaccactgctgcagcaagcagaaggtgaagcgtgggctgtggtcgccggaggaggacgagaagcttgtcaagtacatcaccgcccacggccacagctgctggagcgccgttcccaagcatgccgggctgcagcgctgcggcaagagctgccgcctccggtggatcaactacctccggccggacctgaagcgcggaaccttctccgaccacgaggagcgcaccatcatcgacgtccaccgcatcctcgggaaccgatgggcgcagatcgccaagcacctgcccgggcgcacggataacgaggtcaagaacttctggaactcgtgcatcaagaagaagctcatcgcgcagggcctcgaccccaagacccacaacctcctgccggcctccaggactctcctccacggcaacggggcaaaccctagcagcaacaatcctgcccacttcaactcaaacggctgcgctgctgtcgtctccgtcgccacgacgcccttcaccatcagctccccgaccaaggccgccgcctacggcaccgtcacggccacgccgccgccggagacgatggcgccggcaacgtacgacgtccctaataattaccctgacggcatgctcatgaggcatgatcaggcagccacggcggctgcgattccgggatacccgtaccaccccggaaacggcggcggcgtgctgatgagcttcagggaccagaatgctggtctccagacatctgtggacttcgtgaacggctcctcgtcctcctcctccatggatcacgccgccggcatgcctaacggcaacggctttagccaacaaggcatgggcgcggccttcatggacgtgacggcgggaatgtggagcaccgcagccgtggattctggcatgtgtgcagggatggaagtggctcagccaccgccgccgccgccgcagcagccgctgccaccacaagggctggtgcagggggaggtgctcgtcggccgacaaactgtgatgaacggtggcggtgcagttgctgacaagggcatggacatgatggacgtctcttcagtgtatggcggcgccggtgcaatggcgttcgatctggagctgatggagtcatgcgcgttgttttgcggcagcaccggcaacaccatggagcagctgcaatgggactgctaagctcactatcgtccttacccctaattagtttgttgtcttccatgcttcatccatgtctttatttttcctcttaattttgatgttcgatttactgggttcttgattcagatcgtccttttaaagcaagaaatccatgctgagcttagtgacgaactcgatctaattcagatttcaataaagttatctcaaattttattgattgc

SEQ ID NO: 3004 - DNA, 1293 bp, Zea mays
  Clone ID: TF_ZmC42_29
gcccttctccgccactgccactgaagctatactgtcgcagagagagcgccccaccacccgcggaccagacatctgcgatgaccactctggcgacggacacggcggcgtggacacgggaggaggacaaggcgttcgagaacgcggtggcagcctccgcggcgccgccggccgacgggccgcctgatgatggctggttcacggcgctggtggcgagcgtgccggcgcgaacggcggaggaggtgcggcggcactacgaggcgctggtggaggacgtggccgctatcgaggccggccgcatcccgctcccgcgctacgctggggaggagtcgtccgcggcgacgcccgagggctccggtgccgccggcccctccacgcccaaggacggaggaggagggagcgggcaccgacgcgaagaacggaagggcggcgtcggcgctgacgcggggaagagttgctctaaggccgagcaggagcggcgcaagggcgtgccgtggacggaagaggagcacaggttgttcttgttgggtctggacaagttcggcaagggcgactggcggagcatctcgcgcaacttcgtcatctcgcggacgccgacgcaggtggcgagccacgcgcagaaatacttcatccgcctcaactcgatgaaccgggacaggcgccgctccagcatccacgacatcaccagcgtgaccgccggcgaggtggccacggccggcgcgcccatcacgggcggcggcccgaccgcggcgggggcgatgccgatggggccgggcggcatgaagcaccaccacccggttccgccgatgggcatgtacgggcacgcgcccatgggccacccggtcgccgggcacatggtggcgccggcggccgtcggcacgccggtcatgttcccgccgggccatcactcgccctatgtcctgccggtgggatacccggcgccaccgaccaagatgcaccagtgatcgtctacgaccggcatttgcgcagctgcgcagctgcatccctttgctcgttctttcttgatttcgttgatgatcttgtgtagccaaagctatctatccatcctttcctcatctcccgggtctttgttttttgacgtaacatatagatgacttgagcgagtgcagggcaggcaggcgaataatgagtatcgctacttacaggcttaaggaatgtgtaattagtagcagccttcctgggtgcaaatattcatcatttgtgcaactggggactgacagaatcccatttcccggatgtaaatcgattgtctataatatctcatctgtgcgaaat

SEQ ID NO: 3005 - DNA, 1161 bp, Zea mays
  Clone ID: TF_ZmC603825_1
ccggccggggaccctcgagcaccccccggcccgtcgtctacagtctacagcacacatcgcagcagctcgcgaccatcgtccatccgctcaattgtgatcgatcgagctgcgagcccatcgcctctagctaagctaccatgggtcggcagccgtgctgcgacaaggtggggctgaagaaggggccgtggacggcggaggaggaccagaagctcgtcagcttcatcctcggcaacaggcagtgctgctggcgcgccgtgcccaagcttgccgggctgctgcggtgcgggaagagctgccggctgcgctggaccaactacctgcggccggacctcaagaggggcctgctctccgacgccgaggagaagctcgtcatcgacctgcatgctcagctcggcaacaggtggtcaaagattgcgtcgcacatgccaggacgaacggacaacgagattaagaaccactggaacacccacatcaagaagaagctcaggaagatgggggatcgaccccctcacccacaagcccctcccgccgcctgatccgcatccgccgaaggaccaccagagcccaccgcacaccgccacaggtggctcgccggaagcgccgccatctccgtcgccgaagcctccacaggagaagacggcagtaccggtgatgacgccagctagccagcaagaagcaggtgacgatgacgtgccgctcctcagcaactactacccaggcttctgcaccgacgaggtacccatgatggacccggacgagatcatggtgcctctggacgacgggcggacggcgccgccgacgtcgacgattttctcgaccacgaccacgacgtcctactctgcagcctccgactccgtgtcgtcgtccttgagccgcgacgaggacccgctgttcccgctcatggacttggagttccccgacatcgcgttccagatggggctactagacgacatggtcgcgtcgtgggacgactccttggcgcagcagccgctgtcgccatcccctgtctacgacgacgactatgcaaaccagctgcagatcaggagcggcgttgcgtttgaccaggagccagggaacaagattgtgctcttctctagctattaggcagttaacccctttaataaatgagatatgcacctcctgcaaaaaaaaaaaaaaaaa

SEQ ID NO: 3006 - DNA, 1396 bp, Zea mays
  Clone ID: TF_ZmC10631_1
cgcgcactctcacctgccttccttctgccagctgctgactcatctatcagctcgctcgcacgctgcagaacgaacgaagctgaaggcggcggcggcggctagccatggggagggcgccgtgctgcgacaaggcgagcgtgaagaaagggccgtggtcgcccgaggaggatgccaagctcaaggcctacatcgaggagcatggcaccggcggcaactggatcgcgctgccgcagaagattggggctgaagagatgtggcaaaagctgcaggctgagatggctcaattatctgcgccgaaacattaagcacggtgacttcacagaagaagaggagcatatcatttgcagcctctacattagcattggaagcaggtggtccatcattgcagcgcagttgccggggcgaacggacaacgacatcaagaactactggaacaccaagctgaagaagaagctcctcggcaagcgcgcgccatcccggcgcgcgagggcaaaccaggatccctacctcgctgcgggaggcggcaacagcagcaccagcggtggcaacagcgccgcgacggccacgcaaaccctaagcgcgtcggctctagagcggatccagctccacatgcgcctccaaggcatgtacggcgcgttcggttgcagtggcggcggcggcaacgacgaccgcaacgccgtcgtcggggcggcggcgccgcagtggccaaagcttgaggcgctgctgcaggcgaacaggctgctcccgggatcgctgccgacggacgccatggccacaacagtgagcgtgcaacagcggcaccatcagcatctggtcgaccaccagagcctcgcagtcggcgctggtaacgccgcagcagtcgagggcgagcaacagcagctcagctctgccgatgcggcaaactacatggcgctgccaggagggggctttttcgagcggcccaagctagggttttactctccatccgccgaggctgaagctaccgcggccgccgccagcgtagagatgaactcagtcgccccgatggttggtggcggctacggcggcgccggatttgaacagtatcatcatcacgacgtgctatacgaattcctgtacagcaattacggatcggtgggcgagctggcgcaggacgggcatgtccccacgttgccggagctgcagtgcccgaacggcgctgccgtcgatggagccgatgagaagttctcggtgtggaccgcatccgccgcctgcgattacggcgcggccggcggctatcagattcagctgggaaactccatcggtagcaatctgcacgattacgtgctaggcggctatgatcaatgggagtagggtttcggcgtcatgccgtatttgtgtgtgcaaaattcttaagctcatatatagttcattttcc

SEQ ID NO: 3007 - DNA, 978 bp, Zea mays
  unsure (1)..(978): unsure at all n locations
  Clone ID: TF_ZmC11324_5
gtgcggccacgcgtccgtgcggcaagagctgccgtctccggtgggctaaccacctccgccccaacctccgcaagtncgccttctcccccgaggaggagcgtcagatccttctcctccacggcctcatcggcaacaagtgggcgcgcatctccaagcacctctcagggaggacggacaacgagatcaagaactactggaacacgcgcttcaagcgccggcagcgcgcgggcctgccgccctacccgccggacgtcgagcggcagatcaagctgctgcgcgcgcagaacgtcaacccgttcgcagacgcagacgccgacgccgcccacgccaacgccaacgccaacgccaacgccagcgccggccttccggcgccgccgctcctctacgacgtcggaaacccgttcgcgttgctctccagcataccgtcactgtcgcagacggcctcgcactcgcactcgccactgatcaaccagaactacccgcttctgaaccagatgcaggtgttccaccacctcggcggcagtcagcagccgtcgttccaccaggacggcagcgcggcggctttcggcgacatcgtctcctctcgcctgccgccactgccaaccgccagaacgcaggcggagctacattcgaaccaattcgacacctccagcagcggcgggctgctggatcagtcgatgctgatcggcgacgaacacctgctgcggcccaacccgagtatggtcaaggtctcctccatgcccgcgctctcctaccgtgagccggatgggtccaggatgctgccagcccatggcgccgggagcgacggcgacgtctcctcgctggggcactgccctccgggacaggacctccaccgtggtgcgacatgggacttcaccttcgaataggacgaacacgaacgtgcgtacacgcggcacaaacacgatcatcatcgtctcaccatgtggttgcatgcataaaaaaaccaatgcgttttca

SEQ ID NO: 3008 - DNA, 1307 bp, Zea mays
  Clone ID: TF_ZmC13187_1
tattgtgagcccctcgagggccgggaactaagcgtccggacaaagtggcgtactcttctctgtactagctttcttcttcctcctcctcttcctcctcccaaacagactggatttcatcaagataatcctgaaactggagccaacaagcagacagagaaagaagagcaagaagaccggctcccagccgatacaaggtaggagtgagcagcgttagatcagttttcatcacaggatcgatatggtgacagtgagagaggagactcgcaaggggccatggacagagcaggaggacctgcaactggtatgcactgtccgtctgttcggtgaacgtcgttgggatttcattgccaaagtatcagggctcaaccggacaggcaagagctgccggctgcgctgggtcaactacctccaccctggcctcaagcgtgggcgcatgtctccccatgaagagcgactcatcctagagctgcacgctcggtggggaaacaggtggtccaggatagcacgccgcttgccagggcgcactgacaatgagatcaagaactactggaggacacacatgagaaagaaggcacaggagaggaagaggaacatgtctccatcgtcgtcctcgtcttcgctgacttaccagtcaggctacccagatactccatcaaccattggagttgagggacaggagcttcatggtggcagtggctgcatcacaagcatcctgaagggcacccctccggacatggatggctatcccatggaccagatatggatggaaattgaggcgccacagatgccctcggaggagagctttgttggggggaaccataatgtgtgcagcagccttgccaccccgctgccaccaccaactgtctgggaatactacccagatgcctgctggaaggttgacgatgagatcaagatggcaccacaatttcaatttggttatagtgaaggagttgggccctgcttctgatgccataaatattgggtcagattactaagttatacacctacctagcagaagtgaagtgcttttgtagaaacaagctttagcatggatctgaatatttatctccgcgcttagaattgcaggtctatggatctatgcatggttgctatgtatctatctagtgtgcaagacaagatcatcttaatttgtccttgatgctatggaatacaagggcaaaggtactatgtctgtttactcagaataattagctaccctttgggactctctgttgggcatgaagccaacaataaatgttatattgatataaaaaaaaaaaaaaaaaaaaaaaaaaaaaaaagcggcc

SEQ ID NO: 3009 - DNA, 2238 bp, Zea mays
  Clone ID: TF_ZmC2063_1
ccgccctagagccataataattcgttgaagaggagggggttcttagaaccagagggcggctacctgtgaaggatacccgtgctgctggctgctgctgcttgtcccctcgaggcggccgggaaaacccactctcgattggttatctcgaggccggccgggaccgttctcttctccctaatcctggtaatcagtagtagccactagcgctgctgccgttctcttcccctacccgacacaagctccaccacctctatctaccacacgccaccactgtaggagctcctccacgatcatcccgccctagagccataataattcgttgaagaggagggggttcttagaaccagagggcggctacctgtgaaggatacccgtgctgctggctgctgctgttcctcaagctagagccgtgtgtgggctgtgcagattgcagagcgcagcttccagtctcagcattgctttcaatggggaggcactcctgctgttacaagcagaagctgaggaaggggctctggtctcctgaggaagatgagaagctcatgaaccacataaccaagcacgggcatggctgctggagcactgtccccaagcttgcagggcttcagaggtgtggcaagagctgcaggctgaggtggataaattacctgaggcctgaccttaaaagaggcgcattctctgaggaggaggaagacctcatcgtcgaacttcatgctgtactggggaacaggtggtctcagattgcaacaaggttgcctggaagaactgacaacgagatcaagaatctctggaactcgagcatcaagaagaagctccggcagaaaggcattgaccccaacacccacaagccgctccttgtcgaggttgaacgcagcaaagcagctccaacgaccagtaccgagagaacctctgagtccaatgatgttgacccttcaagtggcgccgcacttggcaactcgagccatcttcttctcagcgagacagcacaatcaccacagctgccagcgctcggtaagcatcgcagagaaactactagcctggcacatctaagggtgccgcccaaggagttgttccttgaccagctggcttctggtcatgagaacctcactggctgccgcacagcaggcccagttccaaatttccctttccaacagctgatgtgctacaacaatgaatttggcaacaagaatggtgctagtaacaattcactctggtttaaccacaatgagacaagtggcagcaccatttccactgtgatgccaccagtttcgccatcaactctctcaacatcaacagggctcaataggtcaccagacaacccacactcgggaggcactgccattcagagcacccagttctactgggacactgctaatcctagcagctgcagcagtagaggaagcagcggaagcaacggcttgggatttgagctgcaaagcacaagctcgcttctggagagtagtgttttcccatggacagaattaacaccagataaaaatagccaagttcaccttggggaagaactcaagtggcccgacttgctccacggaacattcacagacacacctgcaaccatgcagaatcttagccagtcactgtacgaagatgttatcaaagccgagagccaattcaacatagagggcctctgtgcagcctggtctcaaaatctgcagccacagcaacatctgcaggtatcagatttgtatgacaaggatttgcaaaggatgtccttgtcttttgagaatatctagacagcatgtttcagcatgcagggaacagagaaatagcagaaagctgagtcaatgaagccttaaaaaatacaatatttcttcacagattcatttgaaggctatgtggaggtgtgttttacgtaggtacattcttatgatgaaacagagatcaatactgataactgttcaccagtgtaaatgaaaaaagggaaaaaatgaatctatattacagcataatgtatagactagagaaagtacatcctaggagtttacctcctttcatttaaaagttgctgtctttatctgtacatgcatgtagctcggctttttttgtataagtgagtcatggttgatctttctctacaaaataaatgaggcaagaatgtgaaatactgcacttgtcagtaaaaaaaaaaaaaaaaaagaaaaaaaaaaaaaaaaaagcggcccaaaaaaaaaaaaaaaaaaaaaaaaaaaaaaaaaaaaaaaaaaaaactcgagggggggcccg

SEQ ID NO: 3010 - DNA, 701 bp, Zea mays
  Clone ID: TF_ZmC521637_1
ggtacccctccgccctcggggccgggccgggaccccaacaaccattattcagatttcataataccatatatcgtagtacccaacccccatggatcctaattatggagagtggaatttctctgagatcaagatagcgaaagctctcattgctagccacaatgccaagagtagctattctagtgacatgaacaataagcaaactgacattatagacatgctccaagcaaggtttcccacaaaagagaagcataaggtaaccaaactgtatgttgatctcatgttggagaagatgcagatgatattgagtggcaaccaacatgcaacaatgggtaagaagcttgtgaatgacaagtttgggatgtcgatagaggatccagccatagatttcatgggtggtgatttagtggagaaaaggacggccaaaaggaaggcaagggaggatatgaatacccacctagattctcagaaggagaggcggtaccgaaggttttggaccatagacgaacacaggaatttcctctatggtttgcgtgcatatggtcgaagcgactggaagaacatctcaaagcactttgttaccactaggacgccaatgcaaatctctagccatgcccaaaagtatttgcataggatggttttttttgctaggaggcagcggagcagcataaatgacattggtccttcacgatgatgaacccagg

SEQ ID NO: 3011 - DNA, 1718 bp, Zea mays
  unsure (1)..(1718): unsure at all n locations
  Clone ID: TF_ZmC337_3
aattcggcacgaggaactacggccacaactccaggacctgcggactaggactaggactaggacacagagaaataatgctctgcgaaggtggcgacgacaataatggccgcagcggcctaaggctcttcggagtgcaggtccgtatcggcggcggcggtggcgcagggtcggcgtccatgaagaagagctacagcatggactgcctgcagctcgcggctcctcatgcttgttcgtccctcgtctcgtccccgtcgtcgtcgtcgttgtgctcgtcctcgtccccgtcgtcgctgctgctgtcgattgatgatgggttgcagagaggggcggccgatggatacctgtctgatggacctcatggcagagctgtgcaggagaggaagaaaggtacgtcaagaaatttttttcccttcctgatgaaaagacaaaagaggaagatttgttctttggaaattcagaaacttcaccttacacgaatttcttttcttattggtaatacgtactgtccatcagtcgtctgacctaaaaaaaaagttgcattatgctctacttttttttggcctaaaaaaagagagtaatatagctntatcttccactgatgctgcaacccttcaactgcaagtaacaatgaagcagctgagactgagagatactagtgcttccctgcacattattgagtccttgttgggttggtcggtagcagctgatgtttctaaacaaaaacaatactctggatatataccgacgacgccaggagttccatggagcgaggaggagcacaggcagttccttgccggcctggacaagctgggcaagggcgactggcgaggcatcgccaggagctacgtgccgacgaggaccccgacgcaggtcgccagccacgcgcagaagttcttcctccggcagagcagcatggggaagaagaagcgccggtccagcctcttcgacatggtatgcgcatgcaggcaccaacatctctctcttttttttctgtacgtaattgcttgagttttgataaccgggtccagcggcaggtgccgatctgcgagaacagtgcgagcatctccgatccgctggacgtggcacgccatggcgtcgcctcggcagactccgagagggcggccgtggacgtggacctgatgaattcgacgacggagggtgacgacggcaggagcagggacgtcgtgtcgtcggcgtcaggtgcagggaccgcactgcggttcccggcagcggcagctcagacggagccgctgcatccttcgtcatcgcatggccatgggcgcggccaccactgctctccgttggacctggagctgggcatgtccctgcccgccccatccgtcggaacgtgatggagatgaggcgaggccgaggccgtgcgtgactgctgtctccctcagctgtgtgtgtcagccagatggagatgatgcgctagccaatacagtactgttcgtgatcgtgaaaacggtgtgcaaacactagcacagcggcactaaactaggatgtcgctcctcgcaccatattgtgtactgtaaccacgttgatccacatcatctctatctcttcaccaccgttggatcataggctgtcagtttcatctatccgtccatgtgtcatactcattcacgatgcggtggcttaatgatccagcagtaatttttcttctttcgtgacttaagggtatatacggtggtatttaatgtagaggcttttgatgt

SEQ ID NO: 3012 - DNA, 795 bp, Zea mays
  Clone ID: TF_ZmC337_4
gggtacctcgaggccggccgggactgtggtactacggccacactccaggacctgcggactaggactaggactaggacacagagaaataatgctctgcgaaggtggcgacgacaataatggccgcagcggcctaaggctcttcggagtgcaggtccgtatcggcggcggcggtggcgcagggtcggcgtccatgaagaagagctacagcatggactgcctgcagctcgcggctcctcatgcttgttcgtccctcgtctcgtccccgtcgtcgtcgtcgttgtgctcgtcctcgtccccgtcgtcgctgctgctgtcgattgatgatgggttgcagagaggggcggccgatggatacctgtctgatggacctcatggcagagctgtgcaggagaggaagaaaggagttccatggagcgaggaggagcacaggcagttccttgccggcctggacaagctgggcaagggcgactggcgaggcatcgccaggagctacgtgccgacgaggaccccgacgcaggtcgccagccacgcgcagaagttcttcctccggcagagcagcatggggaagaagaagcgccggtccagcctcttcgacatggtgccgatctgcgagaacagtgcgagcatctccgatccgctggacgtggcacgccatggcgtcgcctcggcagactccgagagggcggccgtggacgtggacctgatgaattcgatgacggagggtgacgacggcaggagcagggacgtcgtgtcgtcggggtcaggtgcagggaccgcactgcggttccccgcagc

SEQ ID NO: 3013 - DNA, 2304 bp, Zea mays
  unsure (1)..(2304): unsure at all n locations
  Clone ID: TF_ZmC1108_1
naccgctggccggctcacagtaccagaggagtccaccggaggagctcagctagactcccaccctggtggctcgatcggcaccggccgctgcctgcgagactccgccagcgcgcgatgtaccgggtgaagagcgagggggagggcgagggcgagggcgactgcgaaatgatgctgcaggaacagatggactcgctggtggccgacgacgtcagcagcggaggagggtcgcctcacaggggcgtcggcacgcccctgaagaaggggccatggacgtccgcggaggacgccatcctggtggactacgttaagaagaacggcgagggcaactggaacgcggtgcagaagaacaccgggctgttccgctgcggcaagagctgccgcctccggtgggcgaaccacctcaggcccaacctcaagaagggggccttcacccccgaggaggagcgcctcatcatccagctccacgccaagatggggaacaagtgggcgaggatggctggtcacttgccagggcgtactgacaatgagatcaagaactactggaacactcgaataaagagatgtcaacgagctagccttcctatttatcctgctagtgtatgcaatcaatctacaaatgaagatcagcaactgtctggtaattttaacggtggcgagaatatatccaatgatcttctatctgggaacagcctttatctgccagattttaccagtgacaatttcattgcgaacccagaggctttatcctatgcaccacagttgtcagctgtttcaataagcaatttgctcggccaaagctttgcatcaaaaagttgtagcttcatggatcaggttgaccaagcggggatgctgaaacaatctggctgtgtgcttcctgcattgagcgatgccattgacagtgtgctttcctcagctgatcatttttcaaatgactctgagaagctcaggcaggctttaggttttgattatctgaatgaagccaatgctagcagcaagagtattgcacctttcggggttgcacttactggcagccatgcctttttaaatggcaatttctctgcttctaggcccacaaatggtcctttgaagatggagctcccttcactccaagatactgaatctgatccaaatagctggctcaagtatactgtggctcctgcaatgcagcctactgaattagtagatccttacctgcagtctccatcagcgaccccttcagtgaaatctgagtgtgcatcgccgaggaacagtggtcttttggaagagctgcttcatgaagctcaggcactaagatctgggaagaaccaacaatcatcggtccgaagttcaagttcttctgctggcacaccttatgagactaccacggtggttagcccagagtttgatatgggtcaggaatattgggaagaacagcccagttctttcctcagtgaatatgctcattttagtggaaattctttcactgaatccactcctcctgttagtgctgcgtcacctgatatcttccagctctccaagatttctcctgcacaaagcccttcaatgggctctggcgagcaggcgttagagcctaaacatgagtcggcagcttcacctcgtcctgaaaacttgaggcctgatgcattattctctgggaacacagccgatccatccattttcaataatgccatagccatgctcctgggcaatggcattgatgccgagtacaaacctgttcttggtgatggaattgtgctcgattcttcgtcatggaacaacatgcaacatgcttttcagatggcgggattcaaatgagttccatgcacttgtttgtgatgctgaagggcttcttgttgcttgttttggggtcagtatcagcgaaggccgcattgattgtgacgctgcattcctgacagagggcgtgcaggtgcagcagctaccatatgtgatcttcatgctaatagtccttttgtctaataaagtgcatgaagataaaccggatatttttttttttgctttgtattagagaaccgtttttgtcaaccctgtcaggattctgttggaaatgtgtcatgatttttgtttgaacaatttaatatctgtcattgatactgtgctgtgtgccaaaaagctggctcaagtatactgtggctcctgcaatgcagcctactgaattagtagatccttacctgcagtctccatcagcgaccccttcagtgaaatctgagtgtgcatcgccgaggaacagtggtcttttggaagagctgcttcatgaagctcaggcactaagatctgggaagaaccaacaatatgaaatctcgtgac

SEQ ID NO: 3014 - DNA, 1176 bp, Zea mays
  Clone ID: TF_ZmC1108_2
tagcgagggggagggcgagggcgagggcgactgcgaaatgatgctgcaggaacagatggactcgctggtggccgacgacgtcagcagcggaggagggtcgcctgaagaaggggccatggacgtccgcggaggacgccatcctggtggactacgttaagaagaacggcgagggcaactggaacgcggtgcagaagaacaccgggctgttccgctgcggcaagagctgccgcctccggtgggcgaaccacctcaggcccaacctcaagaagggggccttcacccccgaggaggagcgcctcatcatccagctccacgccaagatggggaacaagtgggcgaggatggctggtcacttgccagggcgtactgacaatgagatcaagaactactggaacactcgaataaagagatgtcaacgagctagccttcctatttatcctgctagtgtatgcaatcaatctacaaatgaagatcagcaactgtctggtaattttaacggtggcgagaatatatccaatgatcttctatctgggaacagcctttatctgccagattttaccagtgacaatttcattgcgaacccagaggctttatcctatgcaccacagttgtcagctgtttcaataagcaatttgctcggccaaagctttgcatcaaaaagttgtagcttcatggatcaggttgaccaagcggggatgctgaaacaatctggctgtgtgcttcctgcattgagcgatgccattgacagtgtgctttcctcagctgatcatttttcaaatgactctgagaagctcaggcaggctttaggttttgattatctgaatgaagccaatgctagcagcaagagtattgcacctttcggggttgcacttactggcagccatgcctttttaaatggcaatttctctgcttctaggcccacaaatggtcctttgaagatggagctcccttcactccaagatactgaatctgatccaaatagctggctcaagtatactgtggctcctgcaatgcagcctactgaattagtagatccttacctgcagtctccatcagcgaccccttcagtgaaatctgagtgtgcatcgccgaggaacagtggtcttttggaagagctgcttcatgaagctcaggcactaagatctgggaagaaccaacaatatgaaatctcgtgac

SEQ ID NO: 3015 - DNA, 1159 bp, Zea mays
  Clone ID: TF_ZmC27160_1
gaccaccatcaccatggggaggactccgtgctgcgacagcaagggcatcaagaaggggccatgggcgccggaggaggacaagctgctcgtcgactacgtccaggccaacggacccggcaactggcgcattctccccaagctcgcggggctgaaccggtgcggcaagagctgccggctgcggtggaccaactacctgcgcccggacatcaagcgcgggcccttcacccccgaggagcacaattccatccttcagctccacgccgtagtcggcaacaagtggtccatgatcgcggcacagatgccgggccggacggacaacgagatcaagaactactggaacacgcacatgaagaagcctcctgccccgccgcccgccacacggcccagtgggagaccgccaggctcgaggccgaggcgcgcctctccctgctctcgtcctcggccgccacgacggtcacctccgccaccgcctcctcctcgtcgtccaccgtcgccgccgagcatgcggcgccacccgacatcttcctgcgcctctggaactccgaggtcggggattctttccgcggcgcagccgcgcagcaggggcacggtccggaggcgagcgcggcgggcgctggcgtgccggcgctgctgcctgagctcggcggtggcggtgacgattcctcggccgcgtcgacctacgaggctgaggccgcggcggacgacggctaccaggcgttcctggacctggcgatggaggagttcgcgctgctgcacggccggctcggcgcgttctcggcgttcccgcaggccgacgtgttcgctgaggcgcactgctgccttttcgctccgtttgaggagtagctttgctcgatctcattgccagtcatcagacatcagagtagtagactagacgtacgtacgtgaccacgtgcatgtaccctgcatgcgtccgtctgcgtacgcgtacgtacatacatacgtacacatgccgcttgtcttggggacgatggcgtatgtacgtgcctgtacgcaacgagcggatgggtggcgcgtgtgacagttcgttattagtctgtgccctagagcaagaggtttttgcgactgctccaaactagccttggcattgctctggtgaacgatgtcaactttcaagtattctgcctctgcgtgtttgtgt

SEQ ID NO: 3016 - DNA, 1649 bp, Zea mays
  unsure (1)..(1649): unsure at all n locations
  Clone ID: TF_ZmC62316_1
gggtacctcgaggccggccgggagaccccaccccagtgcaaatctgcccctacgtgaaacgttcccctcctctcctcgccctccttgcgcaggttgaggcccgaggtgtagtgcaaggtggcgacctctcggcggcttgggtcggattggtttcggaaagtttggtctccagtgacccgagcactggagatgccctgtttggagcaaattccgatggcgaccggcgagaccgccgtggatcgtcgcgaggaccaccgcgacatggatttgtcaggggaggagcacgtgcggcccaaggcgcggaagccgtacacgatcacgaagcggcgggagaggtggacggaggacgagcacggtcagttcctcgaggccctgcagctgcacggtcgcgcctggcgccgcatacaagtgcacatcggcaccaagactgccgtgcaaatccggagccacgcgcagaagttcttcaccaaggtggtccgagaatcgtcgccaggaagcaacgcctccgcgggcgccgcgccggcgatccagatccccccgccgcgccccaagaggaagccggcgcacccttacccgcgcaaagcggacggcgcggccaagaagcccgcgccggagctcaagcggctggagaagacgtccctgcgcgaccgggtccgggacgaagggtcgccgacgtcggtgcttgcctcggcgcgcacggcgtcacgagcggaggtgtcgggcagcctggtcgcgaacagctcgagcgccagcaggtcgccagccctgtctgacgccggttccgacgagcgtggcgacggcggcggctcgctggcctcctcggtggaccgtgaggacggctgcgcgtcgccaaggacgagagcgccatgtaccaaggtgctctgtcatgcacacgaagtgtcgcgtctaggatcgggagctccagtcgtgaagctgttcggaaacaaggtcgtcgtggtgaaagtgaaagacctggaaacggacactccgcctgcgagcgttgccgaggcagccagaaacgggagccctcctaacggtgccgcaggagcgagctcgtggaaaccgtggccggagctcacgtgcctcgttccccggcgggacggcttcgcggcgcaacccgtcgtgagcccgccgtgcgcggtgttctactacccgcaagcttcggcggcttcggctcaggagcaccagcaagcttcagagccgctggatcacagacgcgcgcagagggaagggtcgtcgccgacaggttcgagcgtggcctccagcgccgccgcggagtcccgccacggtcccgtgcaagagaacgccagcgacggctacgcggcgctacgggccgcaatcccgaggccgaccaagcgcgtgagctcggcttccttcggcgggagagggttcgtgccgtacaagcggtgcgcggccgagagcgaggcggcgcggccggtggcactggcactggcacccggagaggaggccgacggcgacctgacgaggctgtgcttgtgacaagagctgaaggctgcaatgcacatgctctctgctgaaacaggtggcaagagctttgtcgggtgggtcgggcacgacactggaaccaccatctaaaggtttgtttgacaaagcgttcctctggacaannnnnnnnnnnnnnnnnnnnn

SEQ ID NO: 3017 - DNA, 1743 bp, Zea mays
  Clone ID: TF_ZmC2044_1
gtgagagaggccgtggaaaggaatctttcagctcacacctccctatccctccttcccttctcctcctactgctactgctcgccaggtcccctcgctcgctcgctcgtcgtcttcaacctcacacaattatttgtgctcccgctccttccgtccgtccttcctccccccttcccctctccctcttccaaccgccgctcctgctgccttgcctctcagcccagggacgccaaggtctctgccaggatggtgtaggccgtgcctctcgcgcattatgaggtgtggtggtgagggatgggcgatggcctttgcagatgaaggagcgacagcgctggcggcctgaggaagacgccgtcctgcgcgcctacgtccggcagtacggcccccgcgagtggcacctggtgtcgcagcgcatgaacgtggccctcgaccgcgacgccaagtcgtgcctggagcgctggaagaactacctccgccccgggatcaagaagggctcgctcaccgaggaggagcagcgcctggtgatccgcctgcaggccaagcacggcaacaagtggaagaagatcgccgccgaggtgcccgggcgcacggccaagcgcctcggcaagtggtgggaggtgttcaaggagaagcagcagcgggagctgagggacagccgccgcccgccgccggagcctagccccgacgagcggggcaggtacgagtggctgctcgagaacttcgcggagaagctcgtcggagagaggccacagcaggctgccgctgcgccgtcgccgctgctcatggccgcgcccgtgctgccgccctggctgtcgtccaacgccgggccggccgtcgccgccgccgccgtcgcgcacccgccgcccagaccgccgtcgccgtccgtgacgctcagcctcgcgtccgccgcggtggcgccgggcccgcccgcgcccgcgccatggatgccggagcgcgccgcggccgacgcggcgccgtacgggttcccgagcccgcctcagcacggcggcgccgcgcccccgggcatgacggtcgtggacgggcaggcgctggcggagctcgccgagtgctgccgcgagctggaggaggggcggcgcgcgtgggcgacgcaccggcgggaggcggcgtggcggctgaagcgcgtggagcagcagctggagatggagcgcgagatgcggcggcgcgaggtgtgggaggagttcgaggccaagatgcgcaccatgcggctggagcaggcggccgccgcggagcgcgtggagcgggaccaccgggagaaggttgccgagctccgccgcgacgcgcaggtcaaggaggagaagatggccgagcagtgggccgccaagcacgcgcgcgtcgccaagttcgtcgagcagatgggggcgtgctcccgttcatggtcctctgccaccgacatgaactgttgaactggacaaacgagccgctgaccacaccgtcgctagctatcgcgtgctacgtgctccggttcacggctttcttgcattctgggacgcgacttgtaaacgccatggattttcttgctcacgttcacttccgctttctttctttctttttttcttttctttttatttacaactgttgttacggtcggttcagtgcttctctctctatctactagtagttgatcagagtcaagaaatgtaatgctgccgttactgtcgtagtttcatcctctctaaacatgcgttctgtctgtttttgatcatgccaagcaaaaaaaaaaatcaa

SEQ ID NO: 3018 - DNA, 1585 bp, Zea mays
  unsure (1)..(1585): unsure at all n locations
  Clone ID: TF_ZmC152_3
ngttgaatctggatccctcctccacctccacgcgagcggacgacacgaagcggccatagccgcacgttgggatcccctccgctacgcctcttgatggtctccgccagcgcgccgccgccgcaggcccagtccgacgcggccgggtcgggggaggaagtgagcaagaaggtgcggaagccgtacacaatcaccaagtcccgggagagctggacggagcaggagcacgacaagttcctcgaggccctgcagctctttgatcgtgactggaagaagatagaggcttttgttggctccaagactgtcatccagattaggagccatgcacagaagtaccttttgaaggttcagaaaaatggaaccagcgaacatgtcccacctccacgaccaaagcgaaaagctgcccatccatatcctcagaaggcttccaagaatgattcatcttccatccataggaactctggcatgaacgtgcctgtttcttcatgggctcatagttccatcccacaagctgttgcttcatcaatggtgaaagaagatttaggtgctggaacaccaggttcaaacaatttttgctcaagtagtactgaaggccttccaagaacttggcaacctggtgaaacaaatgatccaataaatcaaattccgtcactccgccgtctgtacctcatgatatttctgatatcatcttgtagtgcaaaatacttactccgattctgtccatctctactatttatgccagattttgcgggagtgtacagcttcttaggtagtgttttcgatccaagtcggggtacaagtggtcatctgcagaaacttaaggagatgaatccaattgacgttgagacggcactgttgttgatgaggaatctctccatcaatttaaccagtcctgattttgaagatcaagtcttgccaattcgtgatgccagtactcagcagagcaggcctgaagtccgaaccactatcttatagcatagactcttatctcctgacacccacaaagggatgaaagtgaggaagttgttgtccttatacagcgcttctgatggacctgggctagggagctcaagaagttcagctctagcgacgagcgcgcctttcatgtaaggaagcgtgcacccttcctggcctttcctatccccaagctcggccatctaggctcgtgaaatgctgcttcagatcaaggctgtccttggaaatgggaagatgaaaggagaatctgggtaatgccggttgctccctttcccattctttgttgagttcagctttctgattggtttctggtggccctcttgatacggaacttgtgcgctccgtctgagaaagcatgtgtgcaaagtttcatttgaggagttgaggcgatcatggcgctgtaaaatgcggcttatcttcccccttcaggggctggtttggtggaccaaccctcaaacatttgcaattcctatgtacgtctgtagtgcatcaggtgttgttgcccacgtgtaaaaggaaaataaattcacaatgtanagggagacttgtgcgttagcactaccatttgaatttatngaatgtcnaagcagccccagcgagtttgtacttgcng

SEQ ID NO: 3019 - DNA, 1481 bp, Zea mays
  Clone ID: TF_ZmC152_5
cattgggtacctcgaggccggccgggctccacgcgagcggacgacacgaagcggccatagccgcacgttgggatcccctccgctacgcctcttgatggtctccgccagcgcgccgccgccgcaggcccagtccgacgcggccgggtcgggggaggaagtgagcaagaaggtgcggaagccgtacacaatcaccaagtcccgggagagctggacggagcaggagcacgacaagttcctcgaggccctgcagctctttgatcgtgactggaagaagatagaggcttttgttggctccaagactgtcatccagattaggagccatgcacagaagtaccttttgaaggttcagaaaaatggaaccagcgaacatgtcccacctccacgaccaaagcgaaaagctgcccatccatatcctcagaaggcttccaagaatggaactctggcatgaacgtgcctgtttcttcatgggctcatagttccatcccacaagctgttgcttcatcaatggtgaaagaagatttaggtgctggaacaccaggttcaaacaatttttgctcaagtagtactgaaggccttccaagaacttggcaacctggtgaaacaaatgatccaataaatcaaattccgtcactccgccgtctgtacctcatgatatttctgataatcatcttgtagtgcaaaatacttactccgattctgtccatctctactatttctaagaattatgtcttaaccatcctcctgtgcatcttttcttgtgaatttgtaagcttcaatctcaaatccgctggccccttcttttagaatgaaccgaacctccaatattctcttgatgatgcttaacatacagagaaacggtgtaacacaaaacagcacaatccatttctttgtactgtttctttttcaaatattttactgttttcaatattgaatctatgtcttgaatgaattgctagcttatctaattcatatttacattcttgacatttcaattatgtctttccaatgtttgatatagttatgccagattttgcgggagtgtacagcttcttaggtagtgttttcgatccaagtacaagtggtcatctgcagaaacttaaggagatgaatccaattgacgttgagacggcactgttgttgatgaggaatctctccatcaatttaaccagtcctgattttgaagatcaagtgtctggtactctggttcatgtttcagtgttttgctgtttgcatcatttctctatgaggaagttgttgtccttatacagcgcttctgatggacctttagggagctcaagaagttcagctctagcgacgagcgcgcctttcatgtaaggtctctcggcatataatttcagttcgacagacctcagaggtgcctgccctgttcaccgatggatgaaagtttgcttttcttctcgctagcagttcaaacatgtcttcagattatgcctctactaaatcgtttgccactaattgac

SEQ ID NO: 3020 - DNA, 1356 bp, Zea mays
  Clone ID: TF_ZmC152_7
ctcgaggccggccgggacctccttccgagcggacgacacgaagcggccatattcgcacgttgggatcccctccgctacgcctcttgatggtctccgccagcgcgccgccgccgcaggcccagtccgacgcggccgggtcgggggaggaagcgagcaagaaggtgcggaagccgtacacaatcaccaagtcccgggagagctggacggagcaggagcacgacaagttcctcgaggccctgcagctctttgatcgtgactggaagaagatagaggcttttgttggctccaagactgtcatccagattaggagccatgcacagaagtaccttttgaaggttcagaaaaatggaaccagcgaacatgtcccacctccacgaccaaagcgaaaagctgcccatccatatcctcagaaggcttccaagaatgattcatcttccatccataggaactctggcatgaacgtgcctgtttcttcatgggctcatagttccatcccacaagctgttgcttcatcaatggtgaaagaagatttaggtgctggaacaccaggttcaaacaatttttgctcaagtagtactgaaggccttccaagaacttggcaacctggtgaaacaaatgatccaataaatcaaattccgtcactccgccgtctgtacctcatgatatttctgataatcatcttgtagtgcaaaatacttactccgattctgtccatctctactatttctaagaattatgtcttaaccatcctcctgtgcatcttttcttgtgaatttgtaagcttcaatctcaaatccgctggccccttcttttagaatgaaccgaacctccaatattctcttgatgatgcttaacatacagagaaacggtgtaacacaaaacagcacaatccatttctttgtactgtttctttttcaaatattttactgttttcaatattgaatctatgtcttgaatgaattgctagcttatctaattcatatttacattcttgacatttcaattatgtctttccaatgtttgatatagttatgccagattttgcgggagtgtacagcttcttaggtagtgttttcgatccaagtacaagtggtcatctgcagaaacttaaggagatgaatccaattgacgttgagacggcactgttgttgatgaggaatctctccatcaatttaaccagtcctgattttgaagatcaagtcttgccaattcgtgatgccagccctcaccagagcaggcctgaagtccgaaccactatcttatagcatagactcttatctcctgacacccacaaagggatgaaagtggtaatccgaactgttagaacaaatttaatattttaaaatagatatgcat

SEQ ID NO: 3021 - DNA, 891 bp, Zea mays
  Clone ID: TF_ZmC182615_1
gacacacggcgtcgcatttggaacgctcctgctcgtcgcacgtacgaagcccacgcgtccgcgcacgtgccagagccgagcccccgcgccggcgccccgccggagaggatgacgcggcggtgctcgcactgcagcaacaacggccacaactcgcgtacctgccccgtccgctccgccggcggcggcagcggcggcggcggggtgaggctgttcggcgtgcggctcacgacggcgccggcgccggcggtgatgaagaagagcgccagcatgagctgcattgtgtcctcgctcggcggcggcttcggcggctcgtcgccgccggtggaaggagtgggtgctggcagaggaggggaagacagtgggaccggctacgtgtccgatgatcccgcgcacgcatcctgctcgacgaatggccgcgccgagcgcaagaaaggtacaccttggactgaagaagagcatagaatgtttctgatgggtctgcagaagcttggtaagggagactggcgcgggatatccagaaactttgttgtttccaggaccccgactcaagttgcaagccatgctcaaaagtactttgttagacagacaaactcatcgagacggaagaggcggtcaagcttatttgatatggtcccagaaatgccaatggatgagtccccagctgctgtggaacaatttactctccaaaatactcaagatgaggatacaagttcaaatcacgtgccaaccttacatcttggacaacggaaggaaacagagtttgctaagcagctacaaacttttcagccagggcaccatgagaaatctgaatacgcagaaccttcattgctgctaccaaatttggagatgaaccccaatgtaccattcaagaccataactgatccaacaaga

SEQ ID NO: 3022 - DNA, 688 bp, Zea mays
  Clone ID: TF_ZmC8091_3
ccattgggtccctcgaggccggccgggtcctcctcatctcactcactcccttttcctcacgccccctccccgcctcgagcccctcgctggctcgctcccattcccatctcgcactaccaaccttccggatccagtgccgcacgcctcactccccgtccccgacacccatgacacgcaagaggcggaagcacgccgccgccgccgccgccgcctagggttccgatcccttcctcatggattcgctgccgcggaagcgcaagggcgcgcgcgccgcgtgctccctggccggatcccgccacgatgcgcctgccgcccgcaagcgcacctgccgcgagcccaagccgcggcccgagaagaagaagccctcttccgccgatgagggctccgcctccgtccgcggcggcgtggttatgacggcgccacaccatcctccgcgcgcacgccaggttcggcaacaagtgggccaccatcgcgcgcctcctctccggccgcaccgacaacgccatcaagaaccactggaactccacgctaaagcgcaaactacgccgccagcgacgctgttgctgacgctgacgacgagcgccctggaagcggaggaggagcgaggctcacccagctcgtgaaatcactaatctcttcgtagttcggcccagtgctgacgatcatgacggagacaacagccaacgag

SEQ ID NO: 3023 - DNA, 3091 bp, Zea mays
  Clone ID: TF_ZmC11894_1
cctcgaggccggccggggggcctagttgggtccgatgggaagcgatgggagacacggccctcccacaatccggtccaacaccaacacacgctgccatgccatgaaatatccccgcagttaaacagctcagttcagctgatacctcgccggcagatccccctcctgctcatccgccttcctttctcgaagcgcccaatttattaccttcccctaatcccgcagccttgccagaagccaaattggtgctcctcttatctcgccgcgccgccaccgctccatttccgctcccccagcccccccaaaagaacctcgtaaccctactcgcgggattccgcaggccgccgcttgcttagggttcatcactcctgttcacacccgatggccgtggacgaggcgagcagcagtggcggtggggaggaggggtgcggatcgtggaacccaccagcaggaaaaggcgttcgagaacgcggaggcgacgatgggcggggaggaggacggggacgccggccgggtgtatcgtagtggacttagactgctcttggtgagatcttgaggtcgattcctcgaatcgcattgaatttactgcgtttttttaaaaaaaaaaaaaaaaaaaaaaaaaaaaaaaaaaaaaaaaaaaaaaaaaaaaaaaaaaccgtccgatctctcctttccttttgcgattgggtctgtccctcccggccgcgacaaccctttcccttctctgcttgcttgctgctgcagtgctgcctccccctcgcccagcagcagggagcagccatgccaggggaccacggctccaagggcgacatctccttcgccggacgcttcacggccagcgccatcgcagcatgcttcgcagagatatgtaccatcccgctcgacacggccaaggtcaggctccagctgcagaagaacgtcgtcgccgccgccgcctccggggacgccgcgccagcgcttcccaagtaccgcggcctgctcggaactgccgccaccatcgctagggaggaaggggccgcagcgctctggaagggcatcgtcccgggcctccaccgacagtgcatctacggggggctccgcattggcctctacgagcctgtcaaatccttctacgtcggcaaagaccacgttggggatgtccctttgtccaagaagatagccgccggcttcacaactggtgccatcgctatcagcatcgccaaccctactgaccttgtcaaggtcaggctccaggccgagggcaagcttgcgcctggtgtgccacgccgctacactggcgcaatggatgcttattccaagattgctagacaggaaggggttgccgctctgtggactggccttggaccaaatgtagcgcggaatgctatcatcaatgctgctgagttggccagttatgatcaagtcaagcagtcaattttgaaactccctgggttcaaagatgatgtggtcacccacctttttgctggtcttggtgctggcttctttgctgtttgtgttggttccccagttgatgtggttaagtcgagaatgatgggtgactcagcctacaaaagcactctcgattgttttgtgaagacgctaaagaatgatggccctttggcattttacaaaggcttcctgccaaactttgcaagactgggatcttggaatgtgattatgttcttgacattggagcaggttcaaaagctgtttgtgaggaaagcgacaagctgaagatagagtttttgcagtcaggtggcgtacaattgacgcacagggtttttcttctatagacaaaaggggagaaatgacacctcccccctcgagaattggggaacaaggacagatctgacacctcaattgcgagaaataaaaataacagccgacagttgcatgatccctgaacgaataaattcagaactagaaaacagatgtcagtaaacaacatgtggtgaatgttggaacttgaactgctctagttcagtgggcatctgttgttgcatgcttgggatggatttaatgtttcgttttttttcttccttgtactgaagtgctctgatcggtaacgatcactgtgtgtgaagtgcttgattgttatgtggtatcatgagaatgaataaacataataatggagctgtttttttattttttactgaaaaaaaattttttgataagatgcggtctcgagccgaaggaaagtggcggaggagggacccatggggacaaggggtcggcgaagtccgccgagcaggagcgtaggaagggcatcgcctggacagaggacgagcacagattgttcctccttggacttgaaaagtatggcaaaggtgactggcggagcatctcgcggaactttgtgatctcaaggacgccgactcaagtagctagtcatgcacagaagtactttatccgtctgaactcaatgaacagagaaaggcggcgatcaagtatacatgacatcaccagtgtgaacaatggagatccatcaactgcacagggtccaatcacaggccaaacaaatggtcaggctgcaaatcctggaaaaccatctaagcaatccccgcagccagcgaatacacctccaggcgtcgatgcttatggcacaacaattggacagccagttggtggcccccttgtctcagctgttggaactcccgttacactacctgtttccgctccacctcatctggcctatggcatgcgtgccccggttccaggagccgtagtacctggtgctccagtaaacattgctccgatgccctatccaatgccacccccaccatctcatgggtgacagggtgagggacacatttcaaatgctgtgtagcgtctaaacaaacccataatctccccctatgccagcattttgcgggtgtgctgctatgtctcaataaagcaatgccaataaacccttgtacattacaaactgttgtcacatgttgcattgaggacattgcagattgtgtactttgtgttgcatgcaaactttttcatgtacatctccaaaatccaagtgtttctcgttatggcagcttgtacttcagtcagtacctgtgatatgtaaatgtgtaccagctggaacaagagtaagatactgtcgcctgtttctcatgtc

SEQ ID NO: 3024 - DNA, 1258 bp, Zea mays
  Clone ID: TF_ZmC11894_2
tcgtcggcgtccgatctttcctttccttttggcgcttttctcctgcccaccacgcggccacaaccctttcccttctctgcttgcttgctgctgcagtgctgcctccccctcgcccagcagcagggagcagccatgccaggggaccacggctccaagggcgacatctccttcgccggaccggacgcgtgggctcgcccagcagcagggagcagccatgccaggggaccacggctccaagggcgacatctccttcgccggacgcttcacggccagcgccatcgcagcatgcttcgcagagatatgtaccatcccgctcgacacggccaaggtcaggcggcactacgagctgctggtggaggacgtcgacggcatcgagtcgggccgcgtcccgcttccggcgtacgcggctgacggcgctgccgaggaagggggcggtggcgggaagaagggaagtggcggaggagggacccatggggacaaggggtcggcgaagtccgccgagcaggagcgtaggaagggcatcgcctggacagaggacgagcacagattgttcctccttggacttgaaaagtatggcaaaggtgactggcggagcatctcgcggaactttgtgatctcaaggacgccgactcaagtagctagtcatgcacagaagtactttatccgtctgaactcaatgaacagagaaaggcggcgatcaagtatacatgacatcaccagtgtgaacaatggagatccatctactgcacagggtccaatcacaggccaaacaaatggtcaggctgcaaatcctggaaaaccatctaagcaatccccgcagccagcgaatacacctccaggcgtcgatgcttatggcacaacaattggacagccagttggtggcccccttgtctcagctgttggaactcccgttacactacctgtttccgctccacctcatctggcctatggcatgcgtgccccggttccaggagccgtagtacctggtgctccagtaaacattgctccgatgccctatccaatgccacccccaccatctcatgggtgacagggtgagggacacatttcaaatgctgtgtagcgtctaaacaaacccataatctccccctatgccagcattttgcgggtgtgctgctatgtctcaataaagcaatgccaataaacccttgtacattacaaactgttgtcacatgttgcattgaggacattgcagattgtgtactttgtgttgcatgcaaactttttcatgtacatctcc

SEQ ID NO: 3025 - DNA, 613 bp, Zea mays
  Clone ID: TF_LIB5117-068-A1-PF1-E3
gagctctttttctcccccctcccctccctccccgtcgcagcacacgcctcctcattttcctcatctcctctcctctcctctcctctcctgctctgctctcctttggagcgagaagcaacaacaaagattaggagctgctgatttcgcctctgttcttcgtcgtggtcgtcgcagcgagatttggctttgccggcgctttgatcttgaaggatctgcagagagatatggcgcgttttcaggaaaccaagccggatctgctgaattccggcagcgatacgcggatgatggccgaggcccgagcccccaaggcgcggaagccgtacatgataaccaagcagcgcgagaaatggaccgaggaggagcacaagctcttcctggaggccatgcagctccatggccgcgcctggcgccgaattcaagagcacataggcaccaagacggccgtgcagatcaggagccatgcgcagaagttcttctccaaggtcacccgggactcgtccggcgacagcggcggcagcagctccggcggtgctgggccgccgatccagatcccgccgccgcggcccaagaaggaagtcggtgcacccgtacccgtggcaccagaggagcgcgc

SEQ ID NO: 3026 - DNA, 1685 bp, Zea mays
  Clone ID: TF_ZmC8091_2
cattgggtacctcgaggccggccgggagccttcacttgccagttcccactcctaactctctcttcgtctactcttcttcccacccccagcgttcgcttccatccaagctcatatcatcactaggccacgcgccccaatactcagaactagtcttgagtaaagcatggcgtcgtcttctccgtcctgccgtggcagcggcggcaagtcggacgtggaccggatcaagggcccctggagccccgaggaggacgaggccctgcagcgcctggtggcccgccacggcgcccgcaactggtccctcatcagccggtccatcccgggccgctccggcaagtcgtgccgcctccggtggtgcaaccagctgtcgccgcaggtggagcaccggcccttcacggccgaggaggacgacaccatcctccgcgcgcacgccaggttcggcaacaagtgggccaccatcgcgcgcctcctctccggccgcaccgacaacgccatcaagaaccactggaactccacgctgaagcgcaagtactacgccgccagcgacgctgttgttgctgacgctgacgacgagcgcccgctgaagcgcacaagcagcgatggccacccggggctctgcttcagccccggaagcccatccgggtccgacctcagcgactctagcaaccacagccttccctccgtcatgccgtcagccgcttctgctgccgccgtcacctcccaccagcagcagcagcacgtgtaccgccccgtgccgcgcgcgggcggcgtggtcatgctaccggtggcgcctcttgtgccgccgccgccacagcctccggcgacctccttatcactgtccctctccctgcccgggctggacggccagaagcccgaaccatccccagcggttctgacgccggcaccggcaccgcctcaacctcctctgcagatacagcagcagcagcctgctccacctcagatgccgccaccacaagcccaaccgagcttgccgttccagctgcaggcggctgcgacgaacctcacgtcgcagcagccggcagcagcgccgttcagctcggagttcctgttgttgatgcaggagatgatccggatcgaggtacggaactacatgtccgggtcggggctcgatccgcgcaccgacggcgccgccgtgcacgccgtgagcaagcgcatgatgggtatggccaagatcgagtagtttcagcgggcatgcacacagcggcagcagcaggagtggaagatacaaaagaaaacgaagcgccgatcgatccgcggcggccagcgcgtgtatgaagtagtaatgaaccagcaagaacggcgtggccttgaaacatacggaggccgtgtggtgcggcaagtgaacagctccatcattcggctttttagctcatgacaatatcataccctttgttaatctagccgtttctctatcttttattcttcttcttccccctttttttttttttgaatttttgggtctccaagcaagcagagacgaagacgaagagaactttgtctgttgtctgcctgcctgcccctttggaggtaagatgctacctgaataaactgcagagcaaaggatccttctttcattgatgctggtggtaaccagtaatcaaaaaaaaaaaaaaaaaaaaaaaaaaaaaaaaaaaaaaaaaaaaaaactcgaggagggggcccggtac

SEQ ID NO: 3027 - DNA, 2416 bp, Zea mays
  Clone ID: TF_ZmC277_1
gcggcacgagctgacctccgcctgctcgccctctctctctcgatggtcgtcttctccacgagaccacgaccgatcaaccccaatcgtagggaactgggaacccggacccagatctcccctagatcctcaatcccaatctgccctccgccgtatcgatcatacctcccgatgcgaccccaagtctggtcgatgcgagtagcggcggcgatttagcgaactgcgcgttcgctagggttagggtttcgagggtttgcgctagggtttgggcgcacgatggggcggtcgcgaggggtgcagaattccggcgacgacgacaccgtacacaggtcgaagcggaggagggtcgcatcgggcggggatgcgacggactccgtttccgctggcatcgggggagctggagaaggagggggcaagaaagcgctctaccactgcaactactgcaacaaggacatctctgggaagatacggatcaaatgctccaagtgccctgacttcgacctttgcgtggagtgcttctctgttggcgctgaagtcaccccacatcgcagcaaccatccttacaaagtcatggacaacctgtctttcccacttatttgcccagattggaatgcagacgaagaaattctcctccttgagggaattgaaatgtatggtctgggaaactggcttgaagttgcagagcatgttggtaccaagtctaagttacagtgtattgatcattacacaacagcatacatgaactcaccttgttatcccctaccggatatgtctcatgttaatggcaagaacaggaaggagcttctagctatggctaaagtgcagggtgaaagtaaaaaagggacttcactgttgcctggagagctgactcctaaggctgaatctccattttctccctccagggtcaaggtggaagatgcacttggagaaggtctagcaggtcgatcaccttcgcacatagctgttggtgcaaataaaaaagcttcaaatgtgggacatattaaagatgggtctaatgtatcaaaagttgaagatggtcatgtcgatagaagtgttggtgtgaagaagcccagatattctgcagatgaaggcccttcgttgactgaactgagtggatacaatgcaaagagacacgagtttgacccagagtatgataatgatgccgaacaagcgcttgctgagatggaatttaaagaaactgattcagaaactgatcgtgaactgaaactccgtgtgctgcgtatttatctgtccaggcttgatgaaagaaaaaggagaaaagagttcatattggaaaggaatttattgtttcctaatcccttggagaaggatcttacaaatgaagacagggaagtttaccatcggtataaggtcttcatgcgttttctttccaaggaggaacatgaagcccttgttaggagtgtcattgaagagcgaaaaattcggaggagaattcaagaactccaggaatgtcgttctgctggatgccgcacacttgctgaagcaaagatacacatagagcaaaagaggaaaaaagaatacgagctgaatgcccaaaaagctaaggatagcagtcaacttaatgcaaataataaatcagtacagaagatgaatcgacctatgaaaattgagtccgatgggaatttggatccaaagaaaggtggtgctggcttggattctcctaaaactacaggacctacaagtgttaagcagtgggatgactgggatatagttggtcttcctggggcagagctattaagtgctagcgaaaagcttctatgttgccagaacagactgctacccagtcattacctgagaatgcaggaggtgctgatgcaggagatattcaagggtagtgtcctaaagaaggaagacgcacacgtcttgtttaaggttgatcctaccaaagtagatagtgtttatgatatggtaacaaaaaagctgggcaaccatgtggagttgcctacggtctagcttatgcctttgggcttgcctgctgtgacatgccgaagaaaacaaatcttggtttcgccccttgcagcgtgtctgaatcagggctgaaggtgggaactgtactaaatcgaatcggccatagttagctgaaattcatatcagctgtcagtagcacagtaaggcattcccgccaagctgtaaaattattgccccgacgagaatgtgtagcatgaatttgaatttcttttctgctattgctgtgtactgttgcagggtagtgccttattgtagtatatgtataggtgcctgagttttatgtatcatcgtgtatgtaccatttgggcgctctatttatgccattgtaccaaccccaaacatcgattattataattcatctagcagccaaattctaaaaaaaaaaaaaaaaaatggcgtcaaaaaaaaaaaaaaaaaaaaaaaaaaacac

SEQ ID NO: 3028 - DNA, 677 bp, Zea mays
  Clone ID: TF_ZmC2240_2
ggccggccgggccgggaattggtacctcgaggccggccggggcaaattattgcttcagctcgcgcgagacctcagctttcactcgagtgagtgcgagtccatcgccggagagagagagcgagagagcacgcaatcgagttaaacaagctctgtctcttggttctctgtccacggcgggagagtgtgagagatgggcaggcagccgtgctgcgagaagatcggtatcaagaaggggccgtggaccgcggaggaggaccagaagctggtcaccttcctcctgtctcacggccattgctgctggcggctcgtccccaagctcgcggggctgctgaggtgcgggaagagctgccggctgcggtggaccaactacctgaggccggacctcaagcgcggcctcctctcggaggaggaagaggcgctggtcatcgacctccacgcgcagctcggcaaccggtggtccaagatcgcggcgcggctgccggggaggacggacaacgagatcaagaaccactggaacacccacatcaagaagaagctcaagaagatgggcatcgaccccgtcacccacgggccgctcgctccggccactcaacctctggcgctggcgctggcgcatcagcgcgatcctccgcaggtggtgcgagaagaggaacgttgcgacgacgaccccagcaagc

SEQ ID NO: 3029 - DNA, 586 bp, Zea mays
  Clone ID: TF_LIB3732-055-Q1-K6-B2
tccggcattttcagacttggatggaaagatagggagcgtttgtctgagagctcttgcagttattgcttacagcctttgccaagtttacattaccggtcgcaaaagaggcagatatttttctatgttctgattgcttccatgatgcgatgaatatcactggacattcttgcttagatttccagagagttgatggggataatgatgaatcagaaaatgatagtgataaatggactgatgaagaaacattgttgctgttggaaggcattgagaagtacaatgacaactgggatgacattgcaggtcatgttggaacaaaatcaaaggcacaatgtatctaccattttattcggttgccagtggaagattgtttgctagagaatgttgagatacccaatgcacccattccatttcgaccacaaagcaatggttatcaatgtttagattccaatggcagcacatcaggtggtttgcttcactaagtttctcgatcagctaaattcatcttttggtaatttgcgcctgttgtaagttatggattaatattgatgaagtgtgttcttaggagctccagttcaaaatatccaac

SEQ ID NO: 3030 - DNA, 1422 bp, Zea mays
  Clone ID: TF_ZmC13666_1
agagagttgatggggataatgatgaatcagaaaatgatagtgataaatggactgatgaagaaacattgttgctgttggaaggcattgagaagtacaatgacaactgggatgacattgcaggtcatgttggaacaaaatcaaaggcacaatgtatctaccattttattcggttgccagtggaagattgtttgctagagaatgttgagatacccaatgcacccattccatttcgaccacaaagcaatggttatcaatgtttagattccaatggcagcacatcaggagctccagttcaaaatatccaacaaggcaatgagcttccgttcataaattcttctaatccggtcatgtcactggttgcatttttggcctcttcaattggacccagagttgcagcatcatgcgcacatgcagcattatcttttttgactagagacgaggattccagggtgagttcagaaggctcacatgctggtggtctgggcaatggtgcaaatccaaattttcagaaccataatggtgcttcaccatccatttctccagaaaatgttaaatatgctgccatgcttggtctgtcagcagcagcaatgaagtctaagctctttgccgatcaagaagaacgcgaagtgcaaagactaactgctactgtaataaatcatcagttgaagagattggagttgaagctgaagcagtttgcggaagttgagaccttgctcttgaaggaatgtgagcaagtagaaagggttagacacaggatttcagctgaacgcgtcaggatgaggtcagccctattaggtcccaccggaagcggtctaccagggggcagttgtagcactatgccatcaaatccagcaggcatgagccccagaccagtcggtgtgccaggctacatgccacagaccagcatgccagccacatatgccaacaacctgcaggggcatgggaatcctcagatgccgttcttacatcagcggcctcagatgctttcgttcggccctcgcctaccactctcagccatccagactcaaccatcaccacaatcatcaaacatgttcaactctggcatgcccaattcgattgctcctaaccaccatcagttgctgagatcatcctccggaaacaattctagtgcaggataggggaattgtccataagattttttttttctcagcttaggtttgtcaggtgtagcattatgtcatttataaacacatcactgtaattcatttatgtgatgtatgtgtttgtcatataagttttttattaggtcctataaattgtccccatattgctgcgcccttgtgtacctttgttaccaggtcacctcttcccagtgcagggagattcaaatgaacagaatatgttttcatatgtatcccttgagaactcttattgaatatatatgtatgtagttaattcaat

SEQ ID NO: 3031 - DNA, 828 bp, Zea mays
  unsure (1)..(828): unsure at all n locations
  Clone ID: TF_LIB4764-079-R1-K1-H8
cattgggtacctcgnagccggccgggctgactgacctcagcctcaggctcagctgcaccgatcatccatccccatacaaagacactgtatacatacattttaacaacaacaaggtttagctccgcatggcctattactgcaatgcttgctgcgcagggaagagctgccgcctccgctggttcaaccagctagacccccggatcagcaagcgccccttcagcgacgaggaggaggagcgcctgatggctgcgcaccgcttctacggcaacaagtgggccatgatcgcgcgcctcttccccggccgcacggacaacgccgtgaagaaccactggcacgtcatcatggcgcgcaagtaccgcgagcagtccacggcctaccgccgccgcaagctcaaccaggcagtccagcggaagctcgaggcagcctccgccgcggtcgcaatgccgccgggcgcgggcgcgggagacgtcgccgtcggccagcaccaccacctgctggccgccgccgcggcggcccacgcccacgacgccgcctacagcttcgccgcggacccctacggcttcggcatccgccaccaatactgcaccttcccgttcccgccaggcgccgcttcggctgaggacccgccgccgccagcgttcatagatttcctcggggtcggagccacatgaacgcgcgcgcatgtgcatgcatgctcgacttcaccacgcgccttgcagttgcatgtagtgggatctagctaggacaggtagctcgagcagcctctatctagtatctagctagctacctttgccatatatgangagtaagtacatcgatccaaggctt

SEQ ID NO: 3032 - DNA, 703 bp, Zea mays
  Clone ID: TF_LIB4978-032-A1-K1-C6
agttcagagaggatgcccccccaaacctttccttgcattccactgaaatcttcctatctgcaaccatgcagttgctcaattctggcctccgctgaagcccaaccatccattgttatataagtcgctgcagcctttgcaatttcccactccttcagccaccatcggtcattgaaggagcttcgtgccaccagagaaggtgttcgccgtgcataatcacagactatatacattccacagacctgtaaagctctgtgaatttggagctcccacaggttctgcattggcgttgagatggggaggcattcttgctgctacaagcaaaagttgagaaaggggctctggtcccccgaggaggatgagaaactcatgaaccacataacaaagcatggccatggctgctggagttctattcccaaactcgctgttcaattacctaaattcgagaagacaaattgttgcagggctccaaaggtgcggaaagagttgtaggctgaggtggataaactatctgaggccagacctcaagagaggggcattctcccaagacgaagaagacctcatcattgagctgcacgctgtccttggaaacaggtggtctcaaattgcagctcagctgccagggaggactgataatgagatcaagaatctatggaactcgtgcatcaagaagaagttcaggcagaaaggcattgatccccacacc

SEQ ID NO: 3033 - DNA, 714 bp, Zea mays
  Clone ID: TF_ZmC42_20
gaaaaaaaaaaccagagaggttgagcaagaaccgaggcggatccgccttttgtccctcctgcccgagggctagcctgccgccgcccccgcgagagatcgagaggaggcgctgttcagttcaggggggtgagaagccgtgggggaaaagatgatgcgggagacgtacatggacgtgctgccgccggtggaccacatagccgcctcacggagcggcggctggttcccgggcgcggcgcgtctctggacggcggcggagaacaagcagttcgagcgggcgctggccgggctcgacctctgccgcccggactgggagaaggtggcgcgggccatcccgggccggacggtgcgcgaggtcgtcagccacttcaagagcctccaggtcgacgtccagcagatcgagagcggcctggtgcccatgccggtctacggcgccggggccggggccggctcgttcaccctgcagtgggacggctgctacggccccgcggactcgaggcacaacggctaccgcttcggaagcggaggctgcgggatgcggcaccacggtcgcaccccggagcaggaccggaagaagggcgtgccgtggacggaggaggagcacaggctgttcctcttaggcctgaagaaatacggcaagggggactggaggaacatatcgcgcaactacgtccatacgcggacgcccacgcaggtggccagccacgcgcagaagta

SEQ ID NO: 3034 - DNA, 756 bp, Zea mays
  Clone ID: TF_LIB5117-045-A1-PF1-B2
tttcccctctgtctccttcctcctcccaccccatcccaagtagactaccagatcggtaacctcccaaatcactcgctcactactcgtatcacttacgatcgaggatctaccggcggccatggcggcgtgcagaggaggcgggggcggcaaggacgtggaccggatcaagggcccgtggagccccgaggaggacgacgcgctgcagcggctcgtgggccgccacggcgcgcgcaactggtccctcatcagcaagtccatcccggggcggtccggcaagtcctgccgcctccgctggtgcaaccagctctcgccgcaggtggagcaccgccccttcacccccgacgaggacgacaccatcctccgcgcccacgccaggttcggcaacaagtgggccaccatcgcacgcctcctctccggccgcactgacaacgccatcaagaaccactggaactccacgctcaagcgcaagtactcctcctcttcctctgcatcggcatcgccggctgatgacgccatggcaaacgacgatgaggaccgccggccgctgaagcggaccagcagcgacgggtacccggggctctgcttcagccccgggagcccgtcggggtcggacctcagcgactccagtcaccagagcctccccttcgtcatgccgtccgccgcctcgcagcagccgcacgtgtaccgcccggtcgcgcgggcccggcggggtgtaccggctcccgacggccaaccccgcatccgtcgccttcctgt

SEQ ID NO: 3035 - DNA, 1352 bp, Zea mays
  Clone ID: TF_ZmC659_3
cattgggtacctcgaggccggccgggacagtgcagtgctccccgaggtccccaaaagacaagcaggcaagcagcaaagacacgcctccctgcttgcactccccacacgcccagtcgcccacacctccaacagacaaagacaatctagcaagcacacacagcatcaggaggaggagatcgagtaggagcagaagcaaagaatggggagagctccgtgctgcgagaagatggggctcaagagggggccatggacgccggaggaggacaagatcctggtcgcgcacatccagagcttcggccacagcaactggcgcgcgctgcccaagcaagccgggctgctgcggtgcggcaagagctgccggctccggtggatcaactacctgcgcccggacatcaagcgcggcaacttcagcaaggaggaggaggacgccatcatcaccctccacgagcagctcggcaacaggtggtccgccatcgccgccaggctgcccgggcggacggacaacgagatcaagaacgtctggcacacgcacctcaagaagcggctggagcccaccaccaagcagctggagcaggagcagcacggggcgcatgcaggtggtgacgccgccaggaagcgcagcaggcccaagcgcgcgggtgccaggaaagacgacgacggccgccgtcgccccggccaccaccgcgccggcgtcgcctgaacggtcggcggcctcgtcgtcggtgaccgagtcgacggagcaggagcagggaaacacggggacgagctcgcccgggttccccaaggaggagagcttcacctcgtcctcggaggccgccgaggagttccagttcgacgacacgttctggtcggagacgctgtccatgccgctggacagcttcgacgacgtccccacggagccctgcagctccggcgcgttcggcgacgtggccgcctcctcctcctcctcgtccgttggcgccgacgccgacttggactactggctcggagtgttcatgaagtccggcgacgcgcaccaacaactgccgcaggtttagagcgcgcacgcgcgcccgagaattttcagttccctggctaattgattcatcgttctttctctctccctgcacgtcttgcaatcggaattcggaggggacagtcacaatagcagctaattaatagaggggtgtgtgtgttgaggaccacgacgagattaggaagaaacaacgcgacatgccattgcatctatctcttgtttgccttcttgtatataaagatcgatcgatcgacaagatatcggtgatcgaaacctatatatgctacccattttgagaggaaaaaaaaaaaaaaagggcggccgcttccatgttgga

SEQ ID NO: 3036 - DNA, 787 bp, Zea mays
  Clone ID: TF_LIB4974-032-A1-K1-F12
ctcgaggccggccgggccgggatctatctgcagtccctttcttcttcctcttgattgataggtgcgccgaagcttgttttgttgggtggcctttgtctctgtcgtctcgtcttccgcccggccgccaccacctccaggtccaggctactagctagctattaagtccggccaaccaagcagctcgatcaggtcgaccaacggcggggacagttcggagggaggaggcggccggagaccgaaaaattaaaggaagaggagcaaggctgaccgatgaacgatcgttatcttcatcatcagtcgtcgatggtgacaccggcagcagcgagcaagatgagcaagaagctgcagggcggtggtgagcgtagtagtggcagtagtagtaggggcagcggcaacagtgataagcagcagcagcagcaggtgccggcggcggcgatgaggaagggcccgtggacagaggaggaagacgctcagctggtctgaggcgcaccggcaagagctgccgcctccgctgggtcaactacctccacccggggctccggcgcggccgcatcaccgccgacgaggagcgactcatcctccagctccacgcgcagtggggcagccgctggtcgcgcatcgccaggagcctccccggccgcaccgacaacgagatcaagaacttctggaggacgcgcgccaggaagcagaaggcggcggcgcagcagcatcagcaggacagccggagcagcaagacggcgatgggcgtcggcgttctcagggtcagcgtcgtccgtgactaccacta

SEQ ID NO: 3037 - DNA, 1933 bp, Zea mays
  unsure (1)..(1933): unsure at all n locations
  Clone ID: TF_ZmC12010_1
gggacctcgagccggccgggccgggattacatacgtcgcctttcttcttcctcttgattgataggtgcgccgaagcttgttttgttgggtggcctttgtctctgtcgtctcgtcttccgcccggccgccaccacctccaggtccaggctactagctagctattaagtccggccaaccaagcagctcgatcaggtcgaccaacggcggggacagttcggagggaggaggcggccggagaccgaaaaattaaaggaagaggagcaaggctgaccgatgaacgatcgttatcttcatcatcagtcgtcgatggtgacaccggcagcagcgagcaagatgagcaagaagctgcagggcggtggtgagcgtagtagtggcagtagtagtaggggcagcggcaacagtgataagcagcaggtgccggcggcggcgatgaggaagggcccgtggacagaggaggaagacgctcagctggtatggttcgtccgcttgtttggtgaacgccggtgggatttcttagcaaaggtctcaggtttgcgcggtggcgggtgcatccgatccccaagcatgcatgcatgcatgcatatgtagatgcatgcgtgcgtggggatggattgatgtaggatgggctatggcgatgggtgttgattaaccatttcttttctctctctcttgtgcgtgccctgcttcttctctgtgcatgcgcatgtgtcggcggcgtactcgtgcaggtctgaggcgcaccggcaagagctgccgcctccgctgggtcaactacctccacccggggctccggcgcggccgcatcaccgccgacgaggagcgactcatcctccagctccacgcgcagtggggcagccgctggtcgcgcatcgccaggagcctccccggccgcaccgacaacgagatcaagaacttctggaggacgcgcgccaggaagcagaaggcggcggcgcagcagcagcagcagcagcaggacagccggagcagcaagacggcgacggcgtcggcgttctcagggtcagcgtcgtccgtgactaccaccacgtccagctgctctggctctcctagtccgaccagccgcggctgtggcacggccacgtcatcgtccgctctgaccgagtccgcgctgcggcaaagcggcggcgaagacgaggacgccgagctcgacgaggcgtccaccaccaccaccaccacggcaagccagcgtcaacaccaagacgacgaccaccagcagcagcaccaggagtgctacgcctcggaccacttctggaacgacatcgcggcggcggaggcggccatctacatgttgatcgacggcggctggacagggtccggccccggccatcccgccgccgatccgccttcgtcgccggcgtgggagtactgctctgattactcgctctggaggatcgacgacgacgagtactacgagaagatgctcgactcctcctcctgattcgattatccagccatcacacgcatatgcatatctatcattagcttatttctttcttttttttgtgctgattagtctagcatacagcagctatgagaatccaaagcttcggttcggctttcgttgcatctctttgtataatactgtaacatatctatatatatatatgtatgatatgatactgctctcgatcatatatattgtaccaatatgtgctaggatatatagacatgtagtataatcatcgtcgtcgatcgtgtgtttagtgaagaatcagatgatgaggcgagacacaacacaatcgattgtagtgtgtcctgctgcatctatgtatttattcatgtactaagtactatatatatatataagtgatgatgagattgtatatgattcagttcgacaaatacattcttcagtagtttctgagnnggtatatttacttaaggtanaaaagaaaggccgcccgctataaagcat

SEQ ID NO: 3038 - DNA, 1031 bp, Zea mays
  Clone ID: TF_ZmC39729_1
cgatgcggtaagagctgccgtcttcgctggctcaactacctccgcccggagctccggcacggcggcttcaccgacgaggaagacagcctcatcttgtctctctacggcgagattggaagcaagtggtcggtgatagcgtccagactccccggacggacggacaacgacgtcaagaactactggaacaccaagctcaagaagcggtacttggcgtcgtccacgtccacgggagaagcaaggccgccgccgccaccaccagctcctcctagcgctagcggcgacgacagcagcgccgccgccgacagccaccaggcccaacaagacgaaccctctcttccgctgacacctccagccttcagtaccgacctcgatacgacctttgccgttgtcgacgacgacatgctcctcttcaagtccgatcagctgtacgccgagctcgtgggtctggtcgagaagaaatcgcaggccacagctggcccgtccactggtggtggcggggacgaggctaattcgacggccacgccatcgtcctcgtcgtatggaactgggacaacaaacagtcccacggttagcagcagctcaggtagctgcgccctgtggcccacggacgtgcatggcacaacgctgctgtccgaacccaccagcagcagcctgttcgacgacgcttacggtgttggcgacgacgcgttcggagcggcggctctgcctgcgtactccttccaagaccttctggcctcgtcttacgacgatgctactgctgcggtggtgacgcaggagttgatgcagtactaccagtagtagtagtactgtaggcatgtggtcaatctggtgtgatgtgtaactggttaattagttactatatggccagtagagatggtaggtgctaggcagtggttagacgatgaagacggtgatgacggtaaaagacgtcaccatatggtcacaccccctgtcaaaagattacttgaggtcgagagcagaaagattaaatataatggaacctcgatattcaaaaaaaaaaaaaaaaaaaa

SEQ ID NO: 3039 - DNA, 962 bp, Zea mays
  unsure (1)..(962): unsure at all n locations
  Clone ID: TF_ZmC689999_1
catgtactaacttgtcacanaaaaagacatatggacggaggaggaggacatagtgcttatccaagcccacaaatcctttggaagccactggtcaacaatagcgaagttcctcccaggctggccagagaacgccatcaagaaccactggaactcaaccaagcgcagcctaggctcaaagcgccgactgaagaagaagaagagccaacaagcgccacccgggcagctctccgtcctggaggagtacatccggagcctggaatcggactccagttcggcagcaccaccggcggcaacgtccagaccagccatcggtcgtccgaggagggccgtccacacatcggcggtgcctgagatggaactgcacctcagtgcccccaataaccaagatgcaccggtgcgccaccagccccgggccatcagtcaaggcaatccgatgcttccagacctgaacgtcagctatgatccagaggagacgcactatatggggtaccctatgtatgatcccgcggcggcgccgcagctacagctggttagccaagagccccggcaagccaccttcacttggctcccgtttggtggacctcgcatggcgctgaacggagagcacgcatctggtccgtcgtcgtacgacgtcggtggatcctccggcaacgccggctactacagtgaagcagggccaagcaacgtcggtggcagcggtggtgacggccaagctgatgacgacaccaccaacaatgacgaccttgacctagcgtcgagggagttcttcatgccctcctgtgacgaggtgcgtcttggcttggccaggttcaagtgagctaggcagacgaccgggggctccggccggttgttgcttcgctacctattttgcaaaatggtaagagtatcttggtgtgcatgagtggcagaacactcgtactttaatgatttagaactccttttgtgagccgtggattttgttt

SEQ ID NO: 3040 - DNA, 1145 bp, Zea mays
  Clone ID: TF_ZmC10631_2
cccacgcgtccgcgcgctagctagctagctgttggcttgagatcgatccgtcgactaagctatagctagcagccatggggagggcgccgtgctgcgacaaggcgagcgtgaagaaggggccgtggtcgccggacgaggacgccaagctcaaggcctacatcgaggagcacggcaccggcggcaactggatcgcgctaccgcacaagattgggctgaagagatgcgggaaaagctgcaggctgagatggctcaattatctgaggcccaatattaagcatggtgacttcacagaagaagaggagcatatcatttgcagcctctacattagcattggaagcaggtggtccatcattgcagcgcagctgccggggcgaacggacaacgacatcaagaactactggaacaccaagctgaagaagaagctcctcggaaagcgcgcgccgtccaggcgcgcgaggacgaaccaggatccctgctacctcgccgcgggagccgccagcagcagcagcagcagcgccgcgacggccacgcaagccctaagcgcgtcggctctcgagcggatccagctccacatgcggctccaaggcatctacggcgcgttagcttgcaacgacgacagcaacgctgccttcgggtcggcggcggcggcgctgccgcagtggccgaagcttgaggcgctgtcgcaggccaacaggctgctcccggggtcgctgccggcggacgccatggccacaaccgtgagcgtgcagccgcacccacagcatctggtcgaggtcgaccaccaccagagcctcgccgccgccgcactcgagggcgagcaacagctcagctctgccggtgaaggaggctttttcgagcggcccaaggtagatttttactctccatcagccgaggtcgccgccgccgccgccgccagcgtagagatgaactcggtcgccccgatggttgttggcggctacgcgggcgccgccggattcgggcctcagcaccatcacgacgagctctacgactttctgtacagcaagtacggatcagtgggcgggctggcgcacgacggcgggcatgttccaacgttgccggagctgcagtgcccggacggcgctgccgccgtcgtcggagccgacgagaagttctcggcgtggacc

SEQ ID NO: 3041 - DNA, 1822 bp, Zea mays
  Clone ID: TF_ZmC344_1
gtctgaaaaaatacttatatcgttcaatacaatcttccagctactactttgttctgaacctttcgccatcttcttggcaggtaagcagaagcctggctagctggcctctggtatgtggttggccaaggattacaggatttcaattagtaacaatcacgatttgttagcatacaaggtgcagcatttcaattagtaacaatcacgagttgcattacaatcttgatcctcggtgaggtctccccgagggctcgagcaggggaatggtgcatgcaaccaggctcagggcacatgtacacctggtggcgctatctcacgcatcaagggaggttgtggccgcggcggtgcaattgcagcactagttctgctagaagcccttgccgcacaccttgcacacgaagcggttcgtggacagcagtgtcctcggcgagagcgcaatcgcccggatctggagtcttggggaggttccgcttcttcttgaccggagccggaacagcagccaccattcggctcgagtcgcggagctacctcttctgccgtgtcctgcacagccgccgcttccgcaccggttccgacggagcaaaggcgaaagcgacgaagtagcaacaagcaaaagcccagatcgataatacgatggggcggtcgccgtgctgcgagaaggcgcacaccaacaggggcgcgtggaccaaggaggaggacgagcggctggtggcctacgtccgcgcgcacggcgaagggtgctggcgctcgctgcccagggcggcgggcctgctgcgctgcggcaagagctgccgcctgcgctggatcaactacctccgcccggacctcaagcgaggcaacttcaccgccgacgaggacgacctcatcgtcaagctgcacagcctcctcgggaacaaccaaaccaagcaagcaagcaagctgaagaacgtcctccggttgttgccttgcctctgcctgcaggtggtcgctcatcgccgcgcggctcccggggcggacggacaacgagatcaagaactactggaacacgcacatccggcgcaagctgctgggcagcggcatcgaccccgtcacgcaccgccgcgtcgcggggggcgccgtgaccaccatctggttccagcccgacggaatcgagcccgaacaccgccggcgccggcgccgaagcagcagcagtggtggcggcggccatgaccaagacccgctggtgaagtggcttttggaagaggagcctgccaccgtcaaggcgcccaggtgccccgacctcaacctggacctctgcatcagcccgccgtgccagcatgaggacgacggcgaggaggaggaggaggagctggacctcatcaagcccgccgtcgtcaagcgggaggcgctgcaggccggccacggccacggccacggcctctgcctcggctgcggcctgggcggacagaagggagcggccgggtgcagctgcagcaacggccaccacttcctggggctcaggaccagcgtgctcgacttcagaggcctggagatgaagtgaacgaaacgaagcccacacgtcctttcttctccttttgttgtcggttgtagtcttggcttgttggatttggatagagctagttggttactagttgttagttagaagatagtgcaggatgatcactagctactggctacctcgacacagtagctgctcccttctcttccattctatgtaaaaaagaaacaaaaatacttagggggtgtttggtttctagggactaatgtttagtccctacattttactccgggttgcttcccggattctttgtgttgtaatgtaactactactactacaagtagtagg

SEQ ID NO: 3042 - DNA, 129 bp, Zea mays
  Clone ID: TF_6165795
ctcaactacctccggccaaacatcaagcacggcgggttctcggatgaggaggacatgataatccttagcctctacatcagcataggcagcaggtggtcgataatagcggcgcagctgccgggaaggacg

SEQ ID NO: 3043 - DNA, 2059 bp, Zea mays
  Clone ID: TF_ZmC1296_1
actttctgtgctatttgacgaatataaggatgcacaacaaacagcctagtgcacttgacattaagaattagtgaattactccattcgctggggcaagatgttccagggtctggtggttctaactggactgaccatgagacattgcttcttttggaagcgttagaaattttcaaaggaaaagaatggcatgagattgctgagcatgttgctacaaaaacaaaagaacagtgcatgttacacttccttcaaatgccaatttctgaaccgtttcttgatggcgatgatttcaatgaaacaccccagaagatcacaaaacaggattcagcagaaactggtccttctgatgtacctgacaagatggatgtagatggtaatgcggaaggaaaagagagcactgatgaaaaagcttacaagaaagcagattccagttccgcagaaacaagaacaaaattagctgaccaaaatatttctgctaaagaggatactatgaaattaggtgatgatgacctagttgcttccattgttgatgaaccaaataaatcttcattggtggatcctgcacataagaagaattctgctaatgctgatgtctctggggaacacccatccaactttattactaatatcctgagatccacttttgaagcagttgaccactttctgggtaaagaagacatgggttcgtttgctgaagcaggaaatcctgtgatggcactggctgcgtttcttgcttctcttgtggaacgtgatgatgctgtttcttcatgttgtagttcgttgagagctatatcagagatgtctcctgctctccaactggcaactgaacactgttttattcttccagatccaccaagtgacctcaaagatccggcttccactttcagcccttgcgcaggcggtgagagccaagaaggtgctgatactactcaaaatgtgaatgataccgataaaaacaacagcgaaagggaagatagtgatttagctctggagaaggagagtgctacattcacctcacagaagcagcacctggaagaattatctgacgcaaaggaaacatttattggaggtcctgaggcagaggccaaatccaacagcacaaaggattctgacaatccaattgctaaggtggggagcagtgtagcatctgacaagatgagagatgggtgcaatgctaatgccattccgtgtcctgctacttcaaatcatacaactgaacccagctccgtagcttcccaggaagccagtccagcaagtacaaaagacacagctatccctgaacaagttgaaagaccaagttctgaggaattactagctgatgtttcacttccacaagggaaggtagagccgaagaagactgaacctgcacctgctgcctcgtctagtatccaacagcatgggtgcaaacaagctggaaatggcaacactgaacctaaaagcaaggaaaacgctgcggccgatgatgaccccataacaaggctacagcgagcggccggtactgccatttcggcagctgcagtgaaggccaagttccttgtggagcaggaggagggttacattcggcagctagctgcacttgtgatcgaaaagcagtttcagaagatggaaacaaaaatgtcgtttctcaccgaagttggaaacctggtgttacgatcgagagatttgacagagaggatgcggaagaagcttttgttggagcggagcatgataatcgcttctcgaatgggtgcagcagcggcttccagaacaatccagcacggggctccggtgaccaccagactcccagtagggcatgtgcatgccttgaatccgcagctgaggcgcccttgaagctttttatagtatgtatatgatcagtaagactggcctatgtaggaggtgtgctaatccgcctctgtataaaatgcagtgtactgtagacgcgtctagggttctggagtcagtaggctttgatgctcaccacaccacacgacttggcttttcttttccttttcgtttaaccaagagttttcttctttgatgtcttacctcgccaccgccatacaatgacatgtgtttgaac

SEQ ID NO: 3044 - DNA, 1519 bp, Zea mays
  Clone ID: TF_ZmC337_2
ctgaagctgggtagctcctgctcctatcccggctgctggcgcgccgtggttttgtgctcttgtggacacactggcctccacccatccctctcacgtctctggccatccgcagccaaggcgcgcggcccatcgtcgatttatagccacaccatggccaggaagtgctcccactgtggcaactacggccacaactccaggacctgcggactaggactaggactaggacacagagaaataatgctctgcgaaggtggcgacgacaataatggccgcagcggcctaaggctcttcggagtgcaggtccgtatcggcggcggcggtggcgcagggtcggcgtccatgaagaagagctacagcatggactgcctgcagctcgcggctcctcatgcttgttcgtccctcgtctcgtccccgtcgtcgtcgtcgttgtgctcgtcctcgtccccgtcgtcgctgctgctgtcgattgatgatgggttgcagagaggggcggccgatggatacctgtctgatggacctcatggcagagctgtgcaggagaggaagaaagcaagtaacaatgaagcagctgagactgagagatactagtgcttcccttgctttgactaaatcaactcgcagcctgtgagttccatggagcgaggaggagcacaggcagttccttgccggcctggacaagctgggcaagggcgactggcgaggcatcgccaggagctacgtgccgacgaggaccccgacgcaggtcgccagccacgcgcagaagttcttcctccggcagagcagcatggggaagaagaagcgccggtccagcctcttcgacatggtgccgatctgcgagaacagtgcgagcatctccgatccgctggacgtggcacgccatggcgtcgcctcggcagactccgagagggcggccgtggacctgatgaattcgacgacggagggtgacgacggcaggagcagggacgtcgtgtcgtcggcgtcaggtgcagggaccgcactgcggttcccggcagcggcagctcagacggagccgctgcatccttcgtcatcgcatggccatgggcgcggccaccactgctctccgttggacctggagctgggcatgtccctgcccgccccatccgtcggaacgtgatggagatgaggcgaggccgaggccgtgcgtgactgctgtctccctcagctgtgtgtgtcagccagatggagatgatgcgctagccaatacagtactgttcgtgatcgtgaaaacggtgtgcaaacactagcacagcggcactaaactaggatgtcgctcctcgcaccatattgtgtactgtaaccacgttgatccacatcatctctatctcttcaccaccgttggatcataggctgtcagtttcatctatccgtccatgtgtcatactcattcacgatgcggtggcttaatgatccagcagtaatttttcttctttcgtgacttaagggtatatacggtggtatttaatgtagaggcttttgatgtatttaaaggggtatttgc

SEQ ID NO: 3045 - DNA, 634 bp, Zea mays
  unsure (1)..(634): unsure at all n locations
  Clone ID: TF_ZmC39713_1
ggacggcgcaggaagacaagctgctggtcgagtatgtcaggcatcatggagaagggaggtggaattctgtcgccaagttaactggtctgaagcgaagcggcaagagctgccggctccggtgggtgaactacctgaggcccgacctgaagcgaggcaagatcacgccgcaggaggagagcgtcatactccagctccacgccctgtgggggaacagatggtcgacgatcgcgcgcagcctgccggggcggacggacaacgagatcaagaactactggcggacgcacttcaagaaggccaagccgtccaagaacgtcgagcgcgccagggcgcggttcctcaagcagcgacgcgagatgcagagccagctgctgctgctgcaggggcaagatcagcatcggcaggaggaggaacagcccgatcatgacgacgacggcgccagtgaggcaacgccgggtgttccactggaggaggaggaggagcagcagcagcagcagcatgaggacctgcggatgatgctgcagcaggacatggacgacctgctgttccagttctgcccgatggcctcctgcacttnctcctcctgcctnctncccggcggcggcagctgcgccttcgtcgtcagcgcgtcggcgag

SEQ ID NO: 3046 - DNA, 1594 bp, Zea mays
  Clone ID: TF_ZmC1193_1
cgcagactcaggggaggcgcgcgcaagcaagtaccacgagggagcagcgggcaggcaggcatgcggcgctcgagccggccgggctgcgacccttgggctcgcaatcgcagcaattgggtacctcgaggccggccgggtgcctatgcctatctataaaatcccgcttcgccacacacccttggccttggcctggcgctcgcacctcacagcagcagcagcaacaacaacctccactgccgcaacccaccgagaggcgagaccggcggcggcaaaaggacgatacaaaagcagccagggttgctggcaacagcgtcggtcgcccgcccgctcgccatggggaggtcgccgtgctgcgagaaggcgcacaccaacaagggcgcgtggaccaaggaggaggacgagcgcctggtcgcgcacatcagggcgcacggcgaggggtgctggcgctcgctgcccaaggccgccggcctcctgcgctgcggcaagagctgccgcctccgctggatcaactacctccgccccgacctcaagcgcggcaacttcacggaggaggaggacgagctcatcgtcaagctgcacagcgtcctcggcaacaagtggtccctgatcgccggaaggctgcccggcaggacggacaacgagatcaagaactactggaacacgcacatccggaggaagctgctgagcagggggatcgacccggtgacgcaccgcccggtcacggagcaccacgcgtccaacatcaccatatcgttcgagacggaggtggccgccgctgcccgtgatgataagaagggcgccgtcttccggctggaggaggaggaggagcgcaacaaggcgacgatggtcgtcggccgcgaccggcagagccagagccacagccacagccaccccgccggcgagtggggccaggggaagaggccgctcaagtgccccgacctcaacctggacctctgcatcagcccgccgtgccaggaggaggaggaggagatggaggaggctgcgatgagagtgagaccggcggtgaagcgggaggccgggctctgcttcggctgcagcctgggactccccaggaccgcggactgcaagtgcagcagcagcagcttcctcgggctcaggaccgccatgctcgacttcagaagcctcgagatgaaatgagcgcgcttctaccctctctgtgtagcttctccccccccgtcgtcctcgtttttgttttgccacacctcacatggatgatgaattgatgatacgtggttggttagttttttcgtaggtgaaaaatacgcgatggtgagcgagtgaaagagagattttgtgccctgggtcctcctccctgctctctcttgctgctccattttgcctccctctgtcctctctctctctctctctctctctctctctctctctctctctgtatctctgtaattaccatcgccaaatgatcatgggggcaatatcatgctaggtctctggaaattgacgctaatcccgtttccaggaaaaaaaaaaaaaaaaaaaaaaaaaaaaaaaaaaaaaaaaaaaaaaaaaaaaaaaaaaaaaaaaaaaaaaaaaaaaaaaaaaaaaaaaaaaaaaa

SEQ ID NO: 3047 - DNA, 788 bp, Zea mays
  unsure (1)..(788): unsure at all n locations
  Clone ID: TF_ZmC91622_1
cgggatcccaacatcgtggnttatacaataacatcttgtgtagtactcaatcctcaactctcatggatcccaacttcaatggtgtgtggagtgcctccgagatggatatggcgaagtcactcatcccaagtcaaatcaccaacaaaacctacacaaacgacatggagacgaagcacattgactttgtggatgatctccaagcaatgttcccatggaaggagaagcaccaggtaaccaatttatatgttgagctactagtggagatcatgagggcacagagcaacaaccaacatgttgtgccaagtagcgtccttgtgaatgataactttgggatgctgtcaaaacccatggacaacatgaaagtgatagaagggtatctaatggatgagatggaggccatgaggattctagaggagcaaccaaatatgctgaatgtcattcataagaaaaagaggcatggagtgaagttttggaccacagacgagcacatgaattttcttcgtggtctggaagcatttggccgtggtgaatggagtaacatctccaagtactttgtccccacaaggacaccagtggacatctctagccatgcacagaagtattttcgtaggcaggagtgcaccacaggaaaacaaggcttcaacatcgacaatgttagcttctatggcacacaaccatgggtgcaaaacaacccttccagctgtgaagcgctcaccttcactggtnggtgcttacaacacanactacaatgacttagacgagaaacatgttggctttcacagcttcgc

SEQ ID NO: 3048 - DNA, 1375 bp, Zea mays
  Clone ID: TF_ZmC659_1
ttcgaccatccacccttccgcccagcacgaccaggacacagtgctccctccccaaagacaaacaggcgagcagcaaacacacacgctcgaaccgagacaagccaatctaataatggggagggctccgtgctgcgagaagatggggctgaagaaggggccatggacgcccgaggaggacaaggtcctggtcgcccacatccagagcttcggccacagcaactggcgcgcgctgcccaagcaagccgggctgctgcggtgcggcaagagctgccggctccggtggatcaactacctgcgcccggacatcaagcgcggcaacttcagcaaggaggaggaggacgccatcatcagcctccacgagcagctcggcaacaggtggtccgccatcgccgccaggctgcccgggcggacggacaacgagatcaagaacgtctggcacacgcacctcaagaagcgcctggatcccaccaagcaggaacagcagcagcagcacgggacgacgccggcggctggcgccggcaagaagcacaggcccgcggcggcggcgaagcgcgggggcggcggagccaggaaggcgacggccgacgccgtcgtcgtcccggccaccgctgcgccggcgtcgcccgaacggtccgcggcctcgtcgtcggtgaccgagtcgtccatgacggagcaggagcaggagcacggcaacacggggagctcgcccgcgttccccaaggaggagagcttcaccacctcctcctcggacgccgaggagttccagttcgacgacagcttctggtccgagacgctgtcgatgccgctggacagcctcgacgacgtcgtccccatggagccctccgacgacgcgttcggcgacgtcgacgtcgacgtggccgccgcctcctcctcgtccgtcggcgccgacggcgacctggactactggctcagagtgttcatggagtccggcgacgcgcacccagaactgccgcagatttagaccgctcgcgcgagaattttcggctcctaattgattcatcgttcttttgtctctatctctctctctctgcacgtcttgcatcggaggggacggacaaggacagcagcagctgattaacagagaaggaaatcaggcagaaacaacgcgacacgccgttgcaacttggatcgatcttgtttgccttcttgttgtatagatactagaatccatccaagcctatgcgttctgagaacagaagcacgctgtgctgtgcatgcagattcccatgtatgtacagtagccacggccgccgccagaacagaaatggatccggcctcttccaaattccattcgtttgagagaaaaaaaaaaaaaaaaatgcggccggcctctaaaaaaaaaaaaaaaccaact

SEQ ID NO: 3049 - DNA, 1169 bp, Zea mays
  Clone ID: TF_ZmC659_7
gggacctcgagccggccccctttgcttcgcacgacgaccaggacacagtgctccctccccaaagacaaacaggcgagcagcaaacacacacgctcgaaccgagacaagccaatctaataatggggagggctccgtgctgcgagaagatggggctgaagaaggggccatggacgcccgaggaggacaaggtcctggtcgcccacatccagagcttcggccacagcaactggcgcgcgctgcccaagcaagccgggctgctgcggtgcggcaagagctgccggctccggtggatcaactacctgcgcccggacatcaagcgcggcaacttcagcaaggaggaggaggacgccatcatcagcctccacgagcagctcggcaacaggtggtccgccatcgccgccaggctgcccgggcggacggacaacgagatcaagaacgtctggcacacgcacctcaagaagcgcctggatcccaccaagcaggagcagcagcagcagcacgggacgacgccggcggctggcgccggcaagaagcacaggcccgcagcggcggcgaagcgcgggggcggcggagccaggaaggcgacggccaacgccgacgccgtcgtcgtcccggccccggccccggccaccgctgcgccggcgtctcccgaacggtcggcggcctcgtcgtcggtgaccgagtcgtccatgacggagcaggagcaggagcacggcaacacggggagctcgcccgcgttccccaaggaggagagcctcaccacctcctcctcggacgccgaggagttccagttcgacgacagcttctggtccgagacgctgtcgatgccgctggacagcctcgacgacgtcgtccccatggagccctccgacgacgacgcgttcggcgacgtcgacgtggctgccgcctcctcctcgtccgtcggcgccgacggcgacctggactactggctcagagtgttcatggagtccggcgacgcgcacccagaactgccgcagatttagaccgctcgcgcgagaattttcggctcctaattgattcatcgttcttttgtctctatctctctctgcacgtcttgcatcggaggggacggacaaggacagcagcagctgattaacagagaaggaaatcaggcagaaacaacgcgacacgccgttgcaacttggatc

SEQ ID NO: 3050 - DNA, 716 bp, Zea mays
  unsure (1)..(716): unsure at all n locations
  Clone ID: TF_LIB4759-123-Q1-K1-E10
ccggccgggcttcatctcttctcctcacaaggcttcctgccttcctcccaccacctccagtcctccaccggaccaccacctccaccactcctctctcacgacacgcgcaaaccgctcgaaccctagctggcggcgggaggcggaggtggctccgggatgacgcggcggtgctcgcactgcagccacaacgggcacaactcgcggacgtgccccaaccgcggggtcaagatcttcggggtgcacctcaccgatggctcggccatccgcaagagcgcgagcatggggaacctctccctcctctccgcgggatccaccagcggcggcgcgtcccccgccgacgggcccgacctcgccgacggcggcgggggctacgcctccgacgacttcgtccaggggtcgtcctccgccagccgcgatcgaaagaaaggtgttccttggactgaagaagaacaccggaggtttttgctgggattacaaaagctcgggaaaggggattggcgaggaatttctcgtaattttgtggtctcaagaacacctactcaagtagcaagtcatgctcaaaagtatnttatacgccaatcaaatatgagcagaaggaagagaaggtctagccttttcgacatggttcctgatgagtccatggaccttccgccccttcctggaagtcaagaaccagagacctncatgttnnaatcaccgccactgcctcctgctgg

SEQ ID NO: 3051 - DNA, 871 bp, Zea mays
  unsure (1)..(871): unsure at all n locations
  Clone ID: TF_ZmC19315_1
ccgggttcnacccaacgcgtccgcccacgcccgtccggccgatcagcgagcgggcctctgggagaggtagggagccatggggaggtcgccgtgctgcgagaaggggcacaccaacaagggcgcgtggaccaaggaggaggacgagcggctggtggcgtacatccggtcgcacggggaagggtgctggcggtcgctgcccagcgcggcgggtctgctgcgctgcggcaagagctgcaggctgcggtggatgaactacctccggccggacctcaagcgcgggaacttcaccgacgacgaggacgagctcatcatccgcctgcacgccctcctcggcaacaagttcgtggtctctgatcgccgggcagctgccgggccggacggacaacgagatcaagaactactggaacacgcacatcaaacgcaagctcctggcccgcggcatcgacccgcacgcgcaccaccgcccgcaggcgctgcaccacgtggcagcagcagccctcgtcccggcccccgccgcgaagccgaagccgaagccggcggagtcgtccgacgacggcgggcgcagcagctgcagctgcagcggcagcggcagcagcgcgggggagccgcggtgccccgacctcaacctcgacctgtccgttggtccgccggacgcgcccacctcgccgccgccgccgtgcctgtgccaccgcgcctgggaagcgtgcggctgccaggcaggctgacggctgaggcagcaagagttcagattttttttttgttaggcagttgaaacaaggctagtgtgaaccgagaggagatcagtagctaggacactgtctcagagaaagaaagaaaaaaaaaaccaaaaggattcttgaatatctggctc

SEQ ID NO: 3052 - DNA, 837 bp, Zea mays
  unsure (1)..(837): unsure at all n locations
  Clone ID: TF_ZmC178558_1
ctccgctgatcaactacctcgccccgacatcaagcgcgcaacttcacccccgacgagangccctcatcgtccgcctccaccgcgagctcggcaacaggtggtcagcgatcgcggcgcagctgccggggcgcaccgacaacgagatcaagaacgtgtggcacacccacatcaagaagcgcctggaggacggccacggggaggagaagaaggcgcgcaaaggcaagcccgccgccaagaaggccgccgacgccgtgggccgcagcagcgagcacgggccgttcctgaccgcgtcgccggggctgtcgagcagcggcgtcacgttctccgccgcggcggactccgccgcggccgtgtcgtcgtcggccgacaacgcggccaccaccagccaccacccgcagcaggtcggcgccagcaaggcggagtcgtcgacggagttggacagcggcctcagctccgccgagttcccgcccctcgacgacagcttctggtcgtcggcggacgtcgtggacatgggcctcggcgccacggacgaggagctgggcctcgcgtgcccgccgccgctgtcgtcgtcgtccaccagggacgaggacatggagttctggctcaacatgctgctggaggccggcgacatgagggacttgagcgtcttgtaactaggatgcaggatcggaagcctcaggcgcctgctatatctgaggactagagcatcgcatcttctttcttttttcttgtcatcttgttgccctgttttctggtgatgagaaaatgctgagaaactcggtcgggtgattttcaccttccgtacaagaaagaatactagcatcaaccaaaaaaaaa

SEQ ID NO: 3053 - DNA, 1133 bp, Zea mays
  unsure (1)..(1133): unsure at all n locations
  Clone ID: TF_ZmC2063_2
gccaatcgtgtaatcttttttacttagctggcttgagtacaaagtaacaatatttcttgatataggaaggacgaactgtcgggagttccttgtagtagtttatggtagtgacgttgcagtaatagcgtaccagcagggggggctctgaagcccaccgacggttgatgaagggacacaaattctaggggaggcgctgataagacacaaggacacacgttttctacagagaagcaaagggaaaggctaagacgctcccacagccacgagctttaaaagaaggagaagagagtggcccttaaccctaccgttctcttctccctaatcctggtaatcagtagtagccactagcgctgctgccgttctcttcccctacccgacacaagctccaccacctctatctaccacacgccaccactgtaggagctcctccacgatcatcccgccctagagccataataattcgttgaagaggagggggttcttagaaccagagggcggctacctgtgaaggatacccgtgctgctggctgctgctgttcctcgagctagagccgtgtgtgggctgtgcagattgcagagcgcagcttccagtctcagcattgctttcaatggggaggcactcctgctgttacaagcagaagctgaggaaggggctctggtctcctgaggaagatgagaagctcatgaaccacataaccaagcacgggcatggctgctggagcactgtccccaagcttgcaggtacaaccatcaaaatcaaaatcaaatcctgcacgctttgctctaccttctcaattgtccatctccactgtttcctgctgcttctccaagggcttcagaggtgtggcaagagctgcaggctgaggtggataaattacctgaggcctgaccttaaaagaggtgcattctctgaggaggaggaagacctcatcgtcgaacttcatgctgtactggggaacaggtggtctcagattgcaacaaggttgcctggaagaactgacaacgagatcaagaatctctggaactcgagcatcaagaagaagctccggcagaaaggcattgacccccacaccccacagccgctccttgtcgaggttgaacgcagcanagcagctcccacgaccagtaccgag

SEQ ID NO: 3054 - DNA, 1456 bp, Zea mays
  Clone ID: TF_ZmC3487_1
cagagcactgcctgttgtttcttcttcctcctctctcccctctcgatcgatcgatccaacaagctgagcttggtctttgctttctagctgcctggtacggtctagcgaccgatcgatcgatcgaccatgtcgtccttgctatgtattagccgcaggaacaacaagaaggacagcgatggcgatggagagtacggtggcgagcagatcatcatcagcacgggcggcgcggccatgaggaagggcccgtggacggacgaggaggacgagcagctggtacggttcgtgcgcctgttcggcgaacgccgatgggatttcttagcaaaggtgtcaggtttgcgcggtggcgggtgcgtcgaccgatccgcctccatgcaactccgcatgcacgaggagggtcggtcggcctcgatcgagcagctagcagtgttcttaaccgtttgcttcttcttcttcctcctcatctttgtcgcgtatctgcgtgcggctcttgtggatacggacggcgacgtgcgtgcaggtctgaggcgcaccggcaagagctgccgcctccggtgggtgaactacctccacccggggctccggcgcggccgcatcacggccgatgaggagcgccgcatcgtggagctccacgcgcagtggggcagccggtggtcgcgcatcgccaggagcctgcccgggcgcaccgacaacgagatcaagaacttctggaggacgcggaccaggaagaaggcgctcgaggagaggagggctgccgcagcagcaacgtcgacggcggcggagtcggcgtcctcggtgatgacggtgtcgtcgtcgtccgagtgccgccgcccgcccgtatcgtcgtcgtcgtcgtcgtcttcgctacggcgggacgaagcgcggcgcagcggcgacgagaccgaggaggcgtccacgcccaccgcggcgccggcgaccaagcacgatgaggaaccccagccgcagccgcaggagtgctacgacttccccatggaccagctgtggaacgagatcgcggcagccgatgcggcggcgatgagctaccttgtcgtggacgcctgctggggcggagctgctgttggtggtcactgttattactacggcgccgccgcagcctcagccgcctcgccgccgccgccggcctcgccgccgtgggagtactgcggctccgatttttcgctgtggaggatcgacgaccaagagtactacaagaagatgctcgactcctcctcctgatcccggcccgcgactcatatcgtttggcgaggacacacgtacatacgcgctctgtgaatttgctagctcatatatattatccaggcgaggcgaggaacgagctgagatcatggtggtgagatgagatgagatgagatgagagagtagtgtgtattaatggtggttcagatcgagtagtgtgataaattaacagaatatatataataatttacgcttctctccg

SEQ ID NO: 3055 - DNA, 3318 bp, Zea mays
  Clone ID: TF_ZmC344_4
tcgcggtcgcgaccaagcgacgacggcgaggtagggaatctaagcggctgttacccatgctagcagaccctcccaccgcaatcggtcagcgtttgcgcacgaagattagcaacggggcctctacatttatgaagagtaattacaatcgacgctcgcgtaggtgatagggtcagaggtttcccgtctgtagccagaaaagctcccgctagaagatcaaagaatcctgccccgccggccctgcgtggttggaccccggttcaaggtctgtcaattaggacctgacaatgcgagcaagccgtccgactcaagggtcgacctaaaccccggcggaggagttgttgcttcgttggtggcagcatcgccgcggctgtcgatcggggaagtaaaggcgcgcgtagcatccaaggaccaaggtcgttggctactagtgcccaggtgcatcgagccggagctaggagcttgtgcgtgtgggaagaggtccgcagcctaccggggggaccgccgccgctgagcccggccccgcccaggccgaatcccgcccgaccctcgtcctccgcactaacagtaccgcaggcgccgagctgggtccagccgacggccccaggcaaggcgaccaggtgccccgacctcagccgggacctctgcatcagcccgccgtgccagcatgagggcgacggcgaggaggaggaggacgagctggacctcatcaagcccgccgtcgtcaagcgggaggcgctgcaggccggccacggccacggccacggcctctgcctcggctgcggcctgggcggacagaagggagcggccgggtgcagctggagcaaaggccactaattcctaaggctccggagccccgtgctcgagttggaagccctggagacgaagtgttggaaacgacgcccctacatcctttcttctcgcttggtggtgggcctacgtgatggtacgctgactttggtgtcgcagattcagttaccattagtagctgggcaagctatcaaaaggtgaaaccgtctggtcacgtcgtatccatacaggtcattcatatatagcagtcgcaactcacaactcgcacgtagagcgtagaggttcaaatctgagccttagttcagaatgcagcttcagtttgggagttcgttcgtgcatagcaggccctatagctggggttagtcgtgtgcaaggattctccatgtggacaacacaacacaagcaagcaagctaatataaggttggatttaaaagtcgcagaacaattcatgacgtgcttggaaaacgttggtagcgtcttttaatgcttgatctaaaggctaagttatcatccatgggctaggtttgtttgttagtattaccctgtccagtgcaagggcaggtaggaggtagagagagaccgagcaagtactaacctttcatggccccggtctgcccccccagctccctctttcccttgggggccgctgtgtgctccgtcgccatcgcgggggataaaaggaaaaggctccgaggaaacagtataaaagcgcccccggcacgcacgcacgcacgcaggctcactccacgcagcagttgccaggcgcttgtcactccagccagcggcagcccttttccttggcgaggcttggtttagtttagcccgcctgcggtctgccgcctgccaagtgccacctgacacccgatagccgcaaccgtgagaggctggtagcccgtagccggcatccctcgccctcgacccatttgaacagggcctcgagctttgcctctgctgctgctcgcttgatccgtctcttgccgtggtacgcgtgctcgatcggcggatcgtcggcggcggcggcgggaagctctccgacccgcggccgggatgggtcggcagccgtgctgcgacaagttgggggtgaagcgggggccgtggacggcggaggaggaccgcaagctcatcaacttcatcctcaccaacggccattgctgctggcgcgcggtgcccaagctcgccggcctgctgcgctgcggcaagagctgccgcctgcgctggaccaactacctccgcccggacctcaagcgcgggctcctcacggacgccgaggagcaggtcgtcatcgacctccacgccaagctcggcaacagatggtcgaagattgctgccaagctaccgggcaggactgacaacgagatcaagaaccactggaacacgcacattaagaagaagctgatcaagatgggcatcgatccagtcacgcacgaacccctcgaccggaagacaaccagcagcggcccggctacaacctctcagtcaaccaagtctgacgaggcgaccaaggagcagagcccgcagaacgacgacgccgtgataagggacgtgccggccgatggttgcagcccgacggaatcgagcacgaacaccgtgagcaccggcggaagcagcagcagtggtggcggcggccatgaccaagacccgctggtgaagtggcttttggaagaggagcctgccaccggcgacgaggcgtggctgaacttcactggcagtgtcgacgtggacgagttcagcagcattgccgccggtccggagttgttgccgtgggatggcgcgaccgactggctgctcgactaccaagattttggattgggggactcgagcttggtcgatggctacatggtcaacaacaacagctcaaacggagcaaagttctagctagctagccgaagatgtcatctcatctgcttgtgttgctttgctgccagtgaacgtagatacgtaagtaataaaagcattggtatcgaggttgtcaaaggtggatgaccacatcgcaggaagatcatgaagagtccttgcacgcactcctgtatctcgaaccaactaacggctgggatgcaattgagaaggggaggagcacaggccaatcaatctcaaagagataaaactggttcttgaagatctcgaagaaagatgtgtttcttcacaatcacaaagagaggttgtagaagttcttgctgttgtatacatggttgcgtatatattgctaaattgtaccttgttaggccattttgttcgcaaattgcacgagtcactaattagtcagcaaaaatgtgtgcataaagaagagcagttgaaatcgcctctttgtacgttgtgggtgacgttcttttagttacgttgtggatgacgttgatgcatttatagggtatttggtttgaggaataagttatctggtttgtagaatggaataagttatccatcatcacctcattaatcatggttagtactaacatgagtaattgagtcattccaccaaaaaaaaaaaaaaaaaaactcgagagtacttctag

SEQ ID NO: 3056 - DNA, 697 bp, Zea mays
  unsure (1)..(697): unsure at all n locations
  Clone ID: TF_LIB5026-024-B1-XP1-G10
gccggccgggccgcgattgccgaaaaactggagggaagatcaggtcgatcagatcggcaagagctgccggctcaggtggttcaaccagctggaccctcggatcaacaaacggcccttcacagaggtggaggaagagcggctgctcaacgcccaccgcgcccacggcaacaagtgggcgctcatcgcccgccacttaccaggccgcacggacaacgccgtcaagaaccactggcatgtcgtcatggcgcgtcgctgccgcgaccgctccaggcaccatgccagggccgcgagctccagctcccctctctccatgaacttgtctccaagagaaacgctacacgtggatatcggcgaccgtgtccgtcataaacatcgccgaaaggattatcacgccggtgacagcgccgacgagccattgaagaaggacgtgcccttcattgatttcctcggcgtcggcatgtcctcgtaattattcatagtattgcattaattcttgaaataccaatcgatgtagatcaacaagtgtatcgatcggcgtttgttggttattagggcattagtagactgcatgcaggagtagtcgtctagaggtatcagatatgcatgcagggttagagagttcatcgtcgttgatggntagggcgttctgatgtgctgattcatcaatccatcaaataaggctccagacacttgagng

SEQ ID NO: 3057 - DNA, 682 bp, Zea mays
  Clone ID: TF_ZmC352107_1
tgcgcttcctcccgatctgcagctgcggcggcagcagcgggggcaacgcgttcgctcggccagagcaggggaggaagaagcgcgtgcggccatggacagaggaggagcacaagttgtttctcttaggcctgaagaaatatggcaagggggactggaggaacatatcgcgcaacttcgttcagacaaggacgcctactcaggtggcctctcatgcacagaagtacttcatcaggctcaacaagaaaagatccagcattcgcgacactaccacagttaacctgacggacgatcagccaacctcgccatcccagtcctctctgatcactgaccagttcagcgcactagctctggcaaccgacgttaaccaaaacagccgtgcgaattcgccctcgatcgaattagcctagatggccggactattgggataagccaacttaaaaaaaagtgggatggggtttgcaagatctagttctgcagtgtggctcattgatatgatcagttggatggaagccagaacatgttgtttttaggtgcaatccagtctgccccatgaatctatcagatgtttagttgtatataaatataatacggccaatctggagaggccgggagtgttttcaagtttgctgtatcgtcttgatgtaataaactttaaatttaataaaatcttcctttatggaag

SEQ ID NO: 3058 - DNA, 1185 bp, Zea mays
  unsure (1)..(1185): unsure at all n locations
  Clone ID: TF_ZmC3476_1
ggcacagcagcaccgactagccaatctctacttgcctacacagcagaaggaaccagacagggaagtagggagagagcatagcaatggtgcggaagccgatccacgctgacgacgccggcgctaagagcacggaggcgagcaaggagaggaaggggttgtggtcgccggaggaggacgagcggctcttcacccacatcacctaccacggcgtctccacctggagctccgtcgcgcagctagcaggcaagattcagttcttgcaaaccgatcgggactctcggtaccggattctatttcagctatcgatcggacagcacaacgcggtatgattaatctcttcttaaatgttcaatgcacaggcctgcggaggagcggcaagagctgccggctgcggtggctgaactacctgcgcccggacctcaagaaggaacccatctccaagcgcgaggaggagaccatcatctccctgcagcagtcgctcggcaaccggtggtcgacgatcgcggcgaggatgccaggcaggacggacaacgagatcaagaactactggaactcccgcatcaggaagcgcctcaacgccgccgcctccagagctgcaggctgcgacggcggtgacagcgcggccgagccatcgggggccgtggcagcgggaggaaaggaggattcggccaacgctgcgacggcggtgacagcacagcctacgcccatcccggcgcggttcccggtcttcgggtgccagctgcccgacggagccggcggcggcatttcgtctcccggcagcggcagcggcaagagtccccagtcgtcgactactgcgagtatgccgcagaacgagggtgacgagagcgaggcgagcgacggtggcggtggcgacagcgacatggtccatttcctctcgttcgatgatctggattatcccggggatttgctcattgatgtgccgggagccatggacgcgtgggagagccaactgtgctatgcgaatccgatgatgagctcgctctgttgatccacactaccaataattgcatagcacagccattgtcttgttcccgctaatcatatataggctgtctgaattatttatgtgaaatttcactgggttttttggacaaggaatgcatgatgacgtgtgggtattcctattaaaaagaaattttgatcaatcgaaattttgnnatcaca

SEQ ID NO: 3059 - DNA, 335 bp, Zea mays
  Clone ID: TF_LIB3245-059-P1-KI-B7
cgcggcgggtctgctgtttctgttgcaagagctgcaggctgcgggggatgaactacctggggggggacctcaagcgcgggaacttcaccgacgacgaggacgagctcatcatccgcctgcacgccctcctcggcaacaagttcgtgagccgtctgccgtctgtcgacgagacagcgtccttcttctctgtgtctacctttattttctcgacggcgctgcctgacgtcacgcgccgcgctcgcaggtggtctctgatcgccgggcagctgccgggccggacggacaacgagatcaagaactactggaacacgcacatcaaacgcaagcttctggcc

SEQ ID NO: 3060 - DNA, 1411 bp, Zea mays
  Clone ID: TF_ZmC1193_9
cggggttatagtttgtttgatggtacgtgctgagcgagccgaggtatcttgagctccaattcattggcgcgcgcgagcccgcaccgcaccttgcttagaacccacttgatcgctgcctcaccttgctcgtctctcacctcacctcacaccagaccagagagtgtagtgtggtgtggccagggctgcggggcagctggttcttggtacgcacgcttcctcatatataccccccacgcccatacatagagctagccacaagcagacaccgatcgccattgcaactggcagcagcgggtcgatcgacgacgacgttgccccccgcagtctcttaatttgtcgccgtcgtcgtcggggcaggcagatcgtcgagagctagctagctgctagcgcgggagggagggagagggagaatgggacggctctcctgcggcggcggtggcggcggcggcgtgcagcccaagctccgcaaggggctctggtcgcccgaggaagacgagaagctgtacaatcacatcatccgacacggcgtcggctgctggagcactgtccccaagctcgcagggctgcagcgctgcggcaagagctgccgcctgcgctggatcaactacctccgcccggacctcaagcgcggcagcttctcgcagcacgaggaggagctcatcatccggctgcacaagatcctggggaacagtggtcgctcatcgcctcgcacctgccggggcggacggacaacgagatcaagaactactggaacacgcacatcaagcgcaagctcctcgcccgcggcatcgacccgaagacgcaccgcccgctcggcgccggcgccgacgccgccgcgccacccggcgtggtcgcgcaccgggcgctgctgcaccgcgcagccctcgtcgagctcgccgtgaagccggcgccggcggagtcatccgacgacgggagccggagcaggggcaccagcagcggggtgcgatgaggcgccagcgtggaggagcgcgggtgccccgacctcaacctcgacctgtccgtgggcccgccaggaccgcggactgcaactgcagtagcagcagcttcctcgggctcaggaccgccatgctcgacttcagaagcctcgagatgaaatgagcgcttctccctctctgtgtagcttctccccacgccgtcctcgtttttgttttgccacacctcacatggatgatgaattgatgatacatggttggttagttttttcgtaggtgaaaaatacgcgatggtgagcgagtgaaagagagattttgtgccctgggtcctcctccctgctctctcttgctgctccattttgcctcctctgtcccccctctctctctctgtatctctgtaattaccatcgccaaatgatcatggggggcaatataatataatacatgctgctaatgct

SEQ ID NO: 3061 - DNA, 964 bp, Zea mays
  unsure (1)..(964): unsure at all n locations
  Clone ID: TF_ZmC1443_3
cggtccggccttcccggtatcggtcattgaaggacttcgtgccaccananaagtgttcgccgtgcataatcacagactatatacattccacagacctgtaaagctctgtgaatttggagctcccacaggttctgcattggcgttgagatggggaggcattcttgctgctacaagcaaaagttgagaaaggggctctggtcccccgaggaggatgagaaactcatgaaccacataacaaagcatggccatggctgctggagttctattcccaaactcgctgggctccaaaggtgcggaaagagttgtaggctgaggtggataaactatctgaggccagacctcaagagaggggcattctcccaagacgaagaagacctcatcattgagctgcacgctgtccttggaaacagctcagctgccagggaggactgataatgagatcaagaatctatggaactcgtgcatcaagaagaagctcaggcagaaaggcattgatcccaacacccacaagccccttactgaggctgatcgcagcggagcagctcccacaatcagcatcgagagaacctcagggtccagcgaagtcaacccatcaagcgctggtgctctggggaacttgagccccctcctcagcgagacggctcaataaacaatgctgatgcacgtgtatgacaagaatcatgctatgtaacaactactattgtgccgctaagttggggtcatttcgtgcttgcttaccaggaccaggtttaattgcaaaagaaaaaatggaagcaaatacactgcaaaagttaaatgttcaagccagtccccagtcattcctactttgcctgaatgtcaaaccaattttctggatgtcaagtgcatatggtcatatagagtaatagagattatcagatgatctaccaaaacatcactatcatcaggatacttatttgtttaaaattacagcaaaacaaaggtg

SEQ ID NO: 3062 - DNA, 1437 bp, Zea mays
  Clone ID: TF_ZmC277_2
cctcgagggctggccgggaagcatcactgactccattgatgtgtgcatctaatgagaaaaaggttcctgtcctgcaccgccttgtcctagacccgagtggacccgagtggctgagtccacctctgatgctctgacctccgcctcctcctttctctcgtcgtcgtctccacgacacctcaaccccaatcagaacccggacccagatctctaaaaaatccccaatcccaatctgccgtacgccgttgcgatcatacctccaaatccgcccccaagtctgttcgatgcgaatagcacctgcgatttagcgaaccgtgcgctcgctaggtttagggtttcgagggtttgcgttagggtttgggcgcacgatggggcggtcgcgaggggtgctgagttccggcgacgacgacaccgggcacaggtcgaagcggaggagagtctcgtcgggcggggatgcgacggactccatttcagcctccatcgggggagctggagagggagggggcaagaaggcgctctatcactgcaactactgcaacaaggacatctccgggaagatacggatcaagtgctccaagtgccctgacttcgacctttgcgtggagtgtttctctgtcggcgctgaagtcaccccgcaccgcagcaaccatccttacaaagtcatggacaacttgtctttcccacttatttgcccggattggaatgcagatgaagaaattctcctccttgagggaattgaaatgtatggtctgggaaactggcttgaagttgcagagcatgttggtaccaagtctaagttacagtgtattgatcattacacatcagcatacatgaactcaccttgttatcccctcccggatatgtctcatgttaatggcaagaataggaaggaacttctagctatggctaaagtacagggtgagagtaaaaaagggactttgctgttacctggagaactcactcctaaggttgaatctcaattttctccctccagggtcaaggtggaagatgcacttggagaaggtccagcaggtcgatcaccttcacacatggctgttggtgcaaataaaaaagcttcaaatgtgggacatattaaggatggcgctactgtatcaaaagtcgaagagatatgctttctcaagaacgtctttttctgtaatttgagttctattaagaaatgaaatggtgatagtctcacgttacgacatgatgttcatgtagatagaagtgttggtgtgaagaagcccagatattctgcagatgaaggcccttcgttgactgaactgagtggatacaatgcaaagagacatgagtttgacccagaatacgataatgatgccgaacaagctcttgctgagatggaatttaaagaaactgattcggaaactgatcgtgaactgaaactccgtgtgctgcgtatttacctctccaggcttgatg

SEQ ID NO: 3063 - DNA, 577 bp, Zea mays
  Clone ID: TF_ZmC38224_3
aaggctccttcttaagatcgggcctaaggtggttcgtccagcgaagacgacagctcttgccacagcggttgagcctggcattctgctgcaccttattccagttccccgcgccgtgtacctcgacgtagtctttgacacgcttatcctcttcgggcgaccagggacccttcttcatctggggcgtcccgctggggttttcatagtcgtcgatgctatcggtctccttgtcttcatcatcaacgtgttcatcgtcggccgagacgtactcatcgtctaggggagagttctctccatccggcgcagggttctcgtccaccctcaccaccgtcattttgattttgaactttgaaggcagctgggtcgtcctccgaaagttggggctcctggggctcctttaatcttctgcaggccggctgctggcgccgccacgccggggatggaggaggggccgaggaggacgatgccgccgtatcccccgtcaccggtagcgcgccgccgtcacctgttccgctagggttcctccctcgccacctggttgcatgattcgtgtcgtgtgttcctgggcgttgctctgtta

SEQ ID NO: 3064 - DNA, 650 bp, Zea mays
  Clone ID: TF_LIB4827-009-R1-N1-C11
ccggccgggacttcatcattcctcaccccttcccttagaagctgcaggcggtgcatgccaaggtgacagggcctcgatactgtttgagatggaaggtgtcatgacgacgagaagcaagcatcgttgtcatgaggaggaccaggagatgactatggtggagctgaggagaggcccctggacgctcgaggaagacaacctcctcatgaactacactgcttgccacggcgagggccgctggaatctcctggcccgctgctccggtacgtatgatccatttctctgtggccgaattaacctatcggcctcatcttgatgtgctgcgtctgcgtgtgcatgcttgaattagggctgaagaggaccggcaagagctgccggctgaggtggctcaactacctcaagccggacatcaagcgcggcaacctggcgccggaggagcagctcctcatcctggagctccactccaagtgggggaaccggtggtccaggatagcgcagcacctgccggggcggaccgacaacgagatcaagaactactggcggacgcgggtgcagaagcaggcgcggcagctgcgcgtggacgccaacagcgccgtgttccgcgacgccgtccgctgatactggatgccgcgcctgctcgagaagacgatggc

SEQ ID NO: 3065 - DNA, 1770 bp, Zea mays
  Clone ID: TF_ZmC984_2
ttattcggcacgaggcctgcgtgctggtgcccgggccatccgggctccctttcttttcgcgggctcgcctcgcctcgcctcgcctcgccggggggctggggggcgcgggctcgctccagcaccgataaagcccacctcgagtgctgcgctgctccaccccccgggaccggaatgcagaggcggaggacctggattgattccttcttctgtgagcaatcaaaagcttcagccgggggttgtgggggaatcggagcttcttatccgagagcagacatggagcagagtagtgatgggttgccaatcagccagcggagggctaacaggtcaacaaaacactcaagcaaggcagatgaggtggctgaagacatggtgcagagtaatataccacatgaaactgtgagactgtgccaaggtgtggaatcagaagagatagagggacctcctcacaagaaaattgtgcagaacttcacggagagcagtagttccaaaaaaaaaaaacaaaaaaaaaaaaaaaaaaaaaaaatatcgtacgtcgactcaaataatgctgacactattcatttgttattcattgttgttaattagaagcctttatggtttggaatatttactagctgagaatgtccattatgcagactgcatttaaatgttcattagaactgcatgccttttcttcactttgtgctgatgggccttccatatagatggacacgcagtcttgacccagcaataaagaaacaggattggtcagaacaggaggatctaaaattgattcgagctcatcaaatatatggaagtcagtggcttaaaatggtcaaacatttccctgggaggacaaatcatgcactcaaagaacactggagaaatcgtatcaaaggaaaactgaatttgtgtttagcctcaggattgctagaacaagttccggacctggaaggtcagtcagaaattccgaaggacagtcagggttcagctgacaggagtggaccgccaccagttttacgagcacagcccaaatctaaaccggaactcccagaaaacgctggtacatcaggagaaggaacttctgattccattcgtcctaaagggcccaacgcccatccaaccgaagtttctgaaaaggtattggctaaatcaaagcagcgtgccagagccagaaggagattggattttctgtcaaccccagtggagctcaaattgtgcactgctgcggcaagttgtcaaaggcctccccagaaaatggatcaaccgggtccagtggccgaaaacatctctccgtcagatgcatgtcaagacatttcacagaatgttccaccagagcgtgcggatgccatcacaccgctggcttctagtaaccaccattcaccaacgacaccagatgatccattctctctcgaaatgcatgaggcgaacgcatcagatcttctggacatgtcctactgtgatggcttgataatcgattctcgtcgtgatccacgtgacggtagcctcatgtagaagaaaaagttaccaacgcaaaatgacacttttaatagcaagagtgtcttcctgaaatccagcaactccctgtataaaaatcgtgttgcatgttggatggaacttgtatcttgtcttggcaaaaataattgcattgctgttctgttaatgcccctaactggtttggagagcatttttcttttgcaggtttgaagagcattttgaggggtgttgtaggtcaaaatgattttttttcgttgttttgggttggacaggtccccataactctttttatgc

SEQ ID NO: 3066 - DNA, 2437 bp, Zea mays
  Clone ID: TF_ZmC300_35
ttgggtacctcgaggccggccgggatggtcggtcgtcaatcggccacgattcccagtcatcaccaattattactgtctttcgtccacagctactcatcaatgtgatcgacatgaacctcgcgtccgcggtgcgagtgttcttgtcctactgcctgctgctccaccggtggatggggtccgagcaggccggaggcgtgttcgatcaggggggccatagcgtcagcctcacccgcctcgacgaagcaagggctccgccgaggtgcgccgtgcagtcgtccctgtccagcgcggccagcctgccgccgaagccgctgctcgtcgccgcgccgcgcgagactggggagtacccggtgatcctgttcctacacggctacctcgccgtcaactccttctactcccagctgttcgagcacgtcgcctcccatggctttatcgtcgtcggacctcagctgtacaccatatccggggccgacacaaccgaggagatcaactcagcggcggccgtcatcgactggctagccaccgggctgccgtcaactctgccactcggcgtccgcgcggacctaaccaaggtgtccatctccggccacagccgcggtgggaaggtggcgttcgcgctggcgctgggccacgccaaggccaagctcgctgtccctctcgccgccgtcgtcgccgtggacccggtggacggcatgggcgtgggcaagcagacaccgccgccgatcctcacgggcaggcacggctcgctgcacgtgggtgcccccaccatggtcatcggcacggggctcggcgagctgccccgcggctcactgctcccgccgtgcgcgccccggggcgtcagtcacgcggccttctacgacgagctggacggcgcggcgccagcgtgccacctggtggccagggactacgggcacacggacatgatggacgacgacacgccgggcgccagggggatgctcacgcgcaccatctgcaggagcggcggggccagggcgcccatgcgccgcttcgtggccggcgccaccgtcgcgttcctcaagaaatgggtggctggggacgccgcggcgatggatagcatcacggcgcggccggaccaggcccccatcgcgctgtccgtggtggagtttggagatgagaaagcgatagcttagctgctagacaatatgtgatatgtgcaggcgctagccactcaggcaggttggtgatgacgttgaaattgcagatgaaattaaggccctgtttcaatcccgtgagataaactttagcagcttttttttagccacttttagccatttgtaatctaaacatgagagctaatggtgataattgaaactaaactttagcacttcaattcatatagctaaagtttagccggaagctaaagtttatcccgtgagattgaaacggggccttaaactaccatacatgttgtcttcaacaacgagatttaacagcttaggaacaaaatctccaagctagtagctagctaataataagtggtccatgacatttcagccccacccccctccatcatgggtggagctgcagaagagcaaatcggtggctgctgacctcctgcagcccaggtgactgctgtctggctgctgctgctcgcctgactggcatggcactggaagggggatgatgcgagctgctgctggccaccaccaaaggcatagcagtatgggttgtaataagcattattgttggtgctagtgaaagccggcagtgagctgttctgctgctgctgctgctgctcctcccatggctcagcatcgtagaggccgacgtcgttgatgctgtagcgctgcttccttgtggtgctctcctgcctccggaagtacttctgtgcatggctggagacctgcaccggcgtcttagtggtgacgaagtccttggagatgttcttccaattgccgcgcccgtacacacgcaggccacgcaggaaattcctgtgctcctccagagtccaaaacctccctgcacgttgttggttatcctgtcgaggaacagcaactaatttcctacggcgctgttcctccagcagcatcctcttcgccttcatctcgtctgctaaatacccatccatcgtcctgctgtgcaccccaccagagttgagcaggagctggttgctgctcagctctgccccactgtttatcatctccaccacaagctcaacgtacaagtcagttacctggcgcttatccttccctgggaacattgcctggagctcatccagaatgtcgtcgttcgtgctgttgctggcgccgtgacaagcgatgagagatctcaccatctcgatctcgttggcactccagtcgacgttgaaccttgggtccatgtccatcggccggggttagctaagctagctagttagtttttttgagggttcagtatactacaacacttgcgctgaatctcccggccggcctcgagg

SEQ ID NO: 3067 - DNA, 589 bp, Zea mays
  unsure (1)..(589): unsure at all n locations
  Clone ID: TF_LIB5117-027-A1-PF1-C3
aaccacccaccaccaccaccgctcgccgccacccacaagaatcaatcgtcttcccgtgatcccattccgtcgtaggctcgtactagatggaggggtgtgaccggatcaggggcccgtggagcccggaggaggacggcgcgctgcggcggctggtggagctccacggcgcgcgcaactggacggccatcggccgcggggtgcccggccgctccggcaagtcctgccgcctgcggtggtgcaaccagctctcgcccggggtggagcgcaggcccttcacggccgaggaggacaccgtcatcgcccgcgcccacgtccggatcggcaaccgatgggccgccatcgcgcgcctcctccgcggccgcaccgacaacgccgtcaagaaccactggaactgctccctcaagcgcaggctcggcgaccttggtgctgacggggtcaccgagggtgatctggacgagcggccgtgcaagcgcgccagcgtcacgcccgagagcacctccggatcggggtcggggtctggctctgggtcggaccgcagcgacctcagccatggnggtgccttcgggcttggccaggtttaccggccggt

SEQ ID NO: 3068 - DNA, 1171 bp, Zea mays
  Clone ID: TF_ZmC79863_1
tcgaggccggccggttttccgcacagcaaacaagtacgaggagtcgaggactgcagctgcgccagcaaacgccgacctgccgggacatggcagctgcggcgccggccgcgggcaagggaaaacgaaagcgccacctctccgaggacgacgtctgcctcctccaaaggtacaatccggggacgatcctgacggcgctgcaggaggtggcgcagcatgcggagggccggatcatcgactggagggcggtggtggcgaagtcggccacggggatcacctccgcccgcgagtaccagatgctctggcgctacttagcatatcaccacgacctaaacgagagcatcgaagccggtgacctgcctctgggcgatgacagtgacctggaattggagcttgaacccaatcccagcgagaccaaggaagctttatctgaggcctctgcattggccaaggcgctaatatccagatcttcacgtgagcaagcctcgggtcatcgcattaatttggatgttcctgcgctgaacactcaaaatgaaaagatagtgcgggttccatctaagcagcttgctcagagtcatcgtgtaacaaatgttacatgtcctgtttccaatccaaaacagttatctcatatagtaccctctcctactcatttggatccaaatggagcttctaaaaagaggaaaaaggcaaaagcttggtctaaagaggaggatgcagacctagcagctggtgtgcagaagtatggtgaaggaaattgggaggtcattttgcataaatgtaactttgataaatacagagaacgccccaatcatcagttatctcagagatgggcgctgaagcgtccaggaggatcaaccaagcctgctagcactaaacacgcctctgttggcttagaggaaagatcagcagccctcaaggcactttcattggctgtcggtcctatgcgtggatcatctgcactgagatcaggagcttatccacaaagcattcagcataagtctacagtgtttgctcctaagatgccagaactaagatctgcagtaaccccttcaccggcaccagcagtgccagtcccagttgctatgcctctgcgtgtggcagctcaagtacaggcttcggctcatcaagggcattaagcttctgcccatgcttcaccacccaaatttgtaaatgc

SEQ ID NO: 3069 - DNA, 615 bp, Zea mays
  Clone ID: TF_LIB4745-001-R1-K2-F12
gggctgtctctacatatgcagcagctataggtccctcctctcatcaactcatcgtgttcttcttttccaatccctacactgcttgctagttgctacacacacccactgatgacccacaactttaaagaagctgcaggtgcagtgcatgcaaggagacaggccacgatactgtctgagatggaaggggccatgacgacgagaagcaagcatcgtcgtgatgaggaggaccaggagatgacgatggtggagctgaggagaggcccctggacgctcgaggaagacaacctcctcatgaactacattgcttgccacggcgagggccgctggaatctcctggcccgctgctccgggctgaagatgaccggcaagagctgccggctgaggtagctcaactacctcaagccggacatcaagcgcggcaacctggcgccggaggagcagctcctcatcctggagctccactccaagtgggggaaccggtggtccaggatagcgcagcacctgccggggcggaccgacaacgagatcaagaactactggcggacgcgggtgcagaagcaggcgcggcagttgcccgtggacgccaacagcgccgtgttccgcgacgccgtccgc

SEQ ID NO: 3070 - DNA, 800 bp, Zea mays
  Clone ID: TF_ZmC11894_4
ggggccggcagatccccctcctgctcatccgccttcctttctcgaagcgcccaatttattaccttcccctaatcccgcagccttgccagaagccaaattggtgctcctcttatctcgccgcgccgccaccgctccatttccgctcccccagcccccccaaaagaacctcgtaaccctactcgcgggattccgcaggccgccgcttgcttagggttcatcactcctgttcacacccgatggccgtggacgaggcgagcagcagtggcggtggggaggaggggtgcgggtcgtggacccgcgagcaggagaaggcgttcgagaacgcggtggcgacgatgggcggggaggaggacggggacgcgaggtgggagaagctagcggaggccgtcgaggggaagacgccggaggaggtcaggcggcactacgagctgctggtggaggacgtcgacggcatcgagtcgggccgcgtcccgcttccggcgtacgcagctgacggcgctgccgaggaagggggcggtggcgggaagaagggaagtggcggaggagggacccatggggacaaggggtcggcgaagtccgccgagcaggagcgtaggaagggcatcgcctggacagaggacgagcacagattgttcctccttggacttgaaaagtatggcaaaggtgactggcggagcatctcgcggaactttgtgatctcaaggacgccgactcaagtagctagtcatgcacagaagtactttatccgtctgaactcaatgaacagagaaaggcggcgatcaagtatacatgacatcacc

SEQ ID NO: 3071 - DNA, 722 bp, Zea mays
  Clone ID: TF_ZmC27878_4
gggtacctcgaggccggccgggcggccgggcggctttttcactaaacgcttcatccgggagcctccaccatccgagagaagccagagaaaaggttactccgcagaaagcaaaaccctagcccactccggcgcgccaccggccgatggtttcgatgagcaccacgccgaagccgcttgactccgccgtcgtcagcgcagccgttgacggcggggatgagggtggtggtggaggcggtggcgggaagaagcaggcgcacggggcggtgatggcgccgccaccgatggtggtcccggccgcggcgcccgcgggcgaggaggaggttcggaaggtcaggaagccgtacaccatcaccaagtcgcgggagagctggacggagccggagcacgacgagttcctcgaggtcctgcagctttttgatcgtgattggaagaaaattgaagcatatgttggctcaaagactgttatacagataaggagccatgcacagaagtacttcctgaaggttcacaataatggtacgggcgagcatctgcccccacccaggacaaaacgaaaggcagctcatccatatccacagaaggcatctaacaatgtttctcaagctattttatcacaacatcaacctacccagagggagcaaggttctgtcatgcctatggatactgctactgagagaaacaaaatgagaatgtcgtggtgacttactgcgactgtactcttg

SEQ ID NO: 3072 - DNA, 633 bp, Zea mays
  Clone ID: TF_LIB3594-051-Q1-K7-G7
gaagaaaggcccgtggacccccgaggaggacctcatgctcgtctcctatgtccaggagcacggccccgggaactggcgcgccgtgccgaccaacaccggtgtgtgatgaatcatctggtgatgcagggcttgatgacgcgcgcggcggatggaattgcctttcaagatccaagctccgagcttacttgatttttttgtttgtttgttggtttggtcggcacgtgtgcgcgtgtgtgcagggctgatgcggtgcagcaagagctgccgattgcggtggacaaactacctccggccgggaatcaagcgcggcaactttaccgagcaggaggagaagctcatcgtccacctccaggctctccttggcaacaggtgatggtcactcgcctgtcgtcgtcttaaagcttttgttcccgttttgttttttccgctgtaacaaatggatcggacaaaccaaatcatccacggcacgaggtgatcgtgtgctgagcttgttgatctgcatgccgtgcacttgttgatgtgtcgtgcaggtgggcggccatagcatcctacttgccgaagaggacggacaacgatatcaagaactactggaacacgcatcttaagaagaagctgaagaacatgcagggcggc

SEQ ID NO: 3073 - DNA, 1254 bp, Zea mays
  Clone ID: TF_ZmC1193_4
ctctcgaccgatcggcgccacgagtgctttgctttctggctgctgggagcgcgccatggggaggtcgccgtgctgcgagaaggcgcacaccaacaagggcgcgtggaccaaggaggaggacgagcggctggtggcgtacgtccgggcgcacggggaggggtgctggcgctcgctgcccaaggcggcggggctgctgcgctgcggcaagagctgcaggctgcgctggatgaactacctccgcccggacctcaagcgcggcaacttcaccgacgacgaggacgagctcatcatccgcctgcacagcctcctgggcaacaagtcagtgagcgtgtgccgggctgccggcgtccttctgtctagctattactctattagctctcgtcgtcgctgttcctattcctagtcgatacggttaatacaacaataatgctcccggccgggcgcttcgatgatcgcctaacgccacaacgaacctgctctcttctcttaccccccgcaggtggtccctcatcgccgggcagctgcctggccggacggacaacgagatcaagaactactggaacacgcacatcaagcgcaagctcctcgcccgcggcatcgacccgaagacgcaccgcccgctcggcgccggcgccgacgccgccgcgccacccggcgtggtcgcgcaccgggcgctgctgcaccgcgcaggcgcagcccccgtcgagctcgccgtgaagccggcgccggcggagtcatccgacgacggcggccggagcagcgccagcgccagcagcggcggcggcgccagcgtggaggagccgcggtgccccgacctcaacctcgacctgtccgtgggcccgccatgctcgccgcccaagacgccggcggccaccgcgtcgacgcccacgtggcatcagcagcagcggacgacgaccatatgactgtgctaccacctcgaagtccgcagcggggaggcctgtagctgcaagtccccctcgccagcggcggcggggttccggtttctccggccgctcgaggagggccagtacatataaggcaggcgtcgtcgatcacagtaggccggcagaagcaaacccccccgccgcaaaacctgtaaaaacaaccacagaacagagtttctaatggagatgatgactgatgtggatggatgatgagagattgagagcatagcataagatttcgtgtccacgtcgattcaaaccgatctatttcttaagaaaaaaaacaaaaagggcggccgtcgactagtga

SEQ ID NO: 3074 - DNA, 1653 bp, Zea mays
  Clone ID: TF_ZmC1597_1
cccgggggattattagctcagcattctcccggggtcaaactgtgttccagacttccagtgtgtgtgtgccagccactactgtacaatagctctcttctttctctcgccgtagcttcgctcgtgctgtgcgtgtgtgtatatataagcatcctgcccccactccttttatctctctactcgtctccacggaatcgatcgatcggtgctttgatctctgagcctgagcaagcggtcgagctcaccaaccgccacgctcaagacaggtcgagtagctagctagctgccggagcggaaaaggaggcggtgcagtggcatggggaggccgccgtgctgcgacaagatgggggtgaagaaaggcccgtggacccccgaggaggacctcatgctcgtctcctatgtccaggagcacggccccgggaactggcgcgccgtgccgaccaacaccgggctgatgcggtgcagcaagagctgccgattgcggtggacaaactacctccggccgggaatcaagcgcggcaactttaccgagcaggaggagaagctcatcgtccacctccaggctctccttggcaacaggtgggcggccatagcatcctacttgccgaagaggacggacaacgatatcaagaactactggaacacgcatcttaagaagaagctgaagaacatgcagggcggcgaagggggcgcgggagggaagcgcccggccgttcccaaggggcagtgggagcggcggctgcagactgacatccacacggcgcggcaggctctgcgcgacgcgctctcgctggagccttcggcgacgccgctggccaaggtggagcctctgccgacggctccggggtgcgcgacgtacgcgtctagcgccgacaacatcgcgcggctgctggaggggtggctgcgcccgggcagcggcaaggggccggaggcgtcgggttcgacgtcgacgacggccacgacgcgccagcggccgcagtgctccggtgagggcacggcgtctgcgtcggcgagccacagtggcggggcggccgcgaacacggcggcgcagacccccgagtgctcgacggagaccagtaagatggccggcagctcggtcggcgcgggctccgcgccggcgttctcgatgctggagagatggctgctggacgacggcatggggcacgctgaggtggggctcatgaccgacgtggtgccattaggggaccccagtgagttcttttaattaaggcacaagtaccaccaaaagcaaactgatcaagtagagatgcaagaacaaaaagaagaaattaatcgccgggttaggtaactagttaagcagaaatccaacaaaactaaatgtatttgaattctcggtgaatttgatcgagttggatgtcgatatagtttttgttttagtcccttcttttatttttttctctgttgtttctctgatgttagggtttgtaactgatcatgtaagcttatactaatgacaggttcctaaatggaccctgcatgaaaatacatcttataaattaaaagatctatacaaaaaaaaaaaaaaaaaactatatatttagaagttataatagatgctcaatcctcaattatattactccaatatttttccttcatcaagctctatatatttttcgtgttattcttactctacta

SEQ ID NO: 3075 - DNA, 1651 bp, Zea mays
  Clone ID: TF_ZmC20648_1
tttccgcggcgccggcggctctgcatgcgcgcgccctgcggaaactgatccatgatctgatcccacggcaccagcagcagcagcaacggtcgaccgccggcggccggccggccacggtgggcgcgcgcgcggtggcaaataaagagcttagagccgccggccgggatctatggggcgcgaggcggcagcgacgaggccgcccaagctgaggaggggcctgtggtcgccggaggaggacgagaagctgtacaatcacatcatccgatatggcgtcggctgctggagctcagtcccaaagctcgctggcttggagagatgcggcaagagctgcaggctgagatggatcaactacctgcggcctgacctcaagaggggcagcttctcccagcaggaggaggatctcatcgtcagcctccacaagatactaggcaacaggtggtcccagatcgcgtcgcagctgccggggaggacggacaacgagatcaaaaacttctggaactcgtgcatcaagaagaagctccggcagcagggcatcgaccccgccacccacaagccgctcaacgacgacgacaacgctgctgctgctgctgctgcggacaacgacgccgccgtggcgccgcaccaccatcgtcgtcatcaggacgaccactgcggcgccgccaatattgataataataataataacaacaacaacaacaacaatcggcagctcccctcagccgacgaccactgcttcgccatgagcagcgacgaccctctcgcgccacactccccgaccgtcagcttcgacccactgtccgtcaccaacgtccccacggcaatgcagcagggctcctacggctcgttccgctccgacaacgaccacctctgcgactacggcggcggcggcgtcgacgtggtctcggacgccgccacggcgtacagcgccccctacacaggcggcggcggcggcggagacagctccagcaacagcaacggcaccggcacctgggcctgcagcggcggcgagccgatgccgccgcacgtggccatgttcggccgcgatgctgcccaggcggcggcgtaccatcagttcgtcgacccggccaagtacagcccctggcagcagcacccggcggcgaggctccatgatcacaacgtcggcggcgctgctgcgggcttcccgatacggtccatgtcgcgggacctgccgggttcctgcttcgacctcgcccgcagcgcgctggaggacgagttcagcgtcgacttcctctgacgtacgactacgccgacgcgcgacgtacggccaggaggtcgttggtgcatgtcgtcgtccaacactcactcgatcgacagacacacacacacacatacacttttcattcactactactgctactattacctcagtcctcagagatcacccaaaaaaacaagacacacactccttgtgtctgccatattcattcgttatcccccccccccctcttttcatgtggtccggtcatactttatttggacccatcgatcaagttggttaattaacacgttttggtggtatgttatactgtgtttataataagggttttatctgtattattatatatacacctcaattatattcatgggaaccaaatttttttgttggaaaaaaaaaaaaaaaaaagcggcc

SEQ ID NO: 3076 - DNA, 1118 bp, Zea mays
  Clone ID: TF_700203222_FLI
gcggcggcgacaagacacaatggggtgccggtcctgtgacaagcccaagatgaactaccgcaaggggctgtggtctcctgaggaggaccagcggctcagggactacatcctcaagcatggcctcggctgctggagtgctgtcccggcaaaggctggtctccagagaaacggcaagagctgccgcctgcgctggatcaactacctgcgccctggactgaagcgtggaatgttctcccaggaggaggaggacgtcgtcatcgatctccaagccaagctgggcaacaagtggtctcagattgcgatgcatctgccggggaggaccgacaacgaggtgaagaactactggaactcgtacctcaagaagagggtgatgcagcaggcccagggcgcgtcgtccaactccagccccaagagcccgcccgagctcacctccatgagcaccaccgccgacctgtcgtccatgtccatgcccatgcccatgtccatgcccatgcaccagcgccaccacgtcaagaacaacagcggcggcggcagcaccacgacgtcgcacgaccagcaggacgacgccaacatcagcggcagccgtgcagcgctgtcggccccaccgccgccgcccctcgcccagcagccattcgagcaccaggcggctaggagcttcgtgttctcggactgggcgccggagagctactcgctgtccacgcactggcccgccgccacgtcgacctctggcaacgtgacgccgtcccacggcagcgccgccgccttcggggaccagatgagcggcacatacggcgccggcgggctgccgccgccgcaccaggatcaccaccacagcgccgcgcccgccaccaccggcatcgcggggagtggctactttgacctgctcaatatgggagacatctacggtggattcagctcgacaaacaacgatgatctgctcttctgaactcaactgacgacgatggaggcgtgatcagtgttgtgcatgagtgagtcaaatgcagcggtatattgttggatttgttgcttcgtcttcttcttttgtacgtattttgtaacaaaattattatttgtaacaacattattaattgcgatgtagagaacacaccctaggctgg

SEQ ID NO: 3077 - DNA, 1130 bp, Zea mays
  Clone ID: TF_ZmC2012_1
gacaaggcggcggcgacaagacacaatggggtgccggtcctgtgacaagcccaagatgaactaccgcaaggggctgtggtctcctgaggaggaccagcggctcagggactacatcctcaagcatggcctcggctgctggagtgctgtcccggcaaaggctggtctccagagaaacggcaagagctgccgcctgcgctggatcaactacctgcgccctggactgaagcgtggaatgttctcccaggaggaggaggacgtcgtcatcgacctccaagccaagctgggcaacaagtggtctcagattgcgatgcatctgccggggaggaccgacaacgaggtgaagaactactggaactcgtacctcaagaagagggtgatgcagcaggcccagggcgcgtcgtccaactccagccccaagagcccgcccgagctcacctccatgagcaccaccgccgacctgtcgtccatgtccatgcccatgcccatgcccatgcccatgcaccagcgccaccacgtcaagaacaacagcggcggcggcagcaccgcgacgtcgcacggccagcaggacgacgccaacatcagcggcagccatgcagcgctgtcggccccaccgccgccgcctctcgcccagcagccattcgagcaccaggcggctaggagcttcgtgttctcggactgggcgccggagagctactcgctgtccacgcactggcccgccgccacgtcgacctccgggaacgtgacgccatcccacggcagcaccgccgcagccgccgccgccgccttcggggaccagatgagcggcacatacggcgccggcgggctgccgccgcagcaccaggatcaccaccacagcaccgcgcccgccaccggcatcgcggggagtggctactttgacctgctcaatatgggagacatctacggtggattcagctcgacaaacaacgatgatctgctcttctgaactcaactgacgacgatggaggcgtgatcagtgttgtgcatgagtgagtcaaatggatgcagcgcgcggtatattgttggatttgttgcttcgtcttcttcttttgtacgtattttgtaacaaaattattatttgtaacaacattattaattgcgatgtagagaac

SEQ ID NO: 3078 - DNA, 1316 bp, Zea mays
  Clone ID: TF_ZmC24450_1
ctcggccgggagggatcctcctcggccgcaaacaaaaccctcctcgtcatccgcgcccgctttcccccctgccggcccccggtctcgctctcgcccaagcaccaaatcttcctcccactcatcacaagacgaagtttcagtgcctgcgcgtgccgcgcgatctctcgtccttggcgtcgtcaagacgcgttagtttcagtgcgcgcacgagtgtgtgttgtgggagttagtgagagcgagagcgagagcgagcgcaccaagcgattcggcgggcggcggccgatggggagggcgccgtgctgcgacaggaccaagggcctcaagaaggggccctggacgccggaggaggacaagctcctcgtcgactacatccagaccaacggccatggcagctggcgcctgctccccaagctcgcagggctaaaccggtgcggcaagagctgccgactgcggtggacgaactacctccggccggacatcaagcgcgggcccttcacatccgaggagcagaagtccatcgtccagctccacgccatcgtcggcaacaagtggtccatgatcgcggcgcagctccctggccggacggacaacgagatcaagaactactggaacacgcacctcaagaagcagctgcgtcggatgggcctcgacgagcccccgcccggcccggccgccggctgcccctccgcgcgccacatggcgcagtgggaaacggccaggctcgaggcggaggcgcgcctctccctcctcgccaccgccgcctcctcctcctcctgcggcgccatcgcggccacctccgcctcatcctcctcctccaccgtggacttgaagaccgcatgcgccaggcccgcggacatcttcctgcgcctgtggagctcggacatcggggactccttccgccgcaagacggccgcggcgcccgtggtcaaggggaaggacgcggtgatcaagcaggagtcgcaggcgctgctgctgggtcccggggacgactcctcggccgcgtccaacgagacggaggtggcggaggcgctggaggagtaccagatgttcctcgacttcgccggcgaagagctggggctgtttcacggccggcacggcggcttctcgctgttcccgccgctcgacgtgctcgccgaggcgtccctggacacggcgttcaagtgaagacgtagcgagtaccacgtacgtacacatacctattgccatgggcaagcggcagtggacatgcctctacggctagctgtatactgtacgccgcctccgccttaacatgagcgcggatgtactatgtatatatgcatgctgtctcgcgtacc

SEQ ID NO: 3079 - DNA, 967 bp, Zea mays
  Clone ID: TF_ZmC27687_1
gggtggggtgtgtttttttttttttttttcccctgaaaaaaaaattattcatggatcctccaatgcatgcagaaagacatctggaacgacgaggaagacagtgttctgatacaagcgcacaaggaggtaggcaacagatgggccgagatagccaagcggctgccgggccggacagagaactccatcaagaaccactggaacgcaaccaagaggaggcagttcgcacggaggcggagccgtgccagcgcctccacctccacctccaagggccctcctaaaccaggcacccttctgcagaactacatcaaaggcctcggtattggcccagtaagcaaccggagcgccgcaccgcttcctgagcctaccacaccgccgccgccgccgccgtcttcgcctgaaactcccggcggggcgaggtcagcgaagcaggctggtgaaagtaccacgctggaggtggaacgccgcagcccgtcgtgcgacgtgctggtggattcttcccagtgcaccaccattcttccacctactagcgtgcatgggtacgacgagtacagcaactgcagcggcgagtcccaccagtcctgcgaggtgctcctcgcccctatcatcagctgtggcgacgacgcgttctcggttggaatgtgcggcggcggcggcggcctgttcgacacggacgacgcggacgccttcttgcaagcgtacggcgtggccgccgacgacgtcgtcgacggcatcggcatgggctactacgtcttcaacgacggccatgtcgaccacgcggccacggtcgacgctgagatcgacatggagacgatgatgatgatgtgggacgacgacgacgactacgccgccgccctagggttagggtgtgctgctgggccggctggtgtggagagtgctgtgcgcgtgaaggaggagatggacctgcaggtggagacgatggtggcggccacgcacaagtgcggcgatg

SEQ ID NO: 3080 - DNA, 2798 bp, Zea mays
  Clone ID: TF_ZmC1443_1
accaggagcagagggagcaacagtatgggatttgaaccacagagcacgccggccggtctgccggacaagccggaagcaggccaagggaagggctaaacctccatcccttggcacaagccacaaccaccacctccaccaccaccaccacctttaaaagaagggtgctaaagggctgtcctgcgaagaaaaggagaggagtgcccctagcctttccttgctttccactgaaatctcctatctgcagccatgcagttgctcaatcctggcctcagatgaagcccaaccattcattggtatataagtcgctacaacctttgcaatttcccactgcttcagaacatcgtcgaagaagctctgtgctaccggagaaggtgttcgtcgtcgtgcataattatacattccgcagacctgtaagctctgtgagtttggttggagctcccaggttctgcattgcgttgagatggggaggcattcttgctgctacaagcagaagctgagaaaggggctctggtcccctgaggaggatgagaaactcatgaatcacataacaaagcatggccatggctgctggagctctgttcccaaactcgctgggcttcaaaggtgcggaaagagttgtaggctgaggtggataaactatctgaggccagacctcaagagaggggcattcgcccaagacgaagaagacctcatcatcgagctgcacgctgtcctcgggaacaggtggtctcaaattgcagcgcagctgccagggaggactgataatgagatcaagaatctatggaactcgtgcatcaagaagaagctgaggcagaaaggcattgatcccaacacccacaagccccttactgaggctgatcgcagcggagcagctcccaccatcagcaccgagagaacctcagggtccagcgacatcaacccatcaagcgctggtgctctgggaaacttgagccacctcctcagcgagacggctcaatcatcaatgctgatgcccgtgtatgacaagaatcgcgctgaaactccaaacttggcacgccctaagctgccaccaaaggagctgttcctggagcagcttactgctggacacgagagtccatcaacctgccactcatcaggccaaactctctatttccctttccaacagcctttaggctacaacagtgagagtggcagtagcgatggggcgaatatgaattcactctggttcaaccagagtgacttcaactgcagcacaatttctacagtgatgccgccagtttcaccatcggccctctctacatcaatggggctgaatcttccacctgataatcctcgacatggaggaactggcattggaagtaccgcagtagattcattctactgggatggtactaatcctagcagcagtagcagtactgggagcagagggagcaacagtatgggatttgaaccacagagcacgagcacaattctggagaacagtgtcttcccatggacagacattggacaagaaaaagatacaagggctcacctagtagcggaacttaagtggcctgactcctttgccgagacgaccacagccatgcagaaccagagccaaacgctttatgatgatgtgatcaaggcagagagccaattcaacatagaagggatatgtgcttcttggttccagaatcagcagccacagcaacagctgcaggtagcaccagacatgtatgacaaggacttgcaaagaatgcaactatcttttgagaatatctaggcattatgttccaccacatggaacagagcagatcagaagaagcagaaacttgtaattttcagagattcgtgggcagaattatgctgaattgcttacatagatacattaagttgatacagaaatcatcctccacagctgctcctcagttgaagacctggcaatatcaaggaaaggacagccctggcattagaagttgcagcagaatgcatacaaaagtatgttctagagtctccttttctttctcttgaaaattgatgttttccttctgtacacgactcaacttttgcatatttgagtttttgttctctctggtggaaattaaataaatataggcagccatgggcaaaactgcatgtgtcggtagctctcaacatgcaagtagacccaaacatttcaactgctgccatgcacgtccatgcaaattaattattgcatgttgtatttttttttctttttttttgataagttgccgacaaacgacagttgtatatttgtaagaagaaatttggaatgttgacctgagagctattttcttccccctttcactttcccgtttctgtcgtaaacttttctgtgtggagaacccaagctacttgagcgctttctacttgaatacaggaatggaaaacgattggttgatttgatagggtacaaaggagcaatcattctcaagaagaagtaaacacattcaggaaagaaaaaaggaagaaactattcatgaatatctacctaccatgtagattgggtaatctatgaagcctcaatgtggcaagaaaattggtggagctcggaagtctcaaaatcaaaaagatggcgtgtgagatctacaacaagactcgtggttggaggccagttgacagacgaatccgatgaaatgaaacatgttttgttatctggttattttggttcaataactgtgcggtcgttctacttcttctcccttgtagcgcctagctacaggaaaaactatgagatagaaatgctgcttgctgctttggtgtgaaaaaaaaaaaaaaaaaaaaaaaaaaagggaaaaaaaaaaaaaaaaaggccccta

SEQ ID NO: 3081 - DNA, 139 bp, Zea mays
  Clone ID: TF_700451947H1
cctccactcggaatgactatcctgctgccaagagggtcaagttggacagtgtcagagtcctgagacagatcagcaacaaccgaaaatgcaccagctccaggtcctcggacaccgaggagaatgtcaagaggtgaataca

SEQ ID NO: 3082 - DNA, 330 bp, Zea mays
  unsure (1)..(330): unsure at all n locations
  Clone ID: TF_LIB3066-040-Q1-K1-A5
gcacacagctcatcagttcttcttcgttgtcttggctagctgcctagctagctagctggttcctcactcctctccgagaaccccctttttcatctctctctctcgcctagctcctttcgcgatgttatcttctctgctggcctcacaactcgagagagactcgtgaaaagaatccagatatataaagagatcgagggcagctagcttaattattagcatgtcgatgagcttcttgagcatggtggaggcggagctgccgccggggttccggttccacccgagggacgacgagctcatntgcgactacctcgcgcccaagctcggcgccaa

SEQ ID NO: 3083 - DNA, 663 bp, Zea mays
  unsure (1)..(663): unsure at all n locations
  Clone ID: TF_LIB4759-104-A1-K1-B8
ttgggaccctcgaggccggccggggcccgttgctcacttccctctcattctctcgacctcgccgcctccctcccaggctcccaccgtgccctaccttttcctcacgcccgcgtctcgccgccacgcccgcgtctcgccactgattgcggccccccatggagtcgtcgccctctcgatctgcgtgccactccatcgtcttcctgtccgcgcctcgtcttcatcctcgtgtcgccaccccgtcccggggtcgtcctcctcgcgcagtcgcagttggtgcctctcccgcaccctgttgtctccctcctcggcccgatgctgctactgccgccctcgtgggtcagcgctgccgcgaggcatatgcacggcgatggcgtcttggtcgctgcagtcggcatagtccatggcgtctgccttcttcttatagaagaccccagtcctccttgggcagnggtgtgtgggttctccatccagaactcgtgcatcacccagctggtcttgacgccgttgggggcgctaccgcggtagaagacgagggtcttgcgcatgccgacgacggcgcggtggtggcacgcggcggcggcgggccagctgcagggggtgtggatcacgcggtccttgccggtggccttccagtagccggacttggtggcgcggttggtgcgc

SEQ ID NO: 3084 - DNA, 1066 bp, Zea mays
  unsure (1)..(1066): unsure at all n locations
  Clone ID: TF_ZmC313604_2
gagaaaagaacatggtntaacaaggggaagaggtgcacagaagcttacttgggagatcccatggatcatatttgtagatgtctagctgcctgatgagctcaatggggagagacttctgatggatttttcttttaaggtaaaacctgacaagctcttcatctgttggatgaaacctgaatccagatacttatagaagaagttttaaaagtgtcacctattgtaactcacgtagggtcccattgtgcgaatctcaatgaggtatgtattctgcagcacgcttgggattaacaatcttgtgatctgatattcacctcggcacgaaactaactcgatgtcaagtactttgcatctaatgtatgtcttgtttctatagttaagcctcctcacagaataatctagctctctagatagctaccttaggaatttttaattgtgttcccttgaattttctaaaggcgaactatataagtacaattcccaagacactaggagacttgaaaattccactaagtgcagtactctattggaataacgagagtctaattccttttcacagtacatatatcttacagcggtatgtgcacatatacctttgattctcccatgatcccaaaatcctttttggacagacttccctcttcattggtaccctttttttctcacctgtatatgtgaatttgaaggggggtttagcgaacacaaagaaagcactgtaaaaccttcgagagaaaagtatacatgttccttactcatcattgatctcctgagttgattgaaattaaaaaaatagagatttttttattatacagcagatctctgtaatttgtaacatggtacaagatatagttttccaaagaagaaaggcctctttttaaaaccttggtctaaatttcttgaatcggnatatgaggggaaaatttcatgccatgaaacttgcttgtgcgaaagcttatgcatgccacccagtttnatgaagtgcacctatcgaaatggaatttagctaagctgagggaaagtgcctgttttcacatncccctgagttgagctgaaattcctgagtcatgtc

SEQ ID NO: 3085 - DNA, 631 bp, Zea mays
  unsure (1)..(631): unsure at all n locations
  Clone ID: TF_LIB3591-121-Q1-K6-E2
ctcacgcacgcccccagctctctccttctccctgctcgctcgctggccatgggcgctccgagcagctggaagagtcctgcgcgcgccaagtgaccggagaagctgcgagatcagagtagttgcttgccgctcccgtgccaccaaattagattggacgtagctagcagctagctgagccgtagtgcgtagcggcaggtagggtgctagctcgatcgttatagctgcgtactagtggtgtcgcagcagaagcagtagccagcttcagtagccgatccggtggtaaaagcaacttttttttggacatggcggcggagggagccccggtgctggtgaggcatgctggcggcgtggaggagctgcggcagctcccgccggggttccggttccgccccacggacgaggagctcgtggtgcagtacctccggcgcaaggccttgggcgcgccgctccccgccgccgtcatccccgtcgtccgcgacctctacagcctcgacccctgggacgccgtcgacgtgccggccgcccctggtacatacacgatcgacgacggcgcttcgaaccaccagcagcatccatcggttttgtcagtactcagtngtagtaggagaaagaactaaatcgcaagcttttt

SEQ ID NO: 3086 - DNA, 747 bp, Zea mays
  unsure (1)..(747): unsure at all n locations
  Clone ID: TF_LIB4977-051-Q1-K1-F2
tgatacaggggtaggagaaggaggaggaggagtanaagcagctccacacctgtacgtagctgccgcgcgccggtgagcgaggtcgttcttgagagctgtatatatatatatagctccgcgacgacgccgatgatggccatcaagtcgctgagcatggtggaggccagcctgcctccggggttcaggttccacccgcgcgacgacgagctcgtgctggactaccgggccaagaagctcggcggcggcggaggcccctgtggtggtgagcatctacggctgccccaccatggtcgacgtcgatctcaacgagtgcgagccctgggaccttcccggtatgtaagacgacggcgcctacacatgctaatataacttgcttgttcctgtccttgatttctggccaagattgatatgatcgagcttttccccttgccaagtccttaattgcgcagcgaattcttcttccttccttcccttcccttcccttcctcttgggtttttgaattaatccccccctgctgtgtgagagcgctattaattattctctttggggtctgatctgttattatggtatgggttcctgatgactaaggagttgaattggtccctcacataatcctttatgttatggccatcaaaggatttttnttaagtgggaaaaaaaaaaaaaaaaaaaagggcgccctaggggccccccgaggcccccccccctttntgggcccccccccccctgagagggggggggggggg

SEQ ID NO: 3087 - DNA, 987 bp, Zea mays
  Clone ID: TF_ZmC9425_1
ggccgcgagcgggcggtggaagccgtcggggaaggagaagccggtggtgctgccccgcccgtgtggcggagggagcctcctggtgggcgtgaagagggcgatgacgttcgtgccccgccgccggaagaagacggcggcgttgccgtcgtcggcggccctgaagaccggctgggtcatgcacgagtaccgcctcgccgcgccgctgcacaagaacggctgcagcctggctcaggcgcaaggagagtgggtcgtctgccgcgtcttccagaagggcggcaacaggccgaggaggaggcagcgagaagcgtcgccgccgccgtccgctagcagcagctgcgtcacggatgcgtcgagctcggacctggacgaggtcagcagctagcttagctagctagctagcagaaccgaccgtacgtgccggctggccacaacatgcagtcaagaacgtacgtacgtatatgtataccgccaccagctcgtcgcgcgcgcagctgtgctgtgcatgccgtacgtgtgcggccggcctcgacctcgatctcgaagagaggatgtgatcaagctgagttacggataagggggaacaacccatccacacgcacttctcctccgacccaacattatttgttgttaactagtttttcttttctttatctctttctttcttttgcactctgtacgtgtaatgtaatgcagtgtaatttaattagtgagagaagcatgacgccctactaccggccggattattagttaacagcaaattaattactacgtacctactactcgcgtcagcagcttctactgtacttgaggtttcagaagcccaatatgtatattgtcaaattagtaacctgcattatatgcagaggtcgtcgtacgtgtccttaattagtgtctttgtaatatctcttcatgaagcgaggaggaaggaaagaacctgaatccatgcgtaacagcgcagtcgttgctgcataaaaccccccaaacacc

SEQ ID NO: 3088 - DNA, 684 bp, Zea mays
  Clone ID: TF_LIB4738-128-A1-K1-E7
acgacgacgagatccccccattccccaccaggtcgccgatgccgcctaccatctgacatcgatcgcccaggcagatcgcgcgcaagccacccaaacaaatccaaatcctgatccgattccgtcgatcggcggcgccgacgatggaggcccggcccggcgcgtggcgcctgcagcagcggggccccggcgcgcccgtcgcgggcctgcccatcggcttccgcttccgccccaccgacgaggagctgctgctgcactacctccgccgcaaggcgctggcctgcccgctcccggcgggcgtcatcccggacgccgacctcgcgcgcctcgacccgtcggacctcctcctccccgccgccgcaccacctgcggggggagccgccgacgacgccagcggggagcgcttcttcttccaccgccttggtgacaggcaagaagaagaagaggaagaggaagaagagcagcacgcggcggtggagagcgcgtcgtccacgtcgtcgtgcgtcaccgacgcctccgggaccatcgggcaggacgacgatggcgacgaagggatcagtggcagctgcagcgtcgcctcctctaattgagaccgactagaagaaacaagagctggctagcccgcccgtcgaccatatcacgggcgccgtgccctaattgccgtaacaccctctcagtctcagtccc

SEQ ID NO: 3089 - DNA, 424 bp, Zea mays
  unsure (1)..(424): unsure at all n locations
  Clone ID: TF_LIB3062-027-Q1-K1-G5
acaagcagagcagagcagagcagcgtcgtgcgtccgagaagaagacgactcacaagagcagaacgagcaccgatcgatggcagtgatggccggggcggcgtccatggaggtggagcagggacctcccgggcttccggttccatcccaccgaggaggagctcctcggcttctacctctcccgcgtggtccacggcaagcagctccacttcgacatcatcggcagcctcaacatctaccgctgcctcccaaggaggacatggtgatctgcaagatctacaggaaggccacgccactgaaggagctcgagcagagggcctctgccatggaggagatgcagacgcgcatcggcggggctagagcaacatccctggtccaggccgncggctccaccggcgacgactacctgtcgtccgacgacacaagc

SEQ ID NO: 3090 - DNA, 579 bp, Zea mays
  Clone ID: TF_LIB4739-062-Q2-K1-D10
aatggcctctctagatctttcaatctatcattgcttactagctctctttgccgtgtgtaccggacgagaggggaaagtaggcaagcacgtgtaaatacctcctcgagcgaaggagcaatccagctccaacagcacacgagtacatcgccatgccgagaatcggagaagacggcaatggccgagacattactattaacatcagggtgatggccaaactcacggcctgattccgtttgcacacccacggacgaagagctcatggtgcactacctcttgatgaaggccctctccatgccgtgccccgtgcccatcgtccccgaagccaacatctaccggtgcaacccctgagcatctccctgcgcaaggtgttgactacgagaaaagagtgggttatctctcgcccccacggagcgctagtaccccaacatggtccgcctcaaccccaccaccgggagctggtactggaatgtcaccagcacccacaggtcatgctcgacgtgtgcatggccacttaacacagcggcgccaagatattgcgactggtgaacaaggacacttgtcttctatatgggaacgacg

SEQ ID NO: 3091 - DNA, 548 bp, Zea mays
  Clone ID: TF_LIB5116-016-A1-PF1-E4
acaatgccggacgagcctatcgctgttctcagtcagtactcggtagagacagatcggcaagtccttgcaagcgcttcgctgaacctcctctagtcctcttcctcccagaactgccgcattaggtttcgatccactggtcgcgatggtcgttgatccagttctcaagggatttgacctcaacatcgcggcagtagatgagtcaagccctttggaaggaatcggccttggcctgtatgcgactgagttcatccacaagtacctcagattcaatcccacggaccaggagctgatggagtggctcgaggccaaggtgagggatggaggcgcgagatctgaccctctgattgataaattcatacccaccatagaggtcgagtacggctacccccatcctcagcaacttccaggtgtgacgatggacggcacgatcaagcattttttctgccgtccgagggcgttcgagagtggacggaggaaacatcggaagataaaggcggagcgcaacgatcgtaccgcatggcacaagaccggcaaaagcatggcattga

SEQ ID NO: 3092 - DNA, 763 bp, Zea mays
  Clone ID: TF_ZmC151_4
ctccgccgggcggcccacacccacccacacaaccgcacctcgcacccattgaccagacggcggcgctcatctcctcacccacggttctccccatcggcctgctggcttctccccggcttccccgatactgatcctcatcactcatgtctgctgaagttgctggaggacacccttatttcctctcgtgctacttctggttcatatactgcataaaattccgagattttacttgatacaagtggaacactcagagttttgtgcgaatacttcctaccatgtgaatcagttgtagctggtgaatttggcaagactcaatttctcccatttgagttcagaaacgtttgcttggtctcctgcttcccttgagtcttgccaacaatagttttctctcatctctttctgtgacttgaccaacatctcttttggtcctgtcagtctcgcaatactcccttccaaagacttgtctagaggttggattgccctgctctctgctggcactgcagcctgctgaagtctttacttgctgcattctgtgctcacacttttgaaagctgctctcttctgctctgcgttgttgatttctgcactcaagcttctctcttcctgggcaactagtgatctccttgaagcatttcagcttttacctagagatttttctgttgttgctgaaggcaagagaggctttagggtgatggcgcaaactagcctgcctcctggttttcgtttgcacccaactgatgttgagctcgttttctactacctg

SEQ ID NO: 3093 - DNA, 310 bp, Zea mays
  Clone ID: TF_jC-zmX019Bb09b1
tcctacccgtgggcggacgcgtgggtggggatgctcttgcgctatggaacacgaaagcacacgtgttactacacctactaggcgccactcgttgtaaagacagactggttcatgcacgagtacaggctcgctgacaccggccgccgaaccaagaaggggtcgctcatgttggagagactgggagctgtgcctgctgcacaacaagaagaacgagtgtgagaagatgcggtttgagaagggggcagacggcggcgcagctaaagaggaggaggccatggacatgtgcacctgccactcgcaaatcacccac

SEQ ID NO: 3094 - DNA, 278 bp, Zea mays
  Clone ID: TF_700240279H1
catcactccactccctccatttccctcaccttccgtagtagctagccgccagccattaaccgaaccaaccattcaattcacaggccacagtgagcgagtaaagcgtctaatggttgtgatggtggccgttcatcagcagtagctgcagcagcgcctgtacgcgtaggctgagctcaacctgcccccgggcatctggttctatccgacggttgatgagctggtcgtgcactacctctgcgcgcttgcctgcgggctgtgcttgccggtgtccatcatcg

SEQ ID NO: 3095 - DNA, 773 bp, Zea mays
  Clone ID: TF_LIB5026-014-A1-XP1-D11
gccggccgttccgggatcccgcgcaggggctgaaagcctgaaactgctcaagacgccaccgtcttcctccgcgatcttctgttctctgtctctccctctctctttcctctagctcccaaccaaccaaaccaagagtacgtcgtacgtcaagtgcgccgcgtgtgtgtgtgccagtaggctacagggcacggaggaacgccgtcatgagcttgatcagcatgatggaggcgcggctgccgccggggttccggttccacccgagggacgacgagctcgtgctcgactacctctgccgcaagctctccggcaaaggcggcggcggcggcggtggcggcgcgtacggcggcatcgccatggtcgacgtcgacctcaacaagtgcgagccgtgggatcttccaggtattccgtcaggttcaactttgcgctaccgtgtatcgatttgctgcaggttctatgttgcgcatgctgcatgcacacttgcacctatcaacaacaagagcccagcagccagcaccggccgtagaaattgaacttaattagtagttgcgacttgcgatagtaagtaagcactaagcaggaaggaagattcattgaaagaatatataggcccggcccggatcaatcagactgtaccatgcacaaggtgaatcacctaagaacgaaaaagatagaccattgaggttttatagatttattaggtatgtaaaaaagcgaagataattcatccggccatgtgtgccagaaggaaaaagtcgacgcccattttctctgag

SEQ ID NO: 3096 - DNA, 378 bp, Zea mays
  Clone ID: TF_LIB3245-008-P2-N1-F12
gacactatagaagagctatgacgtcgcatgcacgcgtacgtaagctcggaattcggctcgagctcacctcccgtggcagcagccgtccaacactcgtactgcagtccacagtaagaaccaagccacagcgaataaaagattctatggtgatggcgccggttgcggcgcaacagcagcggcgccgtgacgcggttgcggagctgaacctgtccccgggcttgcggttccacccgacggacgaggagctggtggcgcactacctgtgcgcgcgcgcctcgggtcagtcgccctctgtgtccatgattgccgaggtcgacctgtaccgctttgacctctgggacctgtctgagcgcgccctctttggtcgacgtgagtggt

SEQ ID NO: 3097 - DNA, 298 bp, Zea mays
  unsure (1)..(298): unsure at all n locations
  Clone ID: TF_LIB3245-421-P1-N1-G12
ctcaccttccgcagcagctagccgccagccaagaagccgtccaacgaagtaaggcggagcgagcgagtnaagcgtccaatggtagcgatggcggccgtgcagcanaagcagcagcagcagcgccgcgacgcggaagctgagctcaacctgcccccaggcttccggttccacccgacagacgaagagctggtggcgcactacctctgcgcgcgcgccgcggagcgccgtccgccggtgtccatcatcgccgaagtcgacctgtaccgcttcgacccctgtgacctgccggagcgcgccc

SEQ ID NO: 3098 - DNA, 217 bp, Zea mays
  Clone ID: TF_LIB3060-022-Q1-K1-C4
gctcagcatccagtcagtcagtcctcgatcttctatcctctactgcctgcatcgattccatctgcgatcgattccattccatgcatcgaagctgcatcagggccatgacgatggcagctacgacgactatgatctcagcatcagcgcatgcgtcgacgtcgcagctgccgacggagttccggttccacccgaccgacgaggagctcatcctgcacta

SEQ ID NO: 3099 - DNA, 891 bp, Zea mays
  Clone ID: TF_ZmC9425_2
gcacgagggagaagccggtggtgctgccccgcccgtgtggcggagggagcctcctggtgggcgtgaagagggcgatgacgttcgtgccccgccgccggaagaagacggcggcgttgccgtcggcggccctgaagaccggctgggtcatgcacgagtaccgcctcgccgcgccgctgcacaagaacggctgcagcctggctcaggcgcaaggagagtgggtcgtctgccgcgtcttccagaagggcggcaacaggccgaggaggaggcagcgagaagcgtcgccgccgccgtccgctagcagcagctgcgtcacggatgcgtcgagctcggacctggacgaggtcagcagctagcttagctagctagctagcagaaccgaccgtacgtgccggctggccacaacatgcagtcaagaacgtacgtacgtatatgtataccgccaccagctcgtcgcgcgcgcacgtgtgctgtgcatgccgtacgtgtgcggccggcctcgacctcgatctcgaagagaggatgtgatcaagctgagttacggataagggggaacaacccatccacacgcacttctcctccgacccaacattatttgttgttaactagttttttcttttctttatctctttctttcttttgcactctgtacgtgtaatgtaatgcagtgtaatttaattagtgagagaagcatgacgccctactaccggccggattattagttaacagcaaattaattactacgtacctagctactactcgcgtcaaaaaaaaaaaaaaaaaaaaaaaaaaaaggcggacgcgtgggtatattgtcaaatttgtaacctgcattatatgcagaggtggtcgtcgtacgtgtcccaaaaaaaaacacaaaaaaaaaaataaacc

SEQ ID NO: 3100 - DNA, 667 bp, Zea mays
  unsure (1)..(667): unsure at all n locations
  Clone ID: TF_LIB4743-073-R1-K1-G1
ccggccgggagacagcagtgcacccacagcttcctggctgcttcgtccatctcgcccaatcgccctcccctactactcgctccccaccaccctacctctgacgcttcccccacccagtgccgccactcccagccttgactcgtccgctgggccgaacaccgccctcgacctcttcgccgtgccccctccaggctcctcttccccgcacggcggcgccgtcctggtggttacgcggggcgccggtcgggcgcgatcggccgtgcgggcacctgggctccggagaggtgagccgatcccgtcgtcggcctcgacgtgccgtttctgttcgcctggtgctggtgccctggtcggtgtgcggtgtttttgttgggcgtttatctgttctacgcgtccctggcgctcggggtgcgactgcgcggcgtgtgcggtggtgcggccacgatggtggtggattcgcttaggacattgtaaaatggaagtactgcgtgatatgcacctgccaccaggatttggattccatccttctgatatanaacttgtttctcactatctcaagaggaaaatacttggtcagaaaattgaaaatgatcttataccanaagtggatatatacaagcatgaaccatgggatttaccttgcaggngcaatcttccaatcaaggacaac

SEQ ID NO: 3101 - DNA, 373 bp, Zea mays
  Clone ID: TF_jC-zmX700222002b1
tctgtctaggtgctggtcctgtactacctgaggaacagggagggaggcaacacgatctaccttgacgtggtaaaagacgtggctctggacaaaattgagccctgggatctccaaatgaagtgcacgatcgggactgtagaccaaaacgagtggctcttccttggccacttgggcgaaaagtacctgatggacaccctgaccaaccgggctaccaccgacgtgattctggaaggcaaatgttcgtgacaagcccatttacaccaagaggtgtctagatagcatgagtaagactctcgtcttctacaagggccgcgcgcccaacgtgcccgagtccgactggatcatgcacgagatccacctaaagactaccgat

SEQ ID NO: 3102 - DNA, 775 bp, Zea mays
  Clone ID: TF_LIB4738-071-R1-K1-H12
aaaccatccggctacagcaagcaaccgtagcagtcgtagatgtgcagcgcgcgcagccaattccttcttactcccccgggccttccctctgtctctctcctcttctcttcagatcgacgtgctggttgcagagtgcaaactgcgtatataatatacagttcgttgttcttccagctccgcacataaagatagatagatatacagggaaaaagtgtagtagctggagcagaagctagctagcatggggctgcgggacatcgagctcacgctgccgccggggttccggttctaccccagcgacgaggagctggtgtgccactacctgcacggcaaggtggccaacgagcagctcgcaggcgccggcgcagccatggtggaggtggatctgcacgcccacgagccgtgggagctccctggtacgtgtactcgtactcggtgccttgacagttaattcagttgtttgcttaatttagcgtctctagcaagcaatctccgtgcgtaattattaactcgattccgtgtcatggaacgagtaattacgcacgcacgcaacctcggtttattggttcagcttcagccatgttgattcttgtttgttttgttcttgttagttgtctgttaattattattattggaagaagatgcttatacaatatatttttccctttcacaactgacgatccagttaatagtaaacaccgaataccgattgctctacacatctgaagcttactgactgataaactgatgatgaatccatgcatacgcgtattac

SEQ ID NO: 3103 - DNA, 854 bp, Zea mays
  unsure (1)..(854): unsure at all n locations
  Clone ID: TF_LIB4980-065-R1-K1-E6
ccggccgggccgggccgagacaacaggcgagctcgggacctgagaaacaaccagccaaccagggcaggacgaccagacaggctccgcgtttcccggcccgcgagcgcgagcgcgagctcatcgccttcccggttcccgccgcgccgcgggctttcccgccttccccgagccctcctcccccgcacacccacgaccagtgtgtgggtgggtcatgggtgtgtgtggagactactgggagtgggaggcgttataatcggtcggcgcgcggacgtggggggagggggggctaatccggccgtgcgcgcaaccggaccgggcgcggtagccagtgcgtaggcgccgttccgccgctgccgcctcgcccggcgttcctcgccgccagcacagggcgtggccggagcccgcgcgccaccatggcaaggtcatggctgataacttgtaggggaattgctaagaaaataaggtacacaaatcctggcgctaatcaccatataagtgaactggttgcagaagcacggagggaatgcccaaactgcagttatattattgataacagcgatgttgccatgcagtggcctgggttgcctgctggagtcaagtttgatccttctgaattggagttgcttgaacatttagaacagaaagttggcctgggagattcaagaccacatgtgctcattgatgaatttattccaactatagacaatgatgagggaatctgctattcacatcctgaanatcttcctggtatgaaaacagatggtagcaatgctcatttctntcatagagtttcaanaggcgtatggttgtgggcagcncaagcgtcgaaggacccatcactgcagtgatcacac

SEQ ID NO: 3104 - DNA, 145 bp, Zea mays
  Clone ID: TF_9743024
ggaatccctgaagtagacctctacaaatgtgagccttgggagctagcagagaaatcattcctgcctggtagagactccgagtggtacttctttgggccaagggataggaagtatccaaatggatgccgcacaaaccgcgcaaccc

SEQ ID NO: 3105 - DNA, 186 bp, Zea mays
  Clone ID: TF_LIB3117-005-Q1-K1-A2
cactcgttcgccgacgcgtgggtgggacctccctaaatttgcaaagatgggcgacaaggactggtacggagtgtaccataaagaccggaagtgcccgacagtgctgatggctaaccgggccactgacgcgggttattggaaggcgaccgctaaggacaatgatgtctacaacccctttgcagcgga

SEQ ID NO: 3106 - DNA, 383 bp, Zea mays
  Clone ID: TF_LIB3206-117-P1-K1-E11
cgacccactcttcctcagactccttatctccacttcactccattccccttacctaccccaccatttacccttcagccgacatccgaactaaccaaccaacccacactccactactagcgaataaagcgtccaatgctagctattacggcctcgcagcaacaccatcaacaacatcgcctcctacgcgtaccctgagctcaacctcccccctgtcttaccgtttcacccgactgacgacgatctggtggcgcactacctctacgcacgctccatgtctcgccacccgccggtatctatcatcgtcgaagtctacctgtaccgcttcgacccctgtgacctgcctaagcgctccctcttcggactccgctagatgtacttcttca

SEQ ID NO: 3107 - DNA, 2117 bp, Zea mays
  unsure (1)..(2117): unsure at all n locations
  Clone ID: TF_ZmC9370_13
tcaaggagagacatggcttcgcacccggcccgcactatcgacgattttgtcgatccgaggcagcgggaagttgtccttggggcaggccttgttgagactggtgaagtcaatgcacatccgccatttgtcgctcttcttttgcaccatcactacattggcgagccatgtaggattggcgactggctcgataaatttagcctcaagcaggcgatgtacctcggccttggcggcttctgtcttctcatcagacatcttgcgcaaccgctgtttcttcggcctcaccgaagggtcgattcccaagctgtgctcgatgatggagcgactaactccgaccaggtcgagggtggaccaggcgaagacgcctttattttttgacagacagcagaggagtctctcctcgtcatgtgaagtgaggtcttcgctgatggtgactgtttgtttgggcgttgcctggtcgaggggaacagtcttggtcccgtcgttgctctgcaactgtgccttgtcatgttctttggcggttgggctggcagactcggggacctcgcactgggccatgaggcagtgtacattcctttgcccaggaacgaagtctctttctatgttgcgcgcggcctgctggttgccgtagactatgatcgtgccttgcggacctgggatcttcatgcacaggtaaagtccgtgaatggctgcctcaaacttgttgatggagccccgacccattatggcattgtatgggtacaccatgtcgacaatgttgaacgtgacttgctcgcttcgtgcattgggcgctacaccgaaggagaggggtaactctattttgccgacaggaaaggtgcccttgccgccgaagccatatgggttgtctgaaggcttaagcaagctgtgactgatgcccatgcggtcgaaggcatggaggaaaatgatatccgcctggctgccattgttgactaagactttgtgcaggtcccagcctgccacgctgcagttggtaaccatggcgtcgatgtggggtgcgctgcgcaggtcgacgtctcgggcgtcgaaggtcaatggcacatgggaccactttgtctgcacgactggaccagtgacggcgacgtggttgatgttgtggtagtggtctctcttctgtcgcttcatgtcgaagtcgacgctggaccccccagtgatcatgtgaatgactccgcgatacggctgatcgacaaagtcttcttgctttggggcttgggggtggtggggtggtggatgatttgttgttgcggatgaggaggtgggggtgggggaggtacgatttgtacctcggctggactgcagagggtctttgggtttcctctgagactcgactttgcgttggtggagctcttcggatctggcgtatttttcgaatagctgatacagctcctggaggttcctaggcggatctctgatacagtggctgtaaaggacgccagcccgaaggccactgatggcgtagtgaatagcgatttggtcatcgaccgaaggcagttgtgacttgagagtcagaaacttgcggtagtactcccacagagtttccctttccagctgcttgcagagtgaaagttcagccaaggcgtcggtgtctgggcggtacccttggaagttgagcaggaatttgtcccggagacttctccaggagtcgatggacagcgggggcaacctagtgtaccaggtgagggccgggccttcgagggcgatgatgaatgacttggccatgcgccttgcggcggaggtagtacagcancagctcctcgtcggtggggcggaagcggaagccgatgggcaggcccgcgacgggcgcgccggggccccgctgctgcaggcgccacgcgccgggccgggcctccatcgccgccgccgccgatagacgggatcggatcaggattcggttttggatttgtttgggtggcttgcgcgcgatctgcctgggtgatcgatgtcagacggtaggcggcatcggcgacctggtttttgtggcggcggcggcggctgtggtagcggcatggctatcgaaggcttcaaggccaaccacgccaagtctggtggctgcggctctggctgaggtggtggctgcggcaccctgttcggctccagcgctg

SEQ ID NO: 3108 - DNA, 293 bp, Zea mays
  unsure (1)..(293): unsure at all n locations
  Clone ID: TF_LIB4765-026-R1-K1-C2
attgggtactcgagcggccgggactactatcaatgggctcggattggtactctacttgtncgctgtgggcgcccagaggtgctgcaatggagcaggagccgcaccggcccatgggagctgcccccgggcttccgcttccacccgaccgacgaggagctcatcacgcactacactggncggcaaggncgccgacgccgcttcgcgcgttcgccgtcgccgaggncgacctcaacaagtgcgagccctgggactgccatgctggcgagatggggagggaagagnggacttcttct

SEQ ID NO: 3109 - DNA, 1266 bp, Zea mays
  Clone ID: TF_ZmC198_13
ggccgcttttttttttttttttttaggtacggtactagctcgtcatcagtatgtatatatgataatgccaaaccaaaagatacctagcagcagtatgcatgctagctattagtataggtctgtggaacaatgaccatatatatatagctacttcatcgaggacgacggtcgatctgagattctgagattgcattggttaaaagttgaggacgctggggtagtagggagaccagctctccatccatgggctccgcagctgcgtcaagaaggggtcctgcatccactcctgctgctgcttcgccacctccagctgcggcaggctcagcgtcgacggcctcatcagcaccgccggcagcggcgcctcgggctcggccacctcctcctcttgcttcatgctcatcatcacaggcggtggtagtggtggtggtggtgagatgccgccgacgggcatcgtcatcatgatctccactccctgcccaacaagttgggtttgttggtcctggtcggacgacgacatggagtcggcgggcgacccggcgttgtgggacgcggacggcgtggcgcgcgccagctcctccatggccactcgctgctccagctccttgagcgacacggccttccggtagaccttgcacagcacgatgtcctccttgggcgagttgttggtggtggtggtggaagaggccgccgccgcggatgagtcgccggggacggcattattgttgttgctgttgttattgcaggcgtcggggaggcggtactcgttcatgacccagtcggtcttggtgccacgaggcgcgcggccctcgtagtagacgagcgtcttcttgaggccgatgaggcgcttggggtcgtgggcgcagcgcacggcgcggtcggagcccgtagctttccagaagccgcgctccgtggtgcggctggggcgggcgccggacgactggtggtggtgctgcttggcaggccggccgccgtcgcggggcacgaagaagtaccactcgcgctcgccgatgcgcgccaggcccgggagctcccaggggtcgtggcggtacaggtgcaccgtggggatgatgtcgaacttgagcttccgcccgtgcgccacctgcttcaggtagaactccagcagctcctcctcggtggggtggaaccggaaccctggcaggtccagctgctccgccatggatggatcgacgacgacgacgatagatggaggccggtggagaatggagatgagctgatagagatgagaggaaagagcaggccgggttc

SEQ ID NO: 3110 - DNA, 1256 bp, Zea mays
  Clone ID: TF_ZmC1378_1
cccacgcgtccgcccacgcgtccgccacaagcttcctcctccactttttttatctgctttttccccctcggctgttcctactcaggctgggcagcagagctagcagtggtccctggtgcttcaggcgaccggccatggtggagctggagcctagtgtgaagtcggagcatggtggaggagtcggcctggtcctgcctcctggcttcaggttccatcccacagacgaagaggtcatcaccagctacctcctgcacaagttcctgaaccctagcttcgcgccgcacgccatcggggaggtggacctcaacaagtgcgagccatgggatctcccaagcaaggcgaagatgggggagaattccaaggagtggtacttcttctgccacaaggacatgaaataccccacgggcacgcgcgcgaaccgcgccaccaaggagggctactggaaggccacaggcaaggacagggagatcttcaagccagctgcagggcgtgaccgtgaccgcgagctagtggggatgaggaagacgctggtgttctacatgggcagggctccgcgcggcaccaagaccaactgggtgatgcacgagttccgcctcgagggcaagtccaggcacacctgcaacgacctacgcttcaatcccaaggatgaatgggtcgtgtgcaaggtgcaccacaaaggggccgaagaggccagcgccgccaagaagtccgccggcgggggcggcgaggagcactactactccaccgcaacgcccaacgtcagctccgtcgaaggcggcgacgagttcctcgtcgactccctgctggattactccagctacttcaactgcttcgcaaccggtggcttgcctctgcccagcacgacggccaactcagccgcagcacctgcaacgaacgacgacgactcctcctggagcatgcttcgtcacgcgccggcagaccagcaagcaatggtggggagctacagcttgcaccaccaggcaatgaaggcgaaaactgtaggcggcgtcacctccccgagtttctccgctggtttgccgagctcgccggtggcggactacgtgggaaacgatgcttctggctaccatacaaacaactattaattaacgatggatgatgagccgctgccgaaaatatagtgatccaataggtggtgttaggctattcacacttactgtacagttttaaaacaatgtcacatcaaattttgtttatggaaccgtgtacactgagtttcaactagatgcaactctctc

SEQ ID NO: 3111 - DNA, 712 bp, Zea mays
  Clone ID: TF_LIB5117-019-A1-PF1-A12
gatttcccaacacagctcgctcaccacatcttacagccatcggaatcaacagcagcagcggagcgatttcatcgactaacaaatcagcggacatggggatgccggcggtgaggaggagggagagggacgcggaggcggagctcaacctgccccccggcttccgcttccaccccaccgacgacgagctggtggagcactacctgtgccgcaaggcggccgggcagcgcctcccggtccccatcatcgccgaggtcgacctctaccgcttcgacccgtgggcgctccccgaccgcgccctcttcggcacccgcgagtggtacatcttcaccccgcgcgaccgcaagtaccccaacgggtcgcgccccaaccgcgccgccggcaacggctactggaaggccaccggcgccgacaagcccgtcgcgccccgcggagggcgcaccatggggatcaagaaggcgctggtgttttatgccgggaaggcgcctaagggggttaagaccgactggatcatgcatgagtaccgcctcgccgacgccggccgcgccgccgccagcaagaagggctcgctcaggctggacgactgggtgctctgccggctctacaacaagaagaacgagtgagagaagatgcagctccagcagcagggcggagaggagatgatggcggaacccaagcggagaacacgcgaccgacatggtggtcacctcgcagt

SEQ ID NO: 3112 - DNA, 723 bp, Zea mays
  Clone ID: TF_LIB5116-031-A1-PF1-F10
gttcctcatcttcctcttgtttctcttgcttctctctcgctctctctatccttcgttggtttgggcacaaaaggcaacaggagattttccaagatcgatcttagggccggcgagggagagagccagcatgcatccgagtggcggcgcgctgtcggtgccaccgggcttccggttccatccgacggacgaggagctcctctactactacctgaggaagaaggtcgcctatgaggccatagatcttgacgtcatcagggagatcgacctcaacaagctcgagccatgggacctcaaagatcggtgcaggataggcacggggccgcagaacgagtggtacttcttcagccacaaggacaagaagtacccgacggggacgaggacgaaccgggccaccacggcggggttctggaaagcgacgggccgcgacaaggccatcttcctcggcagcggctccaggaggatcggcatgaggaagacgctggtgttctacgtcgggagggctccccacggcaagaagaccgactggatcatgcacgagtaccgcctagacgaagacaacgtcgaggtccaggaagatggctgggtggtgtgtagggttttcaccaagaagagctacacgagaggcgtgaacccggcggagatggcggggtacgacgacgacgagctcctccaccctttcccggttccatcttccaccgccggcgcaatgcatatgatcacgga

SEQ ID NO: 3113 - DNA, 608 bp, Zea mays
  unsure (1)..(608): unsure at all n locations
  Clone ID: TF_LIB3591-121-Q1-N6-E2
tagctagctgctgacctcgtccatgtccgagctcgacgacgacgacccgtccgtgacgcagctgctagcggacgacggtgacggtgacaccggtcgttgcctcctcctcctcggcctgccgctgcccttctggaagacgcggcagacgacccactctccctgagcctgggccaggctgcagccgtgcttgtgcagcggcgcggcgaggcggtactcgtgcatgacccagccgatcgccagggccgccgccgccgccgccttcttcttcttccgccggggaacgaacgccatcgccctcttcacgcccaccaggaggctcccgccgccgcacgggcggggcagggccaccggcttctccttccccgccggcctccaccgcccgctcgcggtcgccctcctagcacttccgacgccgcccgccggccgcaccgcgnaagaagtatctctcgccttggctgctcgcatctggatcgatcgtagggaaaaagcaaagaaaaaagcttgcgattttagttctttctcctactactactgagtactgacagaaacgatggatgctnngctggtggttcgaagcgccgtcgtcgatcgtgtatgtaccaggggcg

SEQ ID NO: 3114 - DNA, 232 bp, Zea mays
  Clone ID: TF_700239811H1
actccctccatttccctcacctcccgcagcagctagccgccagccaacaaccgaaccaaccaaccaacccacaggccacagcgagcgagtaaagcgtccaatggtagcgatagcggccgtgcagcagcagcagcagcagcagcgccgcgacgcggaggcggagctcaacctgccgccgggcttccggttcgacgcgacggacgatgagctggtagcgcactacctctgcgcg

SEQ ID NO: 3115 - DNA, 333 bp, Zea mays
  unsure (1)..(333): unsure at all n locations
  Clone ID: TF_LIB3182-016-P2-M1-F1
ctctcactgactgactactgtaataccagagggcgaacaacttggggcggcgggtgaagaagagagttatgtgcattcgtgggccgggggcancagacagagatagagagccatatcaacggaccagcagccgcagctctaagacgagatgaacgactctgcctgcagcggagctaggctgactccagaggttcgtttccaaccaaccgacttctagatatgcactttatacctcaccaacaaggtgctgaacacgcgcttaacctggaccgacatcaccgaggccgacctaaacaagattgcgccatggaacctccctagcaatgccaaaat

SEQ ID NO: 3116 - DNA, 2064 bp, Zea mays
  unsure (1)..(2064): unsure at all n locations
  Clone ID: TF_ZmC27_16
tcggcacagctctcctcccctcttcctaccttagcagtagccacagccagaacaccagcagacagcagcatcagcagggaggaacacgatgagcggcgccggtccggatctgcagctgccaccggggttccggttccacccgacggacgaggagctggtgatgcactacctctgccgccgctgcgccggcctgcccatcgccgtccccatcatcgccgagatcgacctctacaagttcgacccatggcagctcccaagtacgtcccgtcgtcctcggtcttcttgcagcagcagtagcagccgtgaaccaatttcctgtgcggccgtgacgatggcgagctaatcgatcgattgctaactctctgtgtgcagggatggcgctgtacggcgagaaggagtggtacttcttctccccgcgggaccgcaagtacccgaacgggtccaggcccaaccgcgccgccggggctgggtactggaaggccaccggcgctgacaagcccgtgggcacgcccaagccgctggccatcaagaaggcgctcgtcttctacgccggcaaggcgcccaagggcgagaagaccaactggatcatgcacgagtaccgcctggnncgacgtcgaccgctcggcgcgcaagaagaacagcctcagggtaagaacaagcgctccgccgccgtccgtccgtccgttggcgtcgtcaccgtccaaatcaaacaaaaagaacttggcgataatgtgtcgctttcgtaatgaacgcggggataagcgtggcccatggttttgggccgctgaattttttttacgtgggccatgctaggtggggtggggggctgcaccgtgcccaatgattcgaccgcgtcgcagtcctccgcgcgcaagtattcgatgcccatgggtcatagcgaacagatcattttcgcccgtcgcgccctgcgacggcgacggcgacggagagccagtggggtctcactgggattagacatcgaaatgacgctttgtgattctttagctcatccatttctcgtcagctgcacggacgacaaactaagttctctattgtgttgacgggtgcagttggatgactgggtcctgtgccgcatctacaacaagaagggcggcgggctggagaaggcggcggcgccggcggccggcggcgaccacaagcctgtgttcgccacggcggcggtgagctccccgccggagcagaagccgttcgtggcggcggcgggcgggctgcccccggcgttcccggagctggcggcgtactacgaccggccgtcggactcgatgccgcggctgcacgcggactactccagctgctcggagcaggtgctgtccccggagcagctggcgtgcgaccgggaggtgcagagccagcccaagatcagcgagtgggagcggaccttcgcctccgaccccgtgaaccccgcgggctccatgctcgaccccgtcgtcggccacgccggcggcgacccgctgctgcaggacatcctcatgtactggggcaagccgttctagacgacaccgcccatcatgtcctgaggggaggtgggggtggcgaagcatcctcggctgcggttggttggttgattgatctgtcttgggcagcgcaatgcaatgcaaccgcacggtgtgggctttgactcaggcgagccgccattgttgacttgcaaggaggatataatatgaaactatagctggattacatggagaggcggcaatgagaccgtctggccccgccggaagggagacggagacggagacggatggcgcagtgcatcgggtgtggtggatcgtgcgcggcatgtgtgtgtgtggctgtacatatacatactgtacatgattggttcagtgcagggtttctgttccttcattgattagttattatactaataagtactagtaattttgtaagggcttgtagttgcagtctccgtactggtggtaggtagtgcaggccatattcgtcatcgccaagcttcgagtgtacttactcctacaatatatattttacagtaaatattgtagctgttggctcttcggaaaaaaaatggaagttattttgttt

SEQ ID NO: 3117 - DNA, 1671 bp, Zea mays
  unsure (1)..(1671): unsure at all n locations
  Clone ID: TF_ZmC1509_1
caccctcgcattggtttctcttgatcgctttgtcacttgaatccgtgcctgctctaacagagagcggagacgaccacgacgacggcgaggccaggctctgcgatggagcaggagccgcaccggcccatggagctgcccccgggcttccgcttccacccgaccgacgaggagctcatcacgcactacctggcccgcaaggccgccgacgcccgcttcgccgcgcttgccgtcgccgaggccgacctcaacaagtgcgagccctgggacctgccatgtaagcaacgcacgcgccggcatagctactagatcatgtttctgcacggatcgagtcatgcatggcttcataaaggaagaagaagaagggagttatgatatgtgatttggttgcgccagcgctggcgaggatgggggagaaggagtggtacttcttctgcctcaaggaccgcaagtacccgacggggctgaggaccaaccgggccacggaggccgggtactggaaggccacgggcaaggacagggacgtcttcaggggcaaggcgctcgtcggctccaagaagacgctcgtcttctacacggggagggcgcccaggggcgagaagtccggatgggtcatgcacgagtaccgcctccacgccaagctccacggccacggccacggccaaggcgcagccgtcgtcgtcgtccccaaggccgccgggtccaagaacgagtgggtgctgtgcagggtgttcaagaagagcctcgtcgtaggtggtgcagctgcagcagcagcaccaaccgcaggcaagaggggcggcacggagacgtcgtccaactccaagacgggcgacgtagcggccatcgcccacctccctccgctgatggacgtgtccggctccggctccggcgccggcccgccgcggcggcggcacacgtgacctgcttctccgacgcgctggagggccagttcttggaccagacgacgaccacgccgccgccagaagccgccaccgccgccacggacgacgacggccacctcggcgccctcggcgcctcctcctcgcccttccagctgcccggcttcgcgcactactactacggcggcgggccgccgcacctgcaccagcaccacggcgccgccagcctggtgcagctcctggagggcagcgtgccgccgtgcaataagggcggcgagcgggagcgggagcggctgagcgcgtcgcaggacacggggctcacctccgacgtcaaccccgagatctcctcctcctccggccaacgcttcgaccacgaccacgaccatgaccaccacctctgctgctggggctactgatcgtcgattcgatgagcctacgacgactaccgagcgcgcatcatgcatgcgtcgcgttattactagcgattagtgtatagcacactgctgtaaataaaacatctactagtactacatctgcgtgaggtcgacgatcggccgtgtggtggtggtggtgcgtggcatgcatgcgtcgagctgcctacgtttcattatctgctcgtgtgatttgttactgtagacgagtgtgggggtgtgtaattagcattgttgatgtattattattcacgatttggtggaataatatctccttggttaatgaaaacgccaaaaaaaaaaaaaaaaagcggccctcgagctgccagnttgttgttctcctt

SEQ ID NO: 3118 - DNA, 795 bp, Zea mays
  Clone ID: TF_ZmC8549_1
cgtcgtcttggctagctgcctagctagctagctagttcctcactcctctccgagaaccccctttttcatctctctctctctctctctcggtctcgcccagctcctttcgatgttatcgtctctgctggcctcgcaactcgtcgagagagactcgtgaaaaagaatccagatatagctagagagaccgagagggcagctagcttaattattagcatgtcgatgagcttcttgagcatggtggaggcggagctgccgccggggttccggttccacccgagggacgacgagctcatctgcgactacctcgcgcccaagctcggcgccaagcccggcttctccggctgccgcccgcccatggtcgacgtcgacctcaacaaggtcgagccatgggacctccccgtggcggcgtcggtggggccgcgggagtggtacttcttcagcctcaaggaccgcaagtacgcgacggggcagcggacgaaccgggccacggtgtccgggtactggaaggcgacggggaaggaccgaccagtggtggcggcgcggcgaggcgcgctggtggggatgcgcaagacgctcgtgttctaccaggggagggcgcccaagggcaggaagacggagtgggtgatgcacgagtacaggatggagccagctgctcctcttcttgatcaccaaccctcctcatccaactccaagcaggatgaagattgggtgctgtgcagagtcatctgcaagaagaaactggcagcaggaggccgcgcaggagggggcagctcgaggagcctggtcgccagcaac

SEQ ID NO: 3119 - DNA, 1592 bp, Zea mays
  Clone ID: TF_ZmC27_23
ccggccgagaagctctcctcccctcttcctaccattagcagtagccacagccagaacaccagcagacagcagcatcagcagggaggaacacgatgagcggcgccggtccggatctgcagctgccaccggggttccggttccacccgacggacgaggagctggtgatgcactacctctgccgccgctgcgccggcctgcccatcgccgtccccatcatcgccgagatcgacctctacaagttcgacccatggcagctcccaaggatggcgctgtacggcgagaaggagtggtacttcttctccccgcgggaccgcaagtacccgaacgggtccaggcccaaccgcgccgccggggctgggtactggaaggccaccggcgctgacaagcccgtgggcacgcccaagccgctggccatcaagaaggcgctcgtcttctacgccggcaaggcgcccaagggcgagaagaccaactggatcgtgcacgagtaccgcctcgccgacgtcgaccgctcggcgcgcaagaagaacagcctcaggttggatgactgggtcctgtgccgcatctacaacaagaagggcggcgggctggagaaggcggcggcgccggcggccggcggcgaccacaagcctgtgttcgccacggcggcggtgagctccccgccggagcagaagccgttcgtggcggcggcgggcgggctgcccccggcgttcccggagctggcggcgtactacgaccggccgtcggactcgatgccgcggctgcacgcggactactccagctgctcggagcaggtgctgtccccggagcagctggcgtgcgaccgggaggtgcagagccagcccaagatcagcgagtgggagcggaccttcgcctccgaccccgtgaaccccgcgggctccatgctcgaccccgtcgtcggccacgccggcggcgacccgctgctgcaggacatcctcatgtactggggcaagccgttctagacgacaccgcccatcatgtcctgaggggaggtgggggtggcgaagcatcctcggctgcggttggttggttgattgatctgtcttgggcagcgcaatgcaatgcaaccgcacggtgtgggctttgactcaggcgagccgccattgttgacttgcaaggaggatataatatgaaactatagctggattacatggagaggcggcaatgagaccgtctggccccgccggaagggagacggagacggagacggatggcgcagtgcatcgggtgtggtggatcgtgcgcggcatgtgtgtgtgtggctgtacatatacatactgtacatgattggttcagtgcagggtttctgttccttcattgattagttattatactaataagtactagtaattttgtaagggcttgtagttgcagtctccgtactggtggtaggtagtgcaggccatattcgtcatcgccaagcttcgagtgtacttactcctacaatatatattttacagtatatattgtagctgtgttggctcttccggaaaaaaaatggaaggggaaaatagggattatgttattttgattaaaaaaaaaaaaaaaaaaaactcgagggggggcccggtacc

SEQ ID NO: 3120 - DNA, 1291 bp, Zea mays
  Clone ID: TF_ZmC604294_1
cattgggtacctcgaggccggccgggctaatgacacaagcggcaggccgccgtcgatcgatggggggagcatccggaggcgaccacccgcagcagcacggcggcggcgacgatgggcacctgcagcaaggcggcggaggcgacatggtgatgccggggttccggttccaccccacggaggaggagctcatcgacttctacctccgccgtagggtggagggcaagcgtttcaacatcgagctcatcaacctcgtcgacctctaccgctacgacccatgggatctccctgctctggcttcgatcggggacaaggagtggtacttctacgtgccgagagaccgcaagtaccgcaacggcgaccgccccaaccgggtcacgccgtccggctactggaaggccacgggcgccgaccgcacggtctacgtcgaggtcaagcggccgatcgggctcaagaagacgctggtgttctacgtggggaaggcgcccaagggactcaggagcagctggatcatgaacgagtaccgccttccttcaggcgaggccgaccgctaccaaaaggaaatttctctttgcaaagtgtacaaacgaccagggattgaagacaactttcacctcagcaccaccacagcaagatcatctggctcaaaggctgcagcaaccatggaaaagaagcaccaccgaacatcggcgtcgccccgcatggcgccagtgttcgacggtggccactcatcaggttacatgaacaagccatacacttagcgcaaccaccaccatggaggaggtcgcatcatcagtcgcagctcgagaagctgctcttaacccaccgatgttgccttcttcaacacacgccctgcttaatgcaaactccgctacaatggcaacaattccaatagatgagctgagtagggcaattggatgccaaggagaccctaaccagaccttgccaacacaagctccattgcttccttttcctaacttggaaaagatttgggattggaatccactcctagaatctcccaaggtttgcacaagcttcaagtgactttcaagtggctcgaagcatatatgtgcatgcttgcatgcgtgcacctattatttatgaatacaagtgtgtatatgtgcagacacataattattatttgggctagaatgtggttgagatgtaatggaatatataggatgagatagttctagtcctatctaatgctccactatattaatcaattcaccatcacaaatatgtactatgttgcagtgatcatttgaacttaatttaaaaaaaaaaaaaaaaa

SEQ ID NO: 3121 - DNA, 792 bp, Zea mays
  Clone ID: TF_ZmC156397_1
cattgggtacctcgaggccggccggggcaccaccctcttatcctgtcctcccacttgcctcgcacccccaaattccacgcctcctcctcggcgcagtgctcccctcggcgttgccctagcccccgctggctcgccgccgcttccagcgcgcgctatgccatgagcagagacctcgaggacgggcacggcgccgtcggcaacgttattgcggcagcagcagctgcaggaggggaggcggtgggtgccggcgaggccggggacgcgcacgacaacgacgtggtgatgccggggttccggttccaccccacggaggaggagctgatcgagttctacctccggcgcaaggttgagggaaaacgcttcaacgtcgagctcattgctttcctggacctctaccgcttcgacccatgggagcttccagcaatggcggtgatgggcgggaaggagtggttcttctacgtgccgagggaccgtaagtaccggaacggagaccgcccaaaccgggtgacggcgtcggggtactggaaggcgacgggcgctgaccggatgatccgaggcgagaacaaccgccccatcgggctgaagaagacgctcgtgttctactccggcaaggcgcccaagggcgtccgcagcagctggatcatgaacgagtaccgcctcccgccaccacccaccgacgccgacccattgattcccaagtccgagatctctctctgccgcgtctacaagcgctcaggcatcgacgacggccacgggcagtcatcctccagcacccaagcttcctcagcgcgg

SEQ ID NO: 3122 - DNA, 1497 bp, Zea mays
  unsure (1)..(1497): unsure at all n locations
  Clone ID: TF_ZmC1381_1
gngcagggaaacaggcagctctccacggacaacgcgattctatttagttatctggcggctgccagtgccagccagccgcctttcgaaaccgagcacgagggagccgacgtggtggtctctggaacctggttcgagcgagcgagcgatccatctatccagccgcccgccgggaatttctgtgacgaggaggaggaggaggagggggtatggcaatggtggcgtcgcagggaggcggccggagggacgccgaggcggagctcaacctgccgccggggttccggttccatcccaccgatgaggagctggtggtgcactacctctgcaggaaggtggcgtgtcagcagctgcccgtgcccatcatcgccgaggtcgacctttacaaattcgacccgtgggatcttccagagaaggcgctgtttggccgcaaggagtggtacttcttcacgccgcgggaccgcaagtacccaaacggctcgcgccccaaccgcgccgccgggagagggtattggaaggcaacgggcgcagacaagccgatcgcgcccaagggcggtggcggggcggcaggaatcaagaaggctctcgtcttctactcgggcaaggcgcccaggggattcaagaccgactggatcatgcatgagtaccgcctcgcggacgcggaccgtgcgccgggcaagaagggctcacggaagttggatgagtgggtgctgtgccggctgtacaacaagaaaaacaattgggagaaggtgaaggcggaggagccggaggcggcggcgccgctccgtaaccagcagggcgcagcggaggattccatgtctgacagcttccagacgcacgactcggacatcgacaacaatgcctttggtgtgcagaacggcttcggtaacatggtgcacgggcaggccatgaccatgaggaacggcattggcagcgtggcgaggacggtgaaggaggatagctattggttcacggacctgaatctagatgatctgcaggcgccctacaacgtgacccatgtgttgaatccgaacccggtccagacgatgaatctggcggctgggcaaggccatggctacttgcagtctatgagctcgccgtcgacgaagatgtggcagacgatcctgcctccgttctgagagttgctgtgatggaagggggaagagatgatcttgggcgtaggagtggttagactggctaggaacagcaggtttaaaatttggagggtttgaattctgcaactgttgctggtagtcttgtaagggttattcatttgttaaattatgtgcttggtaatataccaaaaggaaaatccatctccctttgcactacttgaagaaaccagtacaaaattacagttctcatatttaatatggtcggtttgagccaaaattggtttagggcatttcatctttattatggtaaaaattcaaatagttttttcataatgattaaatggtaggagtaacattcagtgaatggaatcgactcccttttttccct

SEQ ID NO: 3123 - DNA, 823 bp, Zea mays
  unsure (1)..(823): unsure at all n locations
  Clone ID: TF_ZmC5878_3
cggccgcccagtgttctgaagcccgatgcgtccgatcaatcagagaaaatcatccctccctatctctccagctcttcttcctcctcctcctcctcgtcagctcccgagttcttcctgagcgaagcaagccaaggcaagctaggtagcagatccaagaaggagaagcgatgtcggacgtgacggcggtgatggatctggaggaggaggagccgcggctgtcgctcccgccgggcttccgcttccacccgacggacgaggaggtggtcacccactacctcacccccaaggccgtcaacaacgccttctcctgcctcgtgatcgccgacgtcgacctcaacaagacagagccgtgggatctccccgggaaggcgaagatgggggagaaggagtggtacttcttcgtgcacaaggatcgcaagtacccgacagggacgcgcaccaaccgcgccacggagaaggggtactggaaggcgacggggaaggacaaggagatcttccgcggcaagggccgggacgccgtgctcgtcggcatgaagaagacgctcgtcttctacaccggccgcgcgccccgcggcgataagacgccctacgtcatgcacgagtaccgcctcgagggccagctgccccaccgcctcccccgctccgccaagaacgattgggctgtttgccgggtgttcgacaaggacttggcggcgaagaatgcgccgccccagacggcgccggcgggccgtcgnnggtcatggaggacccgtacgcccttcttcgacgtcgacgacttcctcacaaccccgacctgctcaacacgccgacctgccgatgctct

SEQ ID NO: 3124 - DNA, 355 bp, Zea mays
  Clone ID: TF_LIB3245-118-P1-K1-E12
gtccactacagtcactgcattttcttcaacttgcatactaacttggcgccagacttcaacagggccaagcgacctacccacaggccacatcgagaggagtaaaacgcacaatgattatgatagtagccactcataagcttctgcagcaaccacaccgtcacgctgaagcggagctaaacctggccccgggctttcggtttcacccgacagacgaagagctggtggcgcactacctctgcgcagcgcgccgagatgcgccgtccgccggtgtccatcatcgccgatgtcgacctgtaccgattcgacccctgggacctgtcggagcgcgccctattcggtcgacgcgagtggtact

SEQ ID NO: 3125 - DNA, 824 bp, Zea mays
  Clone ID: TF_LIB4741-095-Q1-K1-A5
aatcgtgttcgccgcctgcctctcccaaaccctagcaacccacgatcgaacccaaatccgctcctcccacccgaggaattatgcgaaattccccgagatcctagcccagcactagcagatcgatccatcgcttgcccacctgccggccaccaacccttgtagtctcagtcaatctgtagattgagactacgatgagcctgtcaccgctcgactcctcctccccgccggccgcggctgcggctgctgctacggaggtgcccctcgccccgggcttccgcttccaccccaccgacgaggagctcgtctcctactacctccgccgccgcgtcctcggccgccgcctccgcgtcgggatgaagaagacgctcgtcttccacgccgggagggcgcctaagggcgagaggaccaactgggtcatgcacgagtaccgcctcctcgatgcagacggacctcaggatctgcatgtggtttgtagaatcttccagaagcatgggtctggaccacagaacggtgcgcagtatggtgcaccatacatggaagaggaatgggaagaggatgatgatgctattgagaatggttctacccacgatgcatctggtcaaattgctgcaaccacctgtgctgtagatgaggagtcaaatgaggacgatgagaatgcatattgtgaaacaaacagacctgctcgagtagaaccatctcatctgccttcggtccatgaaatgctcaatccaccagagatggctcctctccaaggtcaagattctaaagagacaagcgatggaagttggtctgatgttgctatttctctggaagagattttgcag

SEQ ID NO: 3126 - DNA, 875 bp, Zea mays
  Clone ID: TF_LIB4974-041-A1-K1-E7
cctcgaggccggccgggccgggttgccccaacctacctccgggcttccatttcttcccttcagacgaagacctcgtcgtccatttcctccgccgcaaagccgccaacctcccgtgccgccccgacatcgtcccgacgatcctccttcaccgctacgacccgtgggagctgaacggcacggcgctgcaggctgggaaccagtggtacttcttcagtagccacgcccacgcccacgcccactccgcggcggggcagaccagaacctctccgtccgggtactggaaccccgccggcgccgatgaaacagtagtactagcgagcagcagccgtgtcgttggcctcaagaagacgctcgtcttctgcaccggagagcctttcagagggttcagaacgaactgggtcatgcatgagtaccaccttcaggacgggccggccgggtgcaatgtcggcgggagcagcggcgccaccaccccaagtagctccagcagctccggcagcagcaggagatcgcagaggaagagagttcactcgagcacggagtcaataaacagctgggtgatatgtagagtgttcgaatcaagctgcggttcgcaagtgagcttccatgacgagggcacagagctttcgtgcttggatgaggtgttcttgtcgctagatgactacgacgaagtgagcttgccaaataattagaaccctagctagcgcgcaggccatttgattagtacctgtgacggtgacgtcgtcgtctgcgtaagcgtaagtggttgcaagttgcattgtgcatgatgcagatggcctgatgataggcatcgagcttaagccggtctctatccaaaatcattatatattaccctggtatcgatcgattatcatgca

SEQ ID NO: 3127 - DNA, 1588 bp, Zea mays
  Clone ID: TF_ZmC1424_1
gctgcctgaaccaaaacacacacacacacaaaacacgcaatgggcgccatgactctgccgcccggcttccgcttccacccgaccgacgacgagctcgtgggctactacctcaagaggaaggtggacaacctcaagatcgatctcgaggtcatccccgtcgtccatctctacaaatccgagccatgggagctaccagagaagtcgcttctgccgaggcgtgacctggagtggttcttcttctgcccgcgcgaccgcaagtacccgaacgggtcgcgaaccaaccgcgccacgtccacggggtactggaaggccacgggcaaggaccgccgcatcgcctgcgacggcggcgtctacggcctccgcaagacgctcgtcttctaccgcggccgcgccccgggcggcgagcgcaccgcctgggtcatgcacgagtaccgcctctgccaggacctcgcccacggcacttgcaacttcatcggtgcttacgcgctttgccgcgtgatcaagcggcacgagggcgggctgccgcagggcgagagctacgcgaaaggagccgccggcagcgcgagatcagggcagatgagcaaggtctccagcagctcgtccctcgtcagcaacgaccagctcagcgcgtcgttcacccctcctcctacactggacgtgggcaccatggctggatccggcaacgcgttccagagccccgttgggtacgggtacggcgtgacgacgacggcgacggcgacggccaccactgcggggctgccgtcgagcgcactggccacgcccctgctcatcgtgccgtctccccacgacacgttttccatcggcggcgacggcgacttcctccccgccgcggccgagtcgcgcgcgttcgcacgcgcacctgttcgacaccgtgggaatggggatgggcggcgtctcggagcaggagctgaaatgggacagcttcgcctgcccaagcacgttctcgagtggtgccgacatggcggcggcgagtccggcgacgctgtgccggcaggcgagcgacggcttcgacgacctgctggcggccttcttcttctcggatgacaacaggatcgtcttctgaacccaatgcacagcacaggggtaaatgctgctctgatcaactcaagatgttcatactgggaaataaaaagtgacctctgctctcccagaaatggcgattatatttttcacagccagggaaagggagatactacgtactggggagttcactcgtgttggctacagacagagtgatggcattttatttaccgtgcggtcttctctgtagcactggtgctgtgtacgacggccgtgtgtcacttcttcctgaattctcatgcgtgtgtcatttgcaccaccacctactactagttacatgtactagcagtagtacttgtgtgattgacctgccctgttctgtatacgacagagctaatgcagtattgccatgctttgtagccttactaaccattcttaattccatggcatatcgtgttaaagcacacatgctgttcccaattgccatgtatcttgtatcacgcagtgtaattcagtatcaacgattcccgaagcagtgcgctgtgcc

SEQ ID NO: 3128 - DNA, 802 bp, Zea mays
  unsure (1)..(802): unsure at all n locations
  Clone ID: TF_LIB5116-010-A1-PF1-D6
aattgaagctctagctagctagctactttgcaaagtttgcgtgcttcgatcgtctcgatggctgacttctcgtccagcaacggcgtcccgccggggttccggttccaccctaccgacgaggagctgctgctctactacctcaagaagaagatcggcttcgagaagttcgacctcgaggtcatcagggaggtcgacctcaacaagatcgagccatgggacctccaagagagatgccggatcgggtctgcgccgcagaacgaatggtacttcttcagccacaaggaccgcaagtacccgacggggtcgcggacgaaccgcgcgacgacggccgggttctggaaggcgacggggagggacaagtgcatccgcaccagctaccgcaagatcgggatgcgcaagacgctcgtcttctaccgcggtcgcgccccccacggccagaagtccgactggatcatgcacgagtaccgcctcgaggaaatcgacgaagcccagggcggcaccagcgaggatggatgggtggtgtgccgcgtgttcaagaagaagtgtttcttcaagatcgccggaggcggcgaagggagctcaagccagagcgcggacgccggcgccggccacatggccgtgtcgtcaccactgggtggccacgaccacgctgacagggccgccatggcatctcactacatgcacgggatgcacccgcagtaccacccccagcacgcctcttccttctactactcccagatgcaaccaccggaggcggnctactcgcaccacgtgcaggtccaggacctcctcacaaccaccg

SEQ ID NO: 3129 - DNA, 388 bp, Zea mays
  Clone ID: TF_LIB3245-339-Q1-K1-C4
gcaaggctaagatgggcgagaaggagtggtacttcttctgccacaaggaccgcaagtacccgacggggatgcgcaccaaccgcgccaccgccagcgggtactggaaggccacgggcaaggacaaggagatcttccgcggcagtagtccccgccgcgtgctcgtcggcatgaagaagacgctcgtcttctacacgggccgcgcgccgcgcggaggcaagacgccgtgggtcatgcacgagtaccgcctcgagggcagcctgccgcccaacctccaccgcggggccaaggtgaggtcacctggcctcctctcgtctattttgttgttttttaaaaaaaaaaaatcccgcgaccgacggatggatggagccccccatggaggttgttttca

SEQ ID NO: 3130 - DNA, 1329 bp, Zea mays
  unsure (1)..(1329): unsure at all n locations
  Clone ID: TF_ZmC12224_3
nnnnnnnnnnnnnnnnnnnnnnnnnnnnnnnnnnnnnnnnnnnnnnnnnnnccacacccccactttgtcccggcctttgttccggagagaatcatcgagtcggatagagtcctgggctccaggcgctgcgtactgaacgaagaggcgtgtctcttcgatcgacctccaggcttccagctagctagctagcgagcgatggcattgagggagatcgagtcgacgctgccaccggggttcaggttctacccgagcgacgaggagctggtgtgccactacctccacaagaaggtggccaacgagcgcatcgcgcaggggacgctcgtcgaggtggacctgcacgcccgcgagccgtgggagctcccagaggtggcgaagctgacggccaccgagtggtacttcttcagcttccgggaccgcaagtacgccacggggtcgcgcaccaaccgcgccaccaggacgggctactggaaggccacgggcaaggaccgcgaggtgcgcagcagcagcagcgccaccgccgccgtcgtcggcatgcgcaagacgctcgtcttctaccggggcagggcccccaacggcgtcaagtccggctgggtcatgcacgagttccgcctcgacaccccgcattcgccgccaagggaggactgggtgctgtgcagggtgttccagaagacgaaagccgccgacggcgacggcgatggcggcgcccaagacggcgactcctcgtccccgccggccgccttcaccggcccgtcacggccacgcgccgtgtcagagccgccggaccattccgcgccgccggcgggaggaggctactactacggcctcgcgttcgggccgcggcaggtggaggtggcgcagcagcagtgttacggcggcggcggcgccacggtcgccgaccaccaccacggcttcacgcgagacagcgggggcgctgcagggtttggcgcgacgtggggacgaggagtcgccggcggtgagtgcggggctggctacctcgacatggacggcgcctttgacgtcatgatggccggctgctttggcggtggagacatggatgagttccctcaagtgtggaggtgatcgattgggcaacgtcacggggttattaccatcctcttgaaagaggagaatacatattgttcttactggagacactgggtcagttaaatttattggttgtttaatacacatggggtttggctggtagattagaatgggtttgaaatgctgtgagctcgacaaggttcattgtgaacgtgaactatcaaatgtaaattaattgggaaatcctttcttttctatattatttagtgtatagagttaattgat

SEQ ID NO: 3131 - DNA, 142 bp, Zea mays
  Clone ID: TF_LIB3076-012-Q1-K1-F12
cttatactgaatggtcacaggtaaggaccgtcttatccgctcacgcccagcatgcaccctcatatgcgttaagaagacgctcgtcttacacagatgcagggcacccttaggacaccgtatcctctggatcatgcacgagtac

SEQ ID NO: 3132 - DNA, 802 bp, Zea mays
  Clone ID: TF_ZmC3782_2
gcctctacagttcgacccagggacctgccggccaggcgctgtacggcgacggcgagtactacttcttcagcccgcgggaccgcaagtaccccaacggcatccgccccaaccgcgccgccggctccggctactggaaggccaccggcaccgacaagcccatccacgacgccgccaccggcgagggcgtcggcgtcaagaaggcgctcgtcttctacaagggccgcccgcccaggggctccaagaccaactggatcatgcacgagtaccgcctcgccgccgtcgccggctccaccagccccctcgccgcctaccgcccgccctccaagttcaggaacgcctccatgagggtaagtcgatcgacctcgatcatccctgaatcatatccattgcatgacctgtacatatgttcttcccattatctatcctatccatggtgtcatgttgagctgagctggtgatcacacgcatgcacgggccgctttcatctgattcgttcgtaacgaccgcaacaatattcgtgggtcacgccggtcgcatgcacgccacgcccgcccggcggtgtgcagtgtgcggcggcatgtcgctcgttcgtcgtgcaccgccagccgccgttggtttggctgcttttccatatcgatgaccaaactgccctcaccggccgaattcgtcgttctccaaaagcgccgtagctagagctagccatgcatcaatcagccgccaaaccagcagcgcgtcacatctaccggcactagctagcatcgcctcgcatcgcatcgccgtggaggtgaatggcagcttaccg

SEQ ID NO: 3133 - DNA, 1955 bp, Zea mays
  Clone ID: TF_ZmC21867_1
ctcgaggccggccgggagacaaacagtcgagctcgggaccctgagaaacaaccagggagggcactagggcagggacaggacgaccagacaggctccgcgtttcccggcccgcgaacgcgagcgcgagttcatcgccttcccggttcccgccgcgccgcgggctttcccgccttccccgagccctcctcccccgcacacccacgaccagtgtgtgggtggagactagtgggagtgggaggcgttataatcggtcggcgcaaggacgtgggggagaaggggggctaatccggccgtgcacgcaaccggaccgggcgcggtagccagtgcgtaggcgccgttccgccgctgccgcctcgcccggcgttcctcgccgccagcacagggcgtggccggagtccgcgcgccaccatggcaaggtcatggctgataacttgtaggggaattgctaagaaaataaggtacacaaatcctggcgctaatcaccatataagtgaactggttgcagaagcacggagggaatgcccaaactgcagttatattattgataacagcgatgttgccatgcagtggcctgggttgcctgctggagtcaagtttgatccttctgaattggagttgcttgaacatttagaacagaaagttggcctgggagattcaagaccacatgtgctcattgatgaatttattccaactatagacaatgatgagggaatctgctattcacatcctgaaaatcttcctggtatgaaaacagatggtagcaatgctcatttctttcatagagtttcaaaagcgtatggttgtggtcagcgcaaacgtcgaaggaccatcaactgcagtgatcacactgtttctgatgagcatgtgagatggcacaagacagggagatccaaagccatatatgaaaatggtgttataaaaggttggaagaaaataatggtgctgtacaaaatttcgcaaagaggcagaaagcctgatagagctaaatgggtaatgcatcagtatcaccttggaaaagaggaagatgaaaaggacggggaacttgtagtatctaaaatcttcttccagttggcaaataagagtatggaaatttctgaaacagaaactgcttgtgaagaacctgatgcacctgcttcagtgattggtccgaaaactccaaagacaatcacaccacagccacgccatcctaaaagtagtccatgtgaaactgagcagaatattttcattgtgcaggaccagctactactggacggtgaagacgagcctaccatgcctatcgttagtctggcggatgatgcaatgaaccctgcatggtgtgctgtagctgaagaagagcaggttgttggagaggcatctcgggctcagtcaaactcagatgaacctcttctctgtcgcgaagacccaaattccttaaacgacgaagcattgcttccctgggactatccgattctgtcgcaatgcaggagtgagatttttgatcggaacctgaatggatacgggttgcctgatctccataatgtggatctcggcacgcctccagatcttcagcttgctgatttccagtttggctctcaggaaagcctcggcagctggctggatcgcatctaggaagatactaaagtacgtatttggtagagcagctcagcaacctgatcgatgggcatcttttttgcacatgatatggtaaccggtggcagctatttttgggcttgcaacacaaagattgcattcttgcattagtgttgtattagtgttgcgctgtcaaactttatctggaaaccaaagaacctttcgctcttttctattttctttagaacctttaacagctggctatcagaacactagccttgaaatatagctgtaagttttgtggcatggttggtgcaaacctacattgccccgctgtaggtaagatcggtgccttgagatctttgactttatgagttcagagtgtt

SEQ ID NO: 3134 - DNA, 1800 bp, Zea mays
  Clone ID: TF_ZmC27_12
cgattgggtacctcgaggccggccgggattccatagtctcgagacttcctcagcaatcaatcagctttccagcgatcggcagctcctcgatcgtttcgaagctccaatccgcccggccgcctccgcctgttgccactagctaggtgatcgatcgaatggactgcggtggcgcgctgcagctcccgcctgggttccgcttccaccccaccgatgacgagctggtgatgtactatctcctccgcaagtgcggcggcctgccgctcgccgcgccggtcatcgccgaggtggatctctacaagttcgacccatggcagctcccagagaaggcgttcggtggggagaaggagtggtacttcttctcgccgcgcgaccgcaagtacccgaatggctccaggcctaaccgggcggccgggacagggtactggaaggccaccggcgccgacaagccggtagggtcgccgcgccccgtggccatcaagaaggcgctcgtcttctacgccgggaagccgcccaagggcgtcaagaccaactggatcatgcacgagtaccgcctcgcggacgtcgaccgctcggccgccgcacgcaagaagaccaacaacgcgctcaggctggatgactgggtgctgtgccggatctacaacaagaagggtgttatcgagcggtacgacacagtggacgacgacgacggcgacggcgccgtggccgaagacgtcaagccggtgccggcgccggcggcgtcgaagaacccgcgtgccagtgcccgcgtaggggcagcagcggcggcgccgatgaaggtggagctccccgagtacggcggcggctactacgactacgacgacctggagacgccgtcggcggggatgctgtgcttcgaccgcccgtcggccccggcgcccgcggaccgcgactcaaacaactccgtgccgtggacgacgcaccacacgcacacggacaactccagcagcggctccgagcgcgtgctctcgccgtcgccggacctgcccgaccgcgaccacgccgagagccagcccgccgccgccgccgccgccgccgggtggtggcctgtcggaggcgactggggcagcgccgccgaggacgggttcatggtcgacgtcgacgtcgacgacgggagctcgctgttcgggccgctgtccccggggctgttcgcgcgcgtcgacgccgccgcgttcggcttcggcgacatgctcgcgtcgtacctgcacaaaccgttctgatgcaacgcgacgcgacgcgagcgcggccaccccgcgcctgcgtgctcctctaggccactgaccactgacatggacattctggtcgtcgtgtagctcagttcttcattcattcaggtcgacgtgcaactggtaattgtacaagatcttgggcagctgccgtatggagatcgatgagtgccgagttagcatggaggacgactggtggtcatggttggtacagagctagctagccgtccgatcgggtatcggattaatctgattgccagttttgtttttttttggtcgcgtcaagtagctgacatcttaagaatgaagcctactggattcagaggcctgttgatggtaatggtatggtgtatgtatatcgtctagtttagtctagcctagctgtacttagaattggttcaggttggtggcaagcagagcgctgtaatttttgttgagtgtttatgcactataattgcaacgtcatgtattagagtcgctctcagcggtcgctttctcgtgatcgaaaattttgcgatgcaaattatcctaataaagttgttgtaagatgtaattacgt

SEQ ID NO: 3135 - DNA, 2349 bp, Zea mays
  Clone ID: TF_ZmC27_20
gacttcctcagcaatcaatcagctttccagcgatcggcagctcctcgatcgtttcgaagctccaatccgcccggccgcctccgcctgttgccactagctaggtgatcgatcgaatggactgcggtggcgcgctgcagctcccgcctgggttccgcttccaccccaccgatgacgagctggtgatgtactatctcctccgcaagtgcggcggcctgccgctcgccgcgccggtcatcgccgaggtggatctctacaagttcgacccatggcagctcccagagaaggcgttcggtggggagaaggagtggtacttcttctcgccgcgcgaccgcaagtacccgaatggctccaggcctaaccgggcggccgggacagggtactggaaggccaccggcgccgacaagccggtagggtcgccgcgccccgtggccatcaagaaggcgctcgtcttctacgccgggaagccgcccaagggcgtcaagaccaactggatcatgcacgagtaccgcctcgcggacgtcgaccgctcggccgccgcacgcaagaagaccaacaacgcgctcagggtaattcactacaccatgacctttctcaggagaacatatttatctccccgaaatactgacacttgcagttagagggaaaaaatatagagagaagtaaaaaaaaaaagattgatgtttgattttaccaatgctgcaacaagaaacagtggatcgaatcgaaatgtgttgttaggcttgcaactatatatgcagattcttagttaagaggaattgaaaaaggctctagagacatgtaaagcgcgggcggcgtggcgtcacggctcacgcacgccgcgatagagacaagcgcggcaaccatggtccatggccggcgcagagccgccgcctgatcttatcgcccgcgcacaaattaccacatgcgcggcgcgcaccggatccgacgtcacgtcgacctcatctccaagcctcttccaaacactccaatgcgtactggatgactgggtgctgtgccggatctacaacaagaagggtgttatcgagcggtacgacacagtgaacgacgacgacggcgacggcgccgtggccgaagacgtcaagccggtgccggcgccggcggcgtcgaagaacccgcgtgccagtgcccgcgtaggggcagcagcggcggcgccgatgaaggtggagctccccgagtacggcggcggctactacgactacgacgacctggagacgccgtcggcggggatgctgtgcttcgaccgcccgtcggccccggcgcccgcggaccgcgactcaaacaactccgtgccgtggacgacgcaccacacgcacacggacaactccagcagcggctccgagcgcgtgctctcgccgtcgccggacctgcccgaccgcgaccacgccgagagccagcccgccgccgccgccgccgccgccgggtggtggcctgtcggaggcgactggggcagcgccgccgaggacgggttcatggtcgacgtcgacgtcgacgacgggagctcgctgttcgggccgctgtccccggggctgttcgcgcgcgtcgacgccgccgcgttcggcttcggcgacatgctcgcgtcgtacctgcacaaaccgttctgatgcaacgcgacgcgacgcgacgcgagcgcggccaccccgcgcctgcgtgctcctctaggccactgaccactgacatggacattctggtcgtcgtgtagctcggttcaggacgaatcgagagccggccggtctaggtgtagtgctgcgaaaccaacaccaccgtgcaggcacactctccgcgggcggcagatcgacggacaatcctgcgcccgtaggtatataccggtcgtcgatcaggtgttcatcagttcttcattcattcaggtcgacgtgcaactggtaattgtacaagatcttgggcagctgccgtatggagatcgatgagtgccgagttagcatggaggacgactggtggtcatggttggtacagagctagctagccgtccgatcgggtatcggattaatctgattgccagttttgtttttttttggtcgcgtcaagtagctgacatcttaagaatgaagcctactggattcagaggcctgttgatggtaatggtatggtgtatgtatatcgtctagtttagtctagcctagctgtacttagaattggttcaggttggtggcaagcagagcgctgtaatttttgttgagtgtttatgcactataattgcaacgtcatgtattagagtcgctctcagcggtcgctttctcgtgatcgaaaattttgcgatgcaaattatcctaataaagttgttgtaagatgtaaaaaaaaaaaaaaaaaaaa

SEQ ID NO: 3136 - DNA, 575 bp, Zea mays
  Clone ID: TF_ZmC27_7
ctccaatccgcccggccgcctgttgccactagctaggtgatcgatcgaatggactgcggtggcgcgctgcagctcccgcctgggttccgcttccaccccaccgatgacgagctggtgatgtactatctcctccgcaagtgcggcggcctgccgctcgccgcgccggtcatcgccgaggtggatctctacaagttcgacccatggcagctcccagagaaggcgttcggtggggagaaggagtggtacttcttctcgccgcgcgaccgcaagtacccgaatggctccaggcctaaccgggcggccgggacagggtactggaaggccaccggcgccgacaagccggtagggtcgccgcgccccgtggccatcaagaaggcgctcgtcttctacgccgggaagccgcccaagggcgtcaagaccaactggatcatgcacgagtaccgcctcgcggacgtcgaccgctcggccgccgcacgcaagaagaccaacaacgcgctcagggtaattcactacaccatgacctttctcaggagaacatatttatctcccccgaaatactgacactttgcattaag

SEQ ID NO: 3137 - DNA, 871 bp, Zea mays
  Clone ID: TF_ZmC16461_2
ggagacacccccctccaaaactttccccaatccaatctcccaatccaatcttccctctcctctcctggaaccctaagcctcctcaggtacatgacccacccttcctcgtcctcctcctccgccccggcggccgcgccggatgacccgacctcccttgccccgggcttccgcttccacccaacagacgaggagctcgtctcctactacctcaagcgcaaggtgctcggtcgcccgctcaaggtcgacgccatcgctgaggtagacctctacaaggtcgagccatgggacctcccggcaaggtcgcgcctccgcagccgcgattcccagtggtacttcttcagccgcctcgaccgcaagcacgccaaccgcgcgcgcaccaaccgcgccactgcaggaggctactggaagaccaccggcaaggacagggaggtccgccatggagctagggttgtcgggatgaagaagacgctcgtcttccacgctggccgcgcgcccaagggcgagcgcaccaactgggtcatgcacgagtatcgccttgagggcgatggcgcagccgggatcccacaggattcatttgtagtgtgccgaatcttccagaaggctgggcctggtcctcaaaacggggcacagtatggagctcccttcgtcgaggaggagtgggaggcggatgaggatgatgattttggtcctatgccagtgcagagggacgtttttggtgagcatgaggctcctggtgctatggagaaagatatcttcagatgaatgatctcattcaggacttggctggtcaaaatgagaatggcagtgttgttttgccagtttctgacacttcaaacaccagcagccattctgaagacgaaaagggaaattc

SEQ ID NO: 3138 - DNA, 1212 bp, Zea mays
  Clone ID: TF_ZmC545_9
ggtaccactcgaggcctgccgtgggaggactggcaggcacaaccgaagccaccgcttctagttctcgggttcatcgccagcaatccgggacacataatgggacagccggtgacgaggaggagggagagggacgaggaggcggagctggacctgccgccggggttccggttccaccccacagacgacgagctggtggagcactacctgtgccgcaaggcggcggggcagcgcctccccgtgcccatcatcgccgaggtggacctgtacaggttcgacccgtgggacctgccggagcgcgcgctcttcggggcccgggagtggtacttcttcacgcccagggaccgcaagtaccccaacggctcccgccccaaccgcgccgccggcgacgggtactggaaggccaccggcgccgacaagcccgtcgcgccgcgcgccgccgccgccgacgcccgcacgctcgggatcaagaaggcgctcgtcttctacgccggcaaggcgccgcgcggggtcaagacggactggatcatgcacgagtacaggctcgctgaccccggcggacgcgctaagaaggggtcgctcaggttggatgactgggtgctgtgccggctgtacaacaagaagaacgagtgggagaagatgcggctggggaaaggggcagccgccggcgtcatcggcgcagccaaagaggaggaggccatggacgtgagcatctcccactcgcagacccactcgtggggcgagacgcgcacgccggagtcggagatcgtggacaacgatccgccgccgccggcgatgatggtgcccaagaagaagcgggtggacgacggcggcagcgccaggaccagcgacctgttcgtggatctcagctacgacgacatccagggcatgtacagcggcctcgacatgctgccgccggccggcgaggacttctactcctcgctcttcgcgtcgcccagggtcagggggaaccagcccaccggagccgcggggtcttgggccccttctgagtgagctcaggcgaggatggaggcatggagatgaggagagaagacggacggcgttgcgaactctgtaaatacaggcagcataggaggagtcgaacctgactggacctggtcggggttacaagtcgagtgtgtcggtgtttcgtacatggtacatacagagaacatattctttgcaatcacttattttggtgcaaacgtgcaatcc

SEQ ID NO: 3139 - DNA, 883 bp, Zea mays
  Clone ID: TF_ZmC328_2
caagtacccaaacggctcgcgccctaaccgcaccgccgggaaggggtactggaaggcgactggggccgacaagtcgatcgtgcccatgggcagcaccagggcggcagggatcaagaaggcgctggtgttctactctggcaaggcgtccaggggcgtcaagacggactggattatgcatgagtaccgcgtcgctcaagcggaccacaccctggggaagaagggctcacataagctggacgagtgggtgttgtgccggctgtataacaagagaaacaattgggacaaggtgaaggtcgaggagcaggagttggaggcggcgccgcgccgacaacatcaccgacaaagtgcggaggattccatgtctgacagtttccagacacacgacttagacatcgacaacgcctccgagctacataattgctacggtaacaacatggtgcaagggcaggccatgaccgccagaaacgacattggcgtcgtgacggtgaaggaggacaacgactggttcaccgacatgaatctggatgatctgcaggcgtcctacaacatggcccatacggtgaatccgatcccggcccaaaccgcgaacctggtgacggggcaaggccatggctacttgcaaggctatggctacttgcagtacatgaactcaccgtcgatgaagatgtggcagacaatcctgcctccgttctgagtgtccacgatgaagagatgctcttgtacataagggggcatagaagtgactagactggaatagaaacaacatggtataggcttgtaacgtttattcatttgttagataatacgtatgtggttggtaataccaaaaaaatgcatctccctttgcactacttgaagaaagcacaaagttgtagttctcgtt

SEQ ID NO: 3140 - DNA, 359 bp, Zea mays
  Clone ID: TF_LIB3245-448-P1-N1-B7
cctcgtcagaaaattaagtatcaacttataccgagaggtgcaatatatatgggttgaccaatggaattaccctccaagagtgatcttccaatgaagggcaaccagggggatttctttgcctatcttgacaagaagtaccctaatggttctaggtcaaacagggcaacactaactggatactggaaatgaactgggatggaccgctccataaagcttaacaagctaactctaggaacaaaaaatacgttactttttcatgaaaggcgacctctcttttgcatacgcactgagtggattattcatgagttctacattgacgcgaatggattttaaagtcgtccttatattaaagatgcctt

SEQ ID NO: 3141 - DNA, 649 bp, Zea mays
  Clone ID: TF_ZmC27_5
attccaaagctctcgagacttcctcagcaatcaatcagctttccagcgatcggcagctcctcgatcgtttcgaagctccaatccgcccggccgcctgttgccactagctaggtgatcgatcgaatggactgcggtggcgcgctgcagctcccgcctgggttccgcttccaccccaccgatgacgagctggtgatgtactatctcctccgcaagtgcggcggcctgccgctcgccgcgccggtcatcgccgaggtggatctctacaagttcgacccatggcagctcccagagaaggcgttcggtggggagaaggagtggtacttcttctcgccgcgcgaccgcaagtacccgaatggctccaggcctaaccgggcggccgggacagggtactggaaggccaccggcgccgacaagccggtagggtcgccgcgccccgtggccatcaagaaggcgctcgtcttctacgccgggaagccgcccaagggcgtcaagaccaactggatcatgcacgagtaccgccctcgcggacgtcgaccgctcggccgccgcacgcaagaagaccaacaacgcgctcaggctggatgactgggtgctgtgccggatctacaataagaagggcgttatcgagcggtacgacacagtgaacgac

SEQ ID NO: 3142 - DNA, 234 bp, Zea mays
  Clone ID: TF_700168653H1
caccactccagtccctccatttccctcagctcgcgcagcagctagccggcagccaacaaccgaaccaacgagccaacccacaggccacagcgagcgagtaaagcgtccaatggtagcgatggcggccgggcagcagcagcagcagcagcagcgccgctacgcgaggcggactcaacctgcccccgtgcttccggttccacccgacggacgaggagctggtggctcactagctct

SEQ ID NO: 3143 - DNA, 1755 bp, Zea mays
  Clone ID: TF_ZmC17732_2
gccttcgtgtccctcccctccactccctcaccgggggctgggctggtggggagtggggactgggggcagtcgccacgccgcagtccattctttcgtcacccatcgcagctccaacacctctcgctagtcgtcatggcggcttccgcggcagcgttccccctcccaccgccgacgcctcctcttcgactttcacatgtcttttgatatcacagaaaaggattgcccctgccttcactgctgtgaatgccagggacgtttctgtcgccctacaatatatggacattggacttgatagttggcaaactttcttctatatactggacgttccagctttcgccaacctgctgctttaaccacatcttttccttctttcccgattttgcctctcactatcatcaattaccgctaaaagtgaaacaagtgttctccctatggccaagacatcacttcctcctggattccggtttcatccaactgatgtagaactcacagtctactatttaaagaggaaactactgggaaaacacttacgctgcaatgctatcactgagattgatctatacaagttcgccccttgggatcttccaggctggaggacgaggaaatagctgcttctggtgttaaactggatgcctgcgttctatgcaaaatctttcagaaaagtggcccagggcccaagattggcgcacagtatggtgccccattcaatgaagaagactggaacgatgccagtaaatgtagagtgttctccatgtgtgccttctgtggccccttgcgcacctgaaatcaagtcgtggtgggttgaattctgctggtcaacgcctggctgtgagttatgatgtcaaggtttccttgggctcctcggcagaaggtatcaacagacctgctgtcaatggagttcatcctgtcagaccttctcctgatgctcctaatgactgcatacacattcaattgctggctgaggttatgagatgttcctcaacctcaatgcatgttttacgtactgctggtgacgatggtttgctggtaatttcgttgatgccaggctactttctttttttgttttgtttcttgttagctccagtgactttctatttctggtgtcgatgcaggctgattcaactgctgactacagtagtgataatagaatatctttggatgctattgaaactatattctgtgaagtggatgagcttgggccccaggctatggtgaacaatactaaccattgtgactcatgcggtgagtatttgattcaccctacgatggtggcacgaggagctgaacagtacttagagctaaatgacctgtccttttcgctcaccgatggtcctgattcctgtggcgtgcttttctctaatggtgtatctgttgagcaactaccggatcttgagctcaggtttgagcagttctctcctgaccacatctccaataccgctattgcttccacatcaacaacggttggttcatctgcttcagtgcccttattggaggatcacaggacctgattcagaattggagtcatctggcgcacatgttaattgaatctaggaggatctgcaggacaaaggcataatgctccctttttttcaattttcatgaagttagaatttttttttggatgaaggcacggattagtgaccacttggcacagaaatatgtttgtgttgcggcttgtgaatccaggaccatttctctgcctgtagttttgcatggtagaactagatgggcaacaacaaaatgtgttcagtattg

SEQ ID NO: 3144 - DNA, 834 bp, Zea mays
  Clone ID: TF_LIB4743-101-Q1-K1-G2
cattgggtacctcgaggccggccgggccgtttcccctatcgcgattctctctcctccgtgtttccgtcgccacctaccacgtgaaccttcctgtcgcgtgtgtgctgaaaggccgagcagactacaatccgctgcttacctctgttctgttctgtctcgcgattacttgcactagagagagagatttgtttcgccttgctgtgctggttcgatgcgattctctcggactccgctaaatcattttagttaaaaaaataccgcgctccctttccaagatgcgatttgatttggtgcgatgcagctgaacaaaatccttgtgctgattcatttttgtcgttccgcgcgtgtcgactcgagccaaaactcccgggaaacattattccgctttcctgatccggtggtaccgatgagatgtgaatgtgattatgccaatgcaggtaagtctctgatccggtccgacgatcctgagtggttcttcttggcgcccaaggaccgcaagtaccccaacggtagcaggtcgaacagggccaccgtggccgggtactggaaggctactggcccggacaggaacatcaagtccaagggcgacaagagcaaacagtttaccatcggcaagaagaagacccttgtcttccaccgtggacgcgccccgaagggcgagcgcacagggtggattatgcacgagtaccgcaccaccgagcctcagttcgagtctggcaagaaaggggggttatgttctttatcgcctcttctggaaccagaggagaaactgagcgctccagcccaaggaaatggattagagtggcactcccctactactattcgttctttccg

SEQ ID NO: 3145 - DNA, 3048 bp, Zea mays
  Clone ID: TF_ZmC151_1
cattgggggcgctcccggttggccgggccgggacacccacacccacacccacccacacaaccgcacctcgcacccattgaccagacggcggcgctcatctcctcccccacggttctccccatcggcctgctggcttctccccggcttccccgatactgatcctcatcactcatgtctgctgaagttgctggaggacacccttatttcctctcgtgctacttctggttcatatactgcataaaattccgagattttacttgatacaagtggaacactcagagttttgtgcgaatacttcctaccatgtgaatcagttgtagctggtgaatttggcaagactcaatttctctcatctgagttcagaaacgtttgcttggtctcctgcttcccttgagtcttgccaaccatagttttctctcatctctttctgtgacttgaccaacatctcttttggtcctgtcagtctcgcaatactcccttccaaagacttgtctagaggttggattgccctgctctctgctggcactgcagcctgctgaagtctttacttgctgcattctgtgctcacttttgaaagctgctctcttctgctctgcgttgttgatttctgcactcaagcttctcttgcctgtgcactcaagcttctctcttcctgggcaactagtgatctccttgaagcatttcagcttttacctagagatctttctgttgttgctgaaggcaagagaggctttagggtgatggcgcaaactagcctgcctcctggttttcgtttccacccaaccgatgttgagctcgtttcctactacttgaagaggaagatcatgggaaagaaacatatcgtggatgctatagcagaggttgatctgtacaagtttcctccctgggatctatgtgaaaagtcctctcttcgaagtaaagatcttgaatggttctttttttgtcctcgtgacaagaagtatcctaacgggtctaggacaaatcgtgccacaccaaatggttactggaagactagtggaaaggatagaataattatgcttaactcccgcaccgttgggatgaagaaaacattgatatttcatgaaggcaaggcccctaagggcgacagaactgattgggtgatgtatgaatacagaatggaagatgaggatttggtttctgctggtttctcaaaggatgcttatgtactctgcaaaattttcaagaaaagtggccttggtccaagaatcggagagcaatatggggctccatttaatgaagacgaatgggataatgcagaagtcgaaacttctctgtttcctttgacttgttcagaagtgaatccaacagagggacaacgtgctcagcctactgtcctggctggtgctcttctggaacccgaaccacctctacataattcatcttctacatgtgctggagaggaatcatcatttggtcatgccactgctgaggacttaacttttagctatactgttgctagctctgctatccaagatacacctgctcggatgtcaggagacggtgtggtttctgtgaacaacatatccaatgtggccaatgacatgcgtagtcctcgtgactgtgatgaatttctatcggagttgtctagatttatgaatgattctcctctgcgtaacactcctcttggagagtgctctggtcttcctccgatgtctgaagctgaggctcatgcttttgaagtcaactcttttggcctctacaatgaattatcagagcttgttgagttaggaggcgcggataacaacttaaacaccagcaatgtggaaactacagattacctcatgttgccacctgacagagaactgtcggctaatgattacatggaactaaacgatctccttgctcctgacccaagcttccccagtgaattttctgctcaggacaatcaatatatgcagcatcctcttgctcagtacaatggacattatgatctgtcaggtccttcggagccaacaatgcctagcattttcgatgtttttcctcccaataatggagtcctcgcaacagatgatccagccaactacttggacccagccatgcagttccctttctcatgattggttaccatttgtcatggaggtacggatgtttatacctgctctttttgtgcttgaacttgtctggactgcttcggtgttgcaacttgcagctcgctgttgctacaactctatccaccctgaacgtcaaggacgtcattgatgtcatgcctgggcccatgaaatcgtctgttgctcttctgaaccaagccgaccttggctggtatttcttggaagcacggtgcttggaacaatctgcatcgactgctgtatgctcccaactggttgagctaacggccaatctcggctcactctgctgaggagatcatagcctgtaaatctttgattatgctgttacttgtgtgtatcgcaacctgcctgattaccattgtcttgtgtttgagttttgacaatatgcaaaccataataatgtcgtaatatggaactcgtttatcatgtttattccatactcccgttatgtgagcttttggatggtctttctagaaggtgcacaaggccaaccggccaaaagaaaggacatcaagtgccaccaccggtagaagacggagccgaacttgcttgactgcatcgacgagcgcgcttcgtgacatgatggctttctcaagaaatataaaggccggagggagaatttgagtgtccacctaaattttaagaatttagtaggtgtcttattttgttttttgtctggtggtctatatttagctacgaggggttgaatagggacgtagagagtatcctttttttgtttaaagtgcggtctgggcctgccacgcgttcgaatattatgggaatcagcaagtagtaagtaaatattggactgccaactgcttctgaaacttttacttcctgtttgatccttgatataaatgttttatcctaaaaaaaaaaaaaaaaaaaaaaaaaaaaaaaaaaaaaaaaaaaaaaaaaaaaaaaaaaaaaaaaaaaaaaaaactcggagaggggcccgtac

SEQ ID NO: 3146 - DNA, 881 bp, Zea mays
  unsure (1)..(881): unsure at all n locations
  Clone ID: TF_ZmC545_14
gggtcgacccacgcatccgcccacgcgtccgggcacaaccgaagccaccgcttctagttctcgggttcatcgccagcaatccagaccacataatgggacagccggtgacgaggaggagggagagggacgcggaggcggagctggacctgccgccggggttccggttccaccccacagacgacgagctggtggagcactacctgtgccgcaaggcggcggggcagcgcctccccgtgcccatcatcgccgaggtggacctgtacaggttcgacccgtgggacctgccggagcgcgcgctcttcgggacccgcgagtggtacttcttcacgcccagggaccgcaagtaccccaacggctcccgccccaaccgcgccgccggcgacgggtactggaaggccaccggcgccgacaagcccgtcgcgccgcgcgccgccgcccgcacgctcgggatcaagaaggcgctcatcttctacgccggcaaggcgccgcgcggggtcaagacggactggatcatgcacgagtacaggctcgctgacgccggccgccgcgccaagaaggggtcgctcaggttggatgactgggtgctgtgccggctgtacaacaagaagaacgagtgggagaagatgcggctggggaagggggcagccgccggcacagtcaaagaggaggaggccatggacatgagcacctcccactcgcagatcacccactcgtggggcgagacgcgcacgccggagtcggagatcgtggacaacgacctgccgttcccggatccggcgatgatggtgcccaagaaagagcgggtggacgacggcggcagcgccaggaccagcgacctgntcgtggatctcagctacgacgacatccaaagcatgtacagc

SEQ ID NO: 3147 - DNA, 292 bp, Zea mays
  Clone ID: TF_uC-zmflb73187e11b1
gtttgcttaatttcatgtcctgcctaccttttcctaccggtatccaggcctcccccagcccggctcgggcgtcgcccatacatgaaccatccgtcctaggagcaatactacgtccagccggcgccaggcccggcggtggcggacgatgccacctgcctcgcgccggactaacggttacacccgaccgatgaggagctggtatcctactacctgaagcgcaaggtcctaagacggccgctcaaggctgatgccatcgccgatgtggaccttgacacgctcgagccctgggacc

SEQ ID NO: 3148 - DNA, 1319 bp, Zea mays
  Clone ID: TF_ZmC198_10
agaaaatgaaccttgactagtttattatgactttcatgtcagaggccccgtaccaacatcacgcagaaataaaaagagcatatacgagtactcaactcttcttctacttccaacttgctcgtgcagtatatctacaaccgaattcacatctaagctagcatcgcggctcgccgttgcagagctgaaccgcatttcggtgatacagttcaccacttcttccaagttgcgcgtgcaccttcctcacttcagagttcagacttcagtatagcaggtgggctaagggagagaagaagaggtggtcctgccacgggctgcgcagctgaaacgggtcctgcatctgcgtccagtcggcgactccgaggtgcgttggcacctgcagggtgggcaggtcaccgtgcctcaccgccgggccggcaacgctcgcggcatgcagtagggaggacgacgtcgacgctaccgtgaccgtcgtggcgtccgcggcctccgtcttggcctccctgggcgcgccgtagctgtcgcccgacagcgcgggggaggacgaggactgggaactgcaggaagcttgtgtcgtccgacgacaggtagtcgtcgccggtggagccgtcggcctggaccagggatgttgctctagccccgccgatgcgcgtctgcatctcctccatggcagaggccctctgctcgagctccttcagtggcgtggccttcctgtagatcttgcagatcaccatgtcctccttgggaggcggcggcggagcggcgcggccggcggcggagtggtcgggtaggcggtactcgttcatgacccagtccgtcttggtgccgcgcggggcgcgcccctggtagaagacgagcgtcttcttgagcccgatcacccgcttggcgtcgccggagctccggatggccctgtccgaccccgtggccttccagaacccgcgctccgtcgtccggttcggccgcccgccgctgccgccttgcggtcgcgcggcacgaagaagtaccactccctctcgccgatcttcgccatcgcaggaaggtcccaggggtcgtagcggtagatgttgaggctgccgatgatgtcgaagtggagctgcttgccgtggaccacgcgggagaggtagaagccgaggagctcctcctcggtgggatggaaccggaagcccgggaggtcctgctccacctccatggacgccgccccggccatcactgccatcgatcggtgctcgttctgctctcgtgagtcgtcttcttctcggacgcacgacgctgctctgctctgctctgcttgttgccccacgcgtccgcccacgcgtccgcgaaca

SEQ ID NO: 3149 - DNA, 471 bp, Zea mays
  Clone ID: TF_LIB3151-013-Q1-K1-H9
tacggctggagaagacgacagaaggggacccttttgctttctttatccaataataataaccccggttttccctctccatacccttttgcttttctttatccaataataagaacttcccacgagtggctttaactggtctggtctggtctggtcggacacacaaaaatattagtatggagaaggtgagttttgtgaagaatggagagcttagattgcctccggggtttcgtttccacccgactgatgaggagccggttttgcagtacttgaagcgcaaggtcttctcctgccctctgccagcctctatcattcctgaggttgatgtttgcaagtctgatccttgggatttgccaagtgatttggagcaagagagatacttctttagcaccaaagaggccaaatatcccaacggaaatcgctctaacagagccacaaattcgggttattggaaggcaactggcttggacaaac

SEQ ID NO: 3150 - DNA, 538 bp, Zea mays
  Clone ID: TF_LIB5117-072-A1-PF1-G4
gattccctctcggaaacggacggtacaatcataccgatcaggagccagctgctgcttcctgtgttggtcccactgccgagatcagcagcagaagcagccgtcggtcctctgcgcctctcgttgatcgcttgatccgaggggatccaaggcgagctgcgtacgtggcggcggcgatgagttcgctgagcatggtggaggcgaggctgccgccggggttcaggttccacccgcgggacgacgagctcgtgctcgactacctgtccaggaagctcggcggcggcgccggaggggccgcggtggcgagcatctacggctgccccgccatggtcgacgtcgacctcaacaagattgagccctgggacctccccgaaatcgcatgcattggcggcaaggagtggtacttctacagcttaagggacaggaagtacgctacaggccagagaacaaatagagcaactgaatcaggctactggaaggccaccgggaaagaccgtgcgataagccggaaaggcttgctagctggcatgagaaaaaccct

SEQ ID NO: 3151 - DNA, 224 bp, Zea mays
  Clone ID: TF_700029568H1
tgaggaggccatggagctgccgccggggttccgcttccaccccacagacgaggagctcatcacgcactacctcgcctccagcagtagcagcctcgtcgcgtcgtcggtcagagctggcgcgtcgtcaaagcaggacgagtgggtgctgtgcaggggtgtcaagaagagcatcgagccgccatccgtgctcggcagcaagagggtctcgtcggttgcgtgcatgg

SEQ ID NO: 3152 - DNA, 1412 bp, Zea mays
  Clone ID: TF_ZmC12224_2
ctcgaggccggccgggaagagtcaagatacatcagagtagctcattgcatagtttcagtgtgtaattatatatttgtctcctctagtgcagtactagagtctagtctagctagtttagattgagtctgcttgttcatctagcgcgtgttttggggtagctagctagctagacacgcgcacccggacaaacgcacgcagcagacaccaagcaggaatcatcggcggcaggcggagggatggggctgagggagattgagtcgacattgccgccggggttcaggttctatcccagcgacgaggagctggtatgccattacctctacaggaaggtggccaacgagcgctccgtgcagggaacgctggtggaggtcgacctgcacgagcgcgaaccatgggagcttccagcttcagggaccgcaagtacgcgaccgggccgcgcacgaaccgcgccaccaagacgggctactggaaggccaccggcaaggaccgcgaggtgcgcgacccggccgcccgcgccgtcgtcgtcggcatgcggaagacgctcgtcttctaccagggccgtgcccccagcggcgtcaagtcatgctgggtcatgcacgagttccgcctcgactcgccgcgtacgacgacgacgccaccgaaggaggactgggtgctgtgcagggtgttccagaagcggaaagtcgacggcagcgagcaagacaacggcgtctccccctcgccgccggtctttgccagcgcatcgcagtcgcagggggtcgtcctgccgccggaccagccctgcgtggtggacgcgtacgtcgtggtagaccagccgggctcttcttccgtcggcctcgcgccgccgcaggagaacctcggtagcggcctggacgcgttgctgacgaacggagcgatgtggcagtacacctcgtcggtcttcggtcacttgttgccgcaggaggcgaccaactccccgccggtgatggacctaggctccaggggaggaggaggaggaggagactacgggtgcagcttcttctacgacagcagcttcgaggacatggccaacatcgggttccgacaagggtggatgggctgatccaggaccaggaggcacacgtacgtgcgtgcagtcatgcgatatggaatgtgcatttgtgaaggaagtgattgaattgattccattagtagtagcaccctctagtgttgtacagtaggtacgtatagtgtgagattggattattgggaattgttagagtgcacgggcctctcaaatccaaagaagtaacagcggaaagaaaagctagtagctagagcacacatgtatatttgcacaaggtagatggtttgatcaaccgcatgacacggcaattgtatatatctctccacccctactaccatgtttgtaaataaattaatataaatcaatc

SEQ ID NO: 3153 - DNA, 717 bp, Zea mays
  Clone ID: TF_ZmC38242_2
catcctctccagtgcctaggtggtactggtggatcacccaattggtcttctcagcctttccacccttcaacgggcttatataaagcaccattattttcttacaaccaaggtgttttccatcaactagtactggctttgtgttgcctgtcttgtgccaacggacatcagcatcgtcagtgtttatccttcgacgcttcctagtcccagtgttgtaagccttaaatgttctgtggaagaaatgtgatacacttccattttgtttaacacctggaagtttctgtggatgagtgtaacagatgccttcatcttcctcaactgttggaatgaattcatcaatgaacggatgtggttttattccagattttccatgttttgccattaagtgccagattaattcctggtcagaaggatcaaattttacacctttaggcaaaccgggccactggtgaacaacatcactgttatcaatcacatgactgcactttgggcactctttacttgggttgccgatccatttctgtttacttggatctgaagacccagaagcattttttattttggtggcaaatctttggctgtcaattatccaagttgtccctgtcatggctgcggcagcgcttcctaccacggccgcagggtcctagggttccggcgagcacgcggcgacggagtgagaacggggtggagcagggagaactttggtttgaacgagggcta

SEQ ID NO: 3154 - DNA, 1892 bp, Zea mays
  Clone ID: TF_ZmC512_1
cctcgaggccggccgggccgggacacaccaggccgagcgcgcgcgcacgcagcagccaacaggggctcgccggggtagcttttaacagggacaagcctcctccccccggccggccctctttttctctttgttctcttcccggccgctttgttccctctcgctcgccctcttcttttgcgcggccctgtcattcccctggggatcagccttagcgttgcctcatatgggggcgagctagctagctgctgagcaaagcggcgggacaacaagaggctttccatctctctccctccctctctctgatctgctatcgtccccttccctgcttccctccccctcttcttgtagagaaagaggaggcgagggctgccggccggccgggacgtggtgacaagctaggctagctgggggccggacgagcgagagggcgagatcgtcgattcgcgtaatacgtcccgtcgccggccatgacatggtgcaacagcttcaacgacgtgcgcgccgtggagaacaacctggccaccgccgccgccgtggccgccgccgccgccaagaaacagcagcagcagcaggcatcctcgcacgtcaacctcatcaggacctgcccctcctgcggccaccgcgcacagtatgaacaggtgcaggcggcggcgacgatccaggacctgccggggctgccggccggcgtgaagttcgatccgacggaccaggagctgctggagcacctggaggggaaggccaggccggacgcccgcaagctgcaccacccgctcatcgacgagttcatccccaccatcgagggcgagaacggcatctgctacacgcatccggagaggcttcctggtgtcggcaaggatggcctcattcgacacttcttccaccgtccgtctaaggcttacacgaccgggacgaggaaacgacgaaaggtccataccgacgaacagggtggcgagacgcgatggcacaagacgggcaagacccgtccagtgttcaccggtggaaaactcaagggctacaagaagatcctggtactctacaccaactacgggaagcagcggaagccggagaagacaaactgggtgatgcatcagtaccacctagggtccgatgaggaggagaaggacggcgagctcgtcgtctccaaggtgttctaccagacgcagccgaggcagtgcggcagcggttcggcgacggctaaggacgccatcccgctcgctgccaacgcagcgactgaccaccaccaccaccaccaccatgacggtggcaatggcggcggcaacaacatgttgaaggaggcaggcattgtagatttctacagcccagcagcactaattagctacaaccaggcagcttctaacagcagggttgccgcttctgctcacctggtgcctaactttgaggtgcacactacatcgggggctgctggctttggtccctgaccaagacgcgcaagaggaactattcgactgatataggttagaggggagggaaatgcaggcagataatggcaacttcatgaatgcaataacttactacaaatggtcgacgagtttactgaaccgtaatggtggacaataagaggatgagtacgtgttgagtgagtggttggacatacaaatactgaagtgtaggaatccatacaactatacattgttcattaattgttacacatatatgtaacttgatgctatcaattttttgtttaatgatctttgttccataataagaatggagtttaatattgtacatcagttctttattacctaaaggacttgtatatgtatacaaatcattgtacacctttttttggaagaacatatctgttgtatcattttgttgattgttgctcaacccttccagcaaagtaaaatgaagcatatataactttgaat

SEQ ID NO: 3155 - DNA, 1455 bp, Zea mays
  Clone ID: TF_ZmC545_5
cgtccgttctcggacgcgtgggatttccctcacctcccgcagcagctagccgccagccaacaaccgaaccaaccaaccaacccacagcgagcgagtaaagcgtccaatggtagcgatggcggccgtgcagcagaagcagcagcagcagcgccgcgacgcggaggcggagctcaacctgcccccgggcttccggttccacccgacggacgaggagctggtggcgcactacctctgcgcgcgcgccgcggggcgccgcccgccggtgtccatcatcgccgaggtcgacctgtaccgcttcgacccctgggacctgccggagcgcgccctctttgggcgccgcgagtggtacttcttcacgccgcgggaccgcaagtaccccaacggctcccgccccaaccgcgccgctgggtcgggctactggaaggccacgggcgcggacaagcccgtggagcacgggggccggacggcggggatcaagaaggcgctcgtgttctaccacggcaagccgtcgcgcggggtcaagacggaggggatcatgcacgcacgctcgggatccagaaggcgctcgtcccctacgccggcaaggcgccgcgcggggtcaagacagactggctcatggctgagtacaggctcgctgacgccggccgccgcgccaagaaggggtcgctcaggttggatgactgggtgctgtgccggctgtacaacaagaagaacgagtgggagaagatgcggctggggaagggggcagccgccggcgccggacgcgtgggggaggccatggacatgagcacctcccactcgcagatcacccactcgtggggcgagacgcgcacgccggagtcggagatcgtggacaacgacctgccgttcccggatccggcgatgatggtgcccaagaaggagcgggtggacgacggcggcagcgccaggaccagcgacctgttcgtggatctcagctacgacgacatccaaggcatgtacagcggcctcgacatgctgccgccggccggcgaggacttgtactcctcgctcttcgcgtcgcccagggtcagggggaaccagcccaccggacccgcggggttgggccccttctgagtgagctcaggcgaggatggaggcatggagatcaggagagaagacggacggcgttgccaactctgtaaatacagcataggacgaggagtcgaacctgactgaacctggtcggggttacaagtcgagtgtgtcggtgtttcgtacatgggaaccgggccttacatgggagccggcccggtcttggtttggcgctggctcattctttagtttcacttcctgcgcagacggtagatgtgtatgcatagctgttcactatcacttcctcttcaacagaaccgattcactccgaaacacaaaaaaaaaaaaaaaaaaaaatttataataattaatttttttttaaattttattgtatttaatttt

SEQ ID NO: 3156 - DNA, 872 bp, Zea mays
  Clone ID: TF_ZmC594767_1
atgccggccgtcgaggccggccgctaaacccaaggcggaccatggtcatggtcatgccttttactcctttctcgtctgccagcgcgcgggggaaggagggacgaaagtgatgcagccgccgccgcagctgccggcggctttgccggtagggttccgcttccgccctacggacgaggagctggtgctacactacctcaagcctaagatcgcgggtcgcgcgcacgcggatttgctcctcatccccgatgtcgacctctcggcgtgcgagccttgggagctgcccgctaaggccctcatcaggtccgacgatcccgagtggttcttcttcgcgcccctagaccgcaagtaccctggaggccaccgctccaaccgctccaccgcagccgggtactggaaggccacgggcaaggaccgcctcatccgctcgcgcccagcaggcaccctcatcggcgtcaagaagacgctcgtcttccacagaggcagggcaccccgaggacaccgcaccgcctggatcatgcacgagtaccgtacggccgagccccagctcccacaaggccaaaacggtagcttcgtgctctaccgcctattcaacaagaacgaggaggaatccgaagcctcagacgctgccgattcaccgtccacgtcgtctccgcccatcgcgccggaggtgaaaactgagaatttgagccaaccgacttctgccaaaatgtctccccatattgcaactgtcagtagcaatgagccaacgtctaatcagggagacgttaatcttctggatgtgttaacccagcttccagacctacatcctgagcaagcattcgatggattccctaccatcacctcttctatgcgcccttacactgatcatccat

SEQ ID NO: 3157 - DNA, 849 bp, Zea mays
  unsure (1)..(849): unsure at all n locations
  Clone ID: TF_ZmC1378_2
attgattccctccacctttcttgtttcccacaagcagcagcagcaccgtagttcttggcatcatcatcaattgaagagattatcgatcgatcggccatggtggagcctagtgtgaaatcgtcagatcagcatggtggtggaggagtcgacgtgctgttcctgccacctggcttcaggttccatcccacggacgaggaggtcatcaccagctacctcctgcagaagctcctcaaccctagcttcgcgccgcatgccatcggggaggtggacctcaacaagtgcgagccatgggatctcccaagcaaggcgaagatgggggaggaggattccaaggagtggtacttcttctgccgcaagggcatgaaatacccgacgggcacgcgggcgaaccgcgccaccaaggagggatactggaaggcgacgggcaaggacagggagatcttcttcaagccagtagctgggcacgacgacgtcgaccgccgtgagcagctggtggggatgaagaagacgctggtgttctacacgggcagggctccaaggggcaccaagaccaactgggtgatgcacgagttccgcctcatcgagggcaggcaccgcaccaccaacgacgacctactactacgcttcaaccccaaggatgaatgggtcgtgtgcaaggtgcaccacaaagggggccaacatgatgccagcgccgccaaggccgctggcggcggcggaaaagagcagcactactcgtccgccgccggaacgcccaacgtcagctccgtcgagaccggcggcggcgacgaccacgacngagtccctagtgactcatgctgctggggatatactcagcagctgccacttcac

SEQ ID NO: 3158 - DNA, 824 bp, Zea mays
  unsure (1)..(824): unsure at all n locations
  Clone ID: TF_LIB4741-094-Q1-K1-F10
gtaccctcgnaggcnncggccgggattcctcacacccacacaaaccgcacctcatccctgttgacccgacggtggcgctcatctcctccccgacggtggcgctcatctcctccccgacggttctccccatcgacctgctggcttcccttcgtcttccccgacactgatcctcatcactcatgtctgctgaagttgccggaggaaacccttatttcttctcgtgctacttctggttcatatactgcataaaattccgagatttcacttgatacaagtggaacactaggagttttgtgcgaatacttcctaccatgtgaatcagttgtagctggtgaatttggcaagactcaagttctctcatctggtttcagaaaacatctgtcggttgattgcttggtctcctgtttcctttgagtcttgccaaccaaagttttctctcagcatcagttgtggtctacgaactctttctgtgacttgaccaacatctctttttgtcctgtcaatcttgcaacactcccttccaaagacttgtctagaggctggattgccttgctctctgctggcgctgcagcctcctttagtcttccaagttttctctcggcagcagttgtgatatacgaactctttctgtgacttgaccaacatctcttttggtcctgtcaatcttgcaacactcccttccaaagacttgtctagagcttttgtcttgagatctttcatcagtgctaaaggcaaaagaggtcttagggcgatggcgcaaactagcctgcctcctggatttcgtttccacccaactgatgttgagcttgtttcctactatttga

SEQ ID NO: 3159 - DNA, 849 bp, Zea mays
  Clone ID: TF_LIB4758-097-R1-K1-B9
ctcgagccggccagcagcccatcaccagtcgtccggcgcccgaccagccgcaccacggagcgcggcttctggaaggctacgggctccgaccgcgccgtgcgctgcgcccacgaccccaagcgcctcatcggcctcaagaagacgctcgtctactacgagggccgcgcgcctcgtggcaccaagaccgactgggtcatgaacgagtaccgcctccccgacgcctgcaataacaacaacaacaacaataatgccgtcgccggcgactcatcgacggcggcagcggcctcctccaccaccaccaccaacaactcgcctaaggaggacatcgtgctgtgcaaggtctaccggaaggccgtgtcgctcaaggagctggagcagcgagtggccatggaggagctggcgcgcgccacgccgtccgcgcccacaaacgccgggtcgcccgccgactccatgtcgtcgtccgaccaggaccaacaaacccagcttgggcagggaaggagtggagatcatgatgacgatgcccgtcggcagcatctcaccaccgcctgtgatgatgagcatgaagcaagaggaggtggccgagcccgaggcggcgccgctgccggcggtgctgacgaggccgtcgacgctgagcctgccgcagctggaggtggcgaagcagcagcaggagtggatgcaggaccccttcttgacgcagctgcggagcccatgggatggagagctggtctccctactaccccagcgtcctcaacttttaaccaatgcaatctcagaatctcagatcgaccgtcgtcctcgatcagtagctatatatatatggtcattggtcccacagactatactaatagc

SEQ ID NO: 3160 - DNA, 1313 bp, Zea mays
  Clone ID: TF_ZmC13898_1
ctaagctccagctagactgtcctgctctgcttcggcgctactgtgcagtgtgcacagccagccagctctgcagcagagcagagtccggctgtgagccctgaccagagaggattcagtgccatggagagacctgcgcaggcgcccacgcagctgccgccggggttccggttccaccccaccgacgaggagctggtagtgctgtacctccgccggaaggccctggctcgcccgctgccggccgccgtcatccccgtcgtccacgacgtcgccgggctcgatccatgggacctccctggggcaagcgaaggggagggttacttctttagcctgcggcgagcgccggcgaccggccgtggcagccgcaggaggagagctgggagcgggtactggaaggccacgggcaaggaggagccggtgttcctacagtgcggcggcggcggcgtaggcggcaagaggcagctgctcgtgggcggcaagacggcgctcgccttccaccgcagtgagccgtcgccgccgtcgtcgtcgcggacaggctgggtcatgcacgagtaccggctcgccgccgcgtcccgcggcgtggccgagcagaggaagaagaatgcgagccacggttgttgcgatgctgagccgggagagtgggtcgtgtgccgggtctttctgaagaagggagcaagaagaagcaggccgggccgggatggtaaccacagcagagctctgagacaccgcgcatccgctgcgccgccgcagctccgggaaggtgtgggaggacggcagccgttgctgttcccggcgccacagtcgccgtcctcaagctgtgtcaccggcgttaccgacttgtcagacgaagaagacgaagtcagcagcggcagcataacaagagttgcacctcagagagaggcctgatggggattttaagtgttccctcccccctctctcatggtcccgtagcccaacctttttctggtaccatataatgatgatgagttaagcacgagataatcaggtttaaggcatgtccagcgcaggagtgatcccgaaatatcatgtcaaatggatctggcaacctgagtttaaatcaggagcaatagtttctacgcttcatctgtgaagcagcatccactttgatttggaactagaaaatgggcgctgcaacggcccaatggtgtgtaaaacctaaaaatgggatggtagccaaggcattctttaagatgtaatgtccccatcccaaaatataattcgttttatattaaacacatttttattaagcaatatatgagtatgattctcatatatacctatattcattatcattt

SEQ ID NO: 3161 - DNA, 484 bp, Zea mays
  unsure (1)..(484): unsure at all n locations
  Clone ID: TF_LIB5117-061-A1-PF1-E7
tcgagcncggcggccgggataacctactctcggtagactgtgcttgcctcactcgatccctccacccacccggccatcggcggctggttgctgctgcttcttgtgtgggttcttccactggcgtgcagggtcgagatcggcagcagcagccgtcgttcctctcttctagctcccgacaatcgattgatctgtctgagggggaaacgagctgcgtggtggtggcggccgccggggaggcgatgaattcgctgagcatggtggaggcgaggctgccgccggggttcaggtcccacccgcgggacgacgagctcgtgctcgactacctggcaaagaaactcggtggcggcggcggaggggcggcggctgcggttgcgagcatgtacggctgccccaccatggtcgacgtcgacctcaacaagatcgagccctgggacctccctgaaattgcatgcattggcggaaaggagtgctacttctactgctt

SEQ ID NO: 3162 - DNA, 910 bp, Zea mays
  Clone ID: TF_ZmC3684_1
gcccccaagggacagaagacgcactgggtcatgcacgagtaccgcctcgagggcgcctacgcctaccatttcctccccagctccacaagggacgagtgggtgatcgcgagggtgttccagaagcccggcgaggtcccacctgcagcccgcaagcaccgcctcggcgcccttagcagcactaccggcaccgccgcgggcgattcctgcttctcggactctacctcggcctccatcggcggcgcgtcgtcgtcatccacgcctggcccgctgttcgcgtcggcggccgccgccgtggccaatgccggcgccgccgacggcgacaccagctcctactgcggcggcgctgccaaccatggcaacctggtcaccggccgtgagctcgtgccctgcttctccactgccaccattaacggccccctagttgccgccgcgctcggcatcgggcagccgtacaacgcagccccgctgccgttcgagcagcagccgccgcctccggccttcctgccgagcctgcgttcccttcaggacaacctccagcttccaccgttcctctcagcaggcggtctgggcggcggcggggctctccactggctccccgccggcggcatggaggtcaaggtcgagggccgctcggcgccaccgcagatggctgtcggccccggccagctcgatggcgctttcggctggagcttctagttcttcgctgcactacatggttgtgcccatctatctagctagtagtggtttcttcatgcgttgtacgttaagcttggttaatcaactgctagtaagtgactgggtcgtcgttctaagtaatgtagtaactgtgttgtagtctctcatctaactgcagtagcagctttatttgttaaaagattaaaaaaaaaaaaaaaaaagggcggccgcaaaa

SEQ ID NO: 3163 - DNA, 657 bp, Zea mays
  Clone ID: TF_LIB3912-048-Q6-N6-H8
gcccctcacggccagaagaccgactggatcatgcacgagtaccgcctcgaggacgccgacgacgacgacgcccagggcggcaccagcgaggacggatgggtggtgtgccgcgtgttcaagaagaagtgcttcttcaagattggcggaggcgaagggagcaccaccagcagccagggcgcggatgccggcggccacctggccaccatgtcgccgccgctcggcggacaccacgacctggcgtacatgcacccgcacccgtactaccaccacgccgcctcctactactcccagatgcaggccccggggccgcatgccaccgcatactcgcaccacgtgcaggtccaggacctcctcaccaaccaccgacccacggacgacgacggcgccggcaccggctacgacttctccggcctgcccgtcgagaatcaacccggcggcggccttgacgtcggcagcagcgatggcgtcgccacagacgacggtggccagctggctggcgaaaggagggatcagaccaccggtacagccgcagatcatcagtggcaggcgatggatggtttcagcaacggcgggagcgccgaggtgcagcaaatgaccggcgcccaacgaggcgggggagatggatttgtggggttacggaaggtaaaaacttgatga

SEQ ID NO: 3164 - DNA, 639 bp, Zea mays
  Clone ID: TF_LIB4738-096-Q1-K1-A4
aagcctcttacatcttttagatatgcttgcttactagctcactttgctgtgctgtaccgaactacaggggtaggtaggtatgtaggtggagttacattgccgagcaagcgagcgatgccgccaagacaacacgcatcgatcgccatgcccataagcggcgacgctaatggcgacggtattagtagaagaagtagactgatgaccaacctcccgtgcggactccgcttccaccccacggacaaagagctcatgatgcactacctcatgaggaactacggctccttgccgggccccgtccccttcatctgacagtacaacatctaccatagcaaccgctgcaagctccctgcctacgcattgttctgccacaaggatcggtttttcttcaccccctgctacagatggtacaccaacggcgccccccccaaccgcgccaccggatccgcgaactggaaggccaccgcatgcgactaaggcatcctgtctgcgtccacgtccacgattactgctcgcgccagcatcgctaggcggctattggactccgctcgaacttctactcaggtacgacgcccacagcgacctttatggactggatctggccgtagccaccacctctagctatatcgcggaacactactg

SEQ ID NO: 3165 - DNA, 824 bp, Zea mays
  unsure (1)..(824): unsure at all n locations
  Clone ID: TF_LIB4739-110-Q1-K1-D7
atcctttctcggccttttggctaagatcaagtgtagtatctgttcttatcagtttaatatctgatatgtgaaccatgtgttcacttcgatattaaatttattttttgtgggggaggactcactacagtagcttgctgctggggtcctcatgtgtcgcttgggcgttgcactactgcccaagcctggcgcgccccaaaaaaatttcaatgcctctctagatctttcaagctatccttgctttctagctccctttggcgtgctgtaccggacgacaggggtaggtaggtaggtaggtgtagctagctcggcgagcgagggagcaatccggccaacagcacacgcgtcgatcgccatgccgagaagcggcggcggcggcaatggcggtggcattagtagtagtagtagggtgatgcccaacctcccggccgggttccgcttccaccccacggacgaggagctcatggtgcactacctcatgaggcaggccgcctccatgccgtgccccgtccccatcatcgccgaggtcaacatctaccagtgcaacccctgggatctccctgccaaggcattgttcggcgacaagggagtgggtttttcttcagcccccgggaccgcaagtaccccaacggcgcccgccccaaccgcgccgccgggtccgnggtactgggaggccaccggcaccgacnaggccnatcctgtcgtcgtccacgcccacgagccacggcggcgccaacattcgtcgtcgggcgtcaggaaggcgctcgtcttcctaacgcggcaggccgnccaaggggcacagnacggactggatcatgcacgagtac

SEQ ID NO: 3166 - DNA, 2881 bp, Zea mays
  Clone ID: TF_ZmC12473_1
gcgagtattcttccacaccacgtctcctccgtctgcgtctgcgtcccttcctccgcggacgccctcctaaaatccccaaaatccgatccgaccacgaaaccctaaccccatcccgcactctcccctcccctcccccaacacgcgcgcgctttcttagccgctaagcatatccctccccgccacgatctcgatggtggagatggctgtggtggagctcaggacgctgccgctcggcttccgcttccaccccaccgacgaggagctcgtcacccactaccttaagggcaagatcaccggcaggatcaactccgagtccgaggtcatccccgagatcgacgtctgcaagtgcgagccgtgggacctcccggataagtccctgatccggtccgacgatcccgagtggttcttcttcgcccccaaggaccgcaagtaccccaacggtagcaggtcgaacagggccaccgaggcgggatactggaaggctactggcaaggacaggataatcaagtccaagggcgacaagcgcaagcagcataccatcggtatgaagaagaccctcgtcttccaccgtggtcgtgcccccaagggcgagcgcacggggtggattatgcacgagtaccgcaccaccgagcctgagttcgagtccggcgagcagggtggttatgttctttatcgcctcttccgtaagcaagaggagaaaactgagcgctccagcccagaggaagtggatagaagtggctactcacctactccttctcgttcttcacctgacaacctagaggcgaatgaggaagctaatacaccattaaataaggaatctccagaatctgctctgcatgaaagcccgattgagctgccaaaatctgttgaaaccaatggtggttcaatgacaaggtggctggcggacagaaatgataacttgatggctactgcaccagatgtttcccatatacctttccacggacatgctgctggtgtagctaaggttgatccttctgttggtgcttcaggccacttagttaatccccacaatggaaatgatgattataacaaatttgtgtctgatttcactcccattctaccacttgaaaatgcattcttcactgatatacaacaaggagcttttggttttgatggcatcatgaatcctcttgatccccttgatgctttcttgaatcaaacacttgttgatcctgatgaacattcatcaacaacatcaaaagttcagtatgattctgacattccaacagaatttgagaaccattggaatatgaaggttgagcctcaagatgatcaatgctggtgggcaaacataggttttgagccagacgaaccaaatcctctgcttccttgtgacaccactgaccaagacatactttctgttgactctggtgctgattccttcaatgagcttttcaatagcatggaagagactggaattactgttaggcctcaacagttggactccactgtgcaaccaaaccatgtgttcgctagccagggcaatgcaacacggaggctgcggctacaggttgagtgtagggagatcataactaaagatgagagtgaagatgaagtatcatgtgttctaactccagactgtttgaacgattctgttgaggagtccactgcagagaaggatgtggcttctgatggggatgaggctgagtcaacagggattgttattagaagccatcaccctgctccaagatcaagctcagagagttcattcactcaacagggaactgctatgcaaaggctgcggctacagtcaggccttaacaaaggccagcgtcctagtactgatgattcatcaagctgcattatagacgaaccaggaagtcagcacaaagcagaaaaagcagagattgaagaggatgcgagtacaaacctcgctggaagtgctgatgatctacctggtaatatccatgatgatgagcaaaagaacatccctgaacatggtgctgaaatgacttctccagaagccaaatctgttctgaggttgcggaagacttctgaggaaggcaacaaggatgtcaagcaggagagttgtctcgagccacacgtgagagcaccaatgcagaagggaggcttccaatcatacatcatctggctggttcttccggtggctctgctcctgcttctctgtgttgggacatatggatgggtatgaaatctatcctggtgcggtgcaaggcatgacattttgcgcacatgggttcctggcgtcaacctggtgtgcggtcttctgtacataacctgtggcatcctttcaacagccgtaccctgcagtaagacatcccggcattgccaaggcagctgaaaaataaataaaaaaacaagtggtagaaatgacaaggtggaaaagagcgaggtgtgttattgttggttttagtacatcgtagtcttcttttgctgttgttgtagatgtcttgctaatgttgtcgctgttgtgtagttgcaattcaagcccagggctgccagttttatttcctaatgtaatgtagcaagagcgagaccctgttagacgggtgcgctgaaattctgaacctctgtaatatctgatgttcttgtggatacctgtttcagaattttcggttcctgaacccagttactgatggcttgttgatcaaaaaaaaaaaacggaaaaaaaaaaagtccctgtcaccaatagcgggcttcttaattcctgttctgtatggcttagactccgaactatggatgctataagggcactcccttcttcctgtagccgctgtctgtctacgtttgctacagtttgtggatggtgtgctgctgatgggttgtgtggccttcctagttactgttgtgtactgcttagactccaatttatgggtaatgtgaacacacttccttcttc

SEQ ID NO: 3167 - DNA, 665 bp, Zea mays
  unsure (1)..(665): unsure at all n locations
  Clone ID: TF_ZmC5878_2
ttgggtacctcgaggccggccccttgccttctatccctttcttctatcccctccttccccccctctccctctctctctctatcttcctgcctgaggcagcgccatttccgcttccgatcgtggaggcttggtgtggaaggaggaaaggaggccagctgctggttttcggtgcggcggagatgtctgaggtgtcggtgataaaccaggcggaggtggaggatgcgggtgccgggcagctggacctgccgccggggttccgcttccaccccaccgacgaggagatcatctcgcactacctcgcccataaggccctcaaccaccgcttcgtctccggtgtcatcggcgaggtcgacctcaacaagtgcgagccatgggacctgccaggcagggccaagatgggggagaaggagtggtacttcttctgccacaaggatcgcaagtacccgacgggcacgcggaccaaccgcgccacggagaccggctactggaaggccaccggcaaggacaaggagatcttcaggggccgcggcgtcctcgtgggcatgaagaagacgctcgtcttctaccgcggncgcgcgccgcgcggggagaagaccggctgggtcatgcacgagttccgcctcgagggcaagcttcccgagcgggtcccgcgctccgccaggacg

SEQ ID NO: 3168 - DNA, 541 bp, Zea mays
  Clone ID: TF_LIB4720-015-R1-K1-G2
gctgagcacgttgtccctctgttggattcacttctgaacaagtcaaaggaaacagagaagtttcgacttctgcattatcccattcgtcttcattaaatggagccccatattgctctccgattcttggaccaaggcccctaagggcgacagaactgattgggtgatgtatgaatacagaatggaagatgaggatttggtttctgctgggttctcaaaggatgcttatgtactctgcaaaattttcaagaaaaggggccttggtccaagaatcggagagcatcatgggagctcctagaatgaagacggatggaatattgcagaagggcggacctcgaaattttatagtgagctgagaagatgagacctgcgggagacaggctccaaggcaagatgaccagtgtggctgaggggtaacctggtggcgaaaacgggatacgccaagctatggaataatctgttgcgattctagcagatgggaaatcaacccaagaaaagaggttggtcgggtggcattttgaagagatcagtcgggatacctgcg

SEQ ID NO: 3169 - DNA, 1009 bp, Zea mays
  Clone ID: TF_LIB3136-019-C9_FLI
ccgcgccacgacggcggggttctggaaggcgactgggcgagacaaggccatcttcctcggcaacgcctccaggaggatcggcttgaggaagaccctggtgttctacatcggcagggcgccacacggcaagaagactgactggatcatgcacgagtaccgcctggaccaagagaacgttgagattcaggaagatggttgggtggtgtgtagggttttcaagaagaagagctatcaccagagaggcctcaatccggctgaaatggccgccgcactggacgacgacgagctccagcctttccctgttcctatccccggcagctccctgcagccaacagagcacaagaccaaccctactcacctcatgcaatatgactatccttccttcgacccttccatgcagctcccacagctgatgagcgatgaccaggaacaggaacagcccgtgcggccaaccctcctccccggccatcccggcgttgctatggcctccatgagctcactcaacattgagtgctcgcagaacctgacgaagctcacatctaacggcagcgacgagatgctccacgtcggccacggcggtggggctggaggtggtgtagtcgtcgaccgcttcgctggcacgacgacagattggtcgatcctagacaagctcctcgcctcgcaccagaacctcgaccggctcttccacggcaaggtcgtcaccacggcatctgcctccccaatggcggtaccggtataccatcagcagctcatggaactcggtggctcgtcgtcgtccttgcagaggcttccactgcagtacctcggcggcgagacggccgatctcctcaggtaccaccccaagtaattggatcgacctcaagtttagctacctctcttgttgagcagtgaccagatcagggtttttggttgactactagatcgatcgactgcttaattaattcggtctactttgtatggagagtttagggctcctaaatgtatatatatggtgcaactgttttggggc

SEQ ID NO: 3170 - DNA, 647 bp, Zea mays
  Clone ID: TF_LIB4574-005-Q1-K1-F7
aaaaaaaaacaaaaaaaaaaaaaaaaaaaaaggaattttaaaaaaaaaaaaaaaaaaaaaaaaaaaaaaaaaaaaaaaaaaaaaaaaaaaaaaaaaaaaaaaaaaaaaaggggcctccttcttaattaaggaacacacacccccgcaaacggaaaacctccccaaaccgttttttttccctccttggttttttgtaaaatctttgggttcgccatggacgctccaagaaattgcacccttcctgggcgccccaagggaccaaaaaagctgagctttgttgttacagttgtttgcccctggcccaaactggcaggaggtaggtagttaataaaaaagcagttagggctaacctggggggcgaaggggaagttaaagttagtttgggcacccccaggggcgggctaactagttagcttgtaagctggggacaacctgggaaccagcagcagcagcacagtaccagtagtcggggaaaaaaggaatttttttggggacatgtcgggggaaaaagccccggtcctggtaaggcacgggggcggcggcttgaaggccctccggcagttcccgccggggttccggttccgccccacggacgaggagctcgtggtgcataacctccggggcagggccatgggggggccgttccc

SEQ ID NO: 3171 - DNA, 873 bp, Zea mays
  Clone ID: TF_ZmC198_11
tagtataggtctgtgaccaatgcccatatatatatagctacttgatcgaggacgacggtcgatctgagattctgagattgcattggtaaaagttgaggacgctggggtagtagggagaccagctctccatccatgggctccgcagctgcgtcaagaaggggtcctgcatccactcctgctgctgcttcgccacctccagctgcggcaggctcagcgtcgacggcctcatcagcaccgccggcagcggcgccgcctcgggctcggccacctcctcctcttgcttcatgctcatcatcacaggcggtggtagtggtggttgtggtgagatgccgccgacgggcatcgtcatcatgatctccactcctccctgcccaagctgggtttgttggtcctggtcggacgacgacatggagtcggcgggcgacccggcgttgtgggacgcggacggcgtggcgcgcgccagctcctccatggccactcgctgctccagctccttgagcgacacggccttccggtagaccttgcacagcacgatgtcctccttgggcgagttgttggtggtgcatgtggaggaggccgccgccgccgccgatgagtcgccggcgacggtattattgctgttgttgttgttattgcaggcgtcggggaggcggtactcgttcatgacccagtcggtcttggtgccacgaggcgcgcggccctcgtagtagacgagcgtcttcttgaggccgatgaggcgcttggggtcgtgggcgcagcgcacggcgcggtcggagcccgtagccttccagaagccgcgctccgtggtgcggctggggcgggcgccggacgactggtggtggtgctgcttggcaggcctcgaggtacccaatg

SEQ ID NO: 3172 - DNA, 765 bp, Zea mays
  unsure (1)..(765): unsure at all n locations
  Clone ID: TF_ZmC13898_2
cagtgcggccctcgaggccggcgggatcaaaatctctctcgctcgctcgctcgctctccaggctccagctagactgtcctgctcttcttcggtgctactcgctgtgcacagacagccagcttcagcagagtccggctcggctgtcggctgcgagtcctgcagtgcaacaatggacaggcctgcgcaggcgcccacgcagctgccgccggggttccggttccaccctaccgacgaggagctggtcgtgctgtacctccaccggaaggccctggctcgcccgctgccggccgccgtcatccccgtcgtccacgacgtcgccaggctcgatccgtgggacgtccctggggcgagcgaaggggagggctacttcttcagcctgcggcgagcgccggcgaccggccgcaggaggagggctgggagcgggtactggaaggccacggggaaggagaagccggtgttcctgcagtgcggcggcgagcagaggcagctgctcgtgggcgtcaagacggcgctcgccttccaccgccgtgagccgccgccgccgtcgtcgcggacaggctgggtcatgcatgagtaccggctcgccgtgccccgcggcgtggccgaccagaggaagaagaatgcgagacatggctacgttgctgaaccgggagaagtgggtcgtgtgccgggtcttcctgaaagacaggncgaaccgggacgccggcagcaaaactttgcgacacggcgcctccgctccgcggcggcggcggcagcagcagcccg

SEQ ID NO: 3173 - DNA, 1617 bp, Zea mays
  Clone ID: TF_ZmC13658_2
gccggccggttctgggtacccggcttccctcgtcaccggctccggctccggcaccggctcaatacaatcccatcaccaatcattcattccctttgcctactactgctaccttctcctccttccatcttcgatagacgacgaaataatggcggtattcgacgtctgaatcctcgtactcttatactgcatacatacagacagacccttcttcttccttagttccctatagctctagctaggcgaccgatcatgagcatctcggtgaacgggcagtcggtggtgccgccggggttccgtttccacccgacggaggaggagctgctgacctactacctgaagaagaaggtggcgtcggagcgcatcgacctggacgtcatccgcgacgtcgacctgaacaagctggagccatgggacatccaagagaagtgccgcatcggttcgggcccccagaacgactggtacttcttcagccacaaggacaagaagtacccgacggggacgcgcaccaaccgcgccaccgccgccgggttctggaaggccaccggccgcgacaaggccatctacgcctcgccgggcgcccgccgcatcggcatgcgcaagacgctcgtcttctacaagggccgcgccccgcacgggcagaagtccgactggatcatgcacgagtaccgcctcgaggcgcccgtcgacgccggcgccggcgccgcgcaccacctgctgctccccgccgccgaacatcctccctactacacctcgccgccgcaggcgccttcttctactactaccgcagaaaggaaattaaaggagggggccccggctgggctggggacggacgaggccaagcaggttgcttggacgatccgtggcgcggcgggagaccaagcggcgcaggagcaggaggggtgggtgatctgcagggtgttcaagaagaagaacctcgtgcaccacggccagagcagcggcgtgaagcagcaggcagaaggagacgaccacgcggcgtcccatacggcggcggcggcagcgcacatggacgagagcagcccgagccagtgctcgtcggtgaccgtcatcagcgaccacgtgcacgccaacgttaacgacaagcagcagcaggcgcaggcgtcgttgctgatgatgcacacgcaccactccgccagcagcgacgacgacgcgctggaccacatcctgcagcagtacatgggcggcggcaggcaggcgcccgcggcggacgccaagccggcgctgctggagctggaccatcgtctgcaccaccaccaccttgccgcagcgcctactaatactagggccgccgccggcttctacgggaagttcatgaagctcccgcccctcgagcacgccggcctgccgccaagcccaccaccaggagcgcgcgagtacggcgccgccgccgccgccggctgggacgacgacgacgacgcgctggaccgcctcgccgcctacgaccacctcaacggcctctccaacgacgcgtccaagaacatggccgcgttcttcgacgtcgagcctagcgccgccgccgccgccgtggacggcgacctgtggagcctcgcacggtccgtgtcggcgctgcacgcggacttgaccatgaacaacgtctag

SEQ ID NO: 3174 - DNA, 725 bp, Zea mays
  unsure (1)..(725): unsure at all n locations
  Clone ID: TF_LIB4759-043-Q1-K1-B4
ggtaccctcggagcggccagcagaaataaaggcacagccggagctagctagcaggcagaggagcaggacgtacggctgctgctgtgctacgtacgtactcatctgctagctagctactgcagatccaagagtaacaagagccagcagattagctatatatacgtagcatagcatagcagctatcatcatcagcaaggatccccaagcattaatttggtgtggtaaaacatacactacatacatatatatatatagagtacatggcgccaataaaagagatcatggctggtgaccatggcggcggcgaagggaaggaagtagtggtgcttgtgggagactacgactacgagctagaggaggaagacgaagacatgctccccgggttccggttccaccccaccgacgaggagctggtcaccttctacctccgccggaaggtggccgggaaacgccttaccatcgagatcatcaaggacttgaacatctacaagcacgacccatgggaccttccaaagtcgagctcgacgatctcgggagagacgaaggagtggtacttcttctgcctgcggggnaggaagtacaggaacagcatcaggcccaacagggtcaccggctccggcttctgggaggccacgggcttcgacaggcccatccattcggccgcgtccggccgcgccggcgaccccatcggcttcaaaaagtcgctcgtcttctacccgcggcag

SEQ ID NO: 3175 - DNA, 633 bp, Zea mays
  unsure (1)..(633): unsure at all n locations
  Clone ID: TF_LIB4743-075-R1-K1-G11
ggtaccctnccgagcctggccgggctgccaccagcaattcccttccattcctcacatcgtcttcctcctctggccttcccatcttcttcctctcgtcctcgatcgatcatcctgctaactagctagaggtctggcactagctgctaactagaaaaaaggaagaaagcaagcaagctaagaaggaattgaagatcgtatcatcaatgagcatctcggtgaacgggcagtcgtgcgtgccgccggggttccggttccaccccacggaggaggagctgctcaactactacctccgcaagaaggtggcctcccagcagatcgacctcgatgtcatccgcgacgtcgacctcaacaagctcgagccatgggacatccaagagagatgcaagatcgggtcgggtccccagaacgactggtacttcttcagccacaaggacaagaagtacccgacggggacgcgcaccaaccgcgctacggccgccggcttctggaaggccaccggccgcgacaaggccatctacagcgccgtcaggcgcatgggcatgcgcaagacgctcgtcttctaccggggccgngcgccgtacggacacaagtccgactggatcatgcacgagaattgactggacaaccctgact

SEQ ID NO: 3176 - DNA, 297 bp, Zea mays
  Clone ID: TF_LIB3088-025-Q1-K1-E9
ttcacgtaccaaccatatgaccctacacacatctagtgaactgaagaaagacacaagaggggatagcgaacattcctactgcctatggtatacctacatatatatatctgaacaagtcccaccggcgagcacacacactgccacccgttcacagcaggcgaacctatcaatatattccgattccatactactgataccgaactaggcttacactacctcaagaaaaaatctagctccactcctttttcggatgcaatcatagctgacgttgatatgtacaagtttgatccatgcaaa

SEQ ID NO: 3177 - DNA, 828 bp, Zea mays
  Clone ID: TF_ZmC198_7
ggccgcttttttttttttttttttcgaatcaaaataaacggtgttcaacgatcggcacattataagttagtatatcgttaatatgattggagtcatccacgagaagctgctgatccatggcgccctctctctagctcgctcccatggaagaacgaagaagataggtaaaggtcccgagtcccgagcagggagataaggtggagagatccttgggctgccgcggtgcgtgcccgcgcttggtagctcttgggccgtgcggcccagcgcgcggcgcacgggcatcagttgggccgacgactgtgagcgtgggccttcgctttacatataaagctgttggattgtgtggattttggttagaagttgaggacgctggcgtagtaggcagaccaccagctctccatccgtgggctccgcagctgcgtcaggaaggggtcctgctgctgctgattcttcgccgcctcctctctcttcatgctcatcgcagctgacggtgagagcgagacgccgcccacgggcaccatcacgatctccgacgacgacatggagtcggcgggggagccggtgctgtgggacgcggacggcgtggcggtggcgcgccaggctcggcagctcccaggggtcgtgccggtacaggtgcaccgtggggatgatgtcgaacttgagcttcctcccgcgcgccgcctgcttcaggtaaaactccagcagctcctcctccgtcgggtggaaccggaaccccggcagatccagctgatgctgctgctccgccgccatgatggatggatggatcgatgttgatggatatagatgagggtgcgtgtcgcccggccg

SEQ ID NO: 3178 - DNA, 812 bp, Zea mays
  Clone ID: TF_LIB4759-074-R1-K2-C8
cattgggtacctcgaggccggccgggcagcttccattaggccccgtcgtcatgcatgttagcagcaatcaagccctagaaacctcgagctcgtcatagaaaccaagaaagaaccatccaagccatggaggatgatgaggagaagccatcacaaaggatcaccaacaagcaggaggaagacgaagaggatgacttggtgttcccgggcttccggttccatccaaccgacctggagctcgtggggttctatctgaagaggaaagtagagaagaagggtttcagaattgacatcatcagggagatcgacatctacaagcatgacccctgggatcttccaaatgaagcacggcatgtggtgcaaggcgcaggaggagacaaggacgactggtacttcttctgcctgcgtggccgcaagtaccggaacagcatccggcccaaccgcgtcaccggctccggcttctggaaggccaccggcatcgacaagcccatacacgacggtggtgccggcgagcgcgtcgtcgggctcaagaagtccctcgtctactaccgcggcagcgccggcaggggcaccaagacggactggatgatgcacgagttccgactcccctccgcagagttggtcgagctccatgatgctgggatctggacgatctgccgcatcttcaagaagaacacgtcgtacacccggaggtgccagcagcagaagcaggaacacggcagcaagcgaagccaccaccagcagcaggaggagcaggagttgcagtactactacgactactaccgctaccaccacaccatcagcaccgttacttc

SEQ ID NO: 3179 - DNA, 2685 bp, Zea mays
  Clone ID: TF_ZmC545_1
ggtaccttcgggacccgcccgcattcggagcgcagaacccgcccacaggacaggacacacagagccgagccaccccacccaccatcggcgaccagcagccagccgcgggagcgagctgtttaaagacaccgagtcggagtcggacggaggactggcaggcacaaccgaagccaccgcttctagttctcgggttcatcgccagcaatccagaccacataatgggacagccggtgacgaggaggagggagagggacgcggaggcggagctggacctgccgccggggttccggttccaccccacagacgacgagctggtggagcactacctgtgccgcaaggcggcggggcagcgcctccccgtgcccatcatcgccgaggtggacctgtacaggttcgacccgtgggacctgccggagcgcgcgctcttcggggcccgggagtggtacttcttcacgcccagggaccgcaagtaccccaacggctcccgccccaaccgcgccgccggcgacgggtactggaaggccaccggcgccgacaagcccgtcgcgccgcgcgccgccgccgccgacgcccgcacgctcgggatcaagaaggcgctcgtcttctacgccggcaaggcgccgcgcggggtcaagacagactggatcatgcacgagtacaggctcgctgacgccggccgccgcgccaaaaaggggtggctcaggttggatgactgggtgctgtgccggactgtacaacaagaagaacgagtgggagaagatgcggctggggaagggggcagccgccggcgcaggtcaaagaggaggaggccatggacatgagcacctcccactcgcagatcacccactacgtggggcgagacgcgcacgcccggagtcggagatcgtggacaacgacctgccgttcccggatccggcgatgatggtgcccaagaaggagcgggtggacaacggcggcaacgccaggaccagccaccgcttcgtggatctcagctccgacgccatccagggcatgcagaccggcctcgacctgctggcgccggccggctaggacttgttctgctcgctcctccggagaccaagggacagagggaaccgctaaactgggcatgcggcggtgggccctcacggaatgaactcaggctaagatggagacttgtacatcaagctagatgtcgggcggtattgcagaagctgcagattgagtaattgaagagccgttgtagttgtgttgtcctgggtgcggttttatatgtgggatgtgacgtctttctttcgtgtcataggagcctaacctgcgcccgaccctggtcttggttcagaggtgtctccgactgtaggtaaaaatcacacgcaggcgggcggcgcggccgggcagctcttttcaattccctccatttccctcacctcccgcagcagctagccgccgccagccaacaaccgaaccaaccaaccaacccacagcgagcgaggaaagcgtccaatggtagcgatggcggccgtgcagcagcagcgccgcgacgcggaggcggagctcaacctgcccccgggcttccggttccacccgacggacgaggagctggtggcgcactacctctgcgcgcgcgccgcggggcgccgcccgccggtgtccatcatcgccgaggtcgacctgtaccgcttcgacccgtgggacctgccggagcgcgccctcttcgggcgccgcgagtggtacttcttcacgccgcgggaccgcaagtaccccaacggctcccgccccaaccgcgccgccgggtcgggctactggaaggccacgggcgcggacaagcccgtggagcacgggggccggacggcggggatcaagaaggcgctcgtgttctaccacggcaagccgccgcgcggggtcaagacggagtggatcatgcacgagtaccgcctcgccgaagccggcggcgcccgcgccaagaagtccggcgccggcacgctcaggctggatgactgggtgctgtgccgcctgtacaacaagaagaacgagtgggagaagatgcagcagcagaaggagaaggagaaggagaagaaggcgatggagtcggaggcgtcgctctcgcactcccactccgacacgcggacgccggagtcggagatcgacgacgacacgttcccggagctgggctccctgccggcgttcgacgacatgggcccagccccagcagcagcagccactgccggcgtcgtcctgcccaaggaggaggtggaggacttcggcgacctcggcggcgacgactggctcgcgggcatcaacctcgacgacctgcagatgccgggggacgccgccgatttctacggctccatgctcgtctcgccgatggccgccaagatggagccggacggcggcttccccttcttctgagatccttcggcgactccggggacgaccggatgcagcgcaacgcaaactgtgtatagttcagattttcttcatggaaccaacaacaacaacaaaaaaagttctgctaatatcttgttctagtggtgtagtgcagaagtagcagcaggcatgattgaagttccattgtagtactgatgttcatcgccacttgatctgtgacaagtgacggcattctttcgtttcttggctgcaaattcttcgttgttcagaatataatttcagatgggtaatgccaattcgggcccgtctttagcggtt

SEQ ID NO: 3180 - DNA, 1389 bp, Zea mays
  Clone ID: TF_ZmC545_10
ctgtgcggcgctcgagccggccgttccgaaagaccacaccactccactccctccatttccctcacctcccgcagcagctagccgccagccaacaaccgaaccaaccaaccaacccacagcgagcgagtaaagcgtccaatggtagcgatggcggccgtgcagcagaagcagcagcagcagcgccgcgacgcggaggcggagctcaacctgcccccgggcttccggttccacccgacggacgaggagctggtggcgcactacctctgcgcgcgcgccgcggggcgccgcccgccggtgtccatcatcgccgaggtcgacctgtaccgcttcgacccctgggacctgccggagcgcgccctctttgggcgccgcgagtggtacttcttcacgccgcgggaccgcaagtaccccaacggctcccgccccaaccgcgccgctgggtcgggctactggaaggccacgggcgcggacaagcccgtggagcacgggggccggacggcggggatcaagaaggcgctcgtgttctaccacggcaagccgccgcgcggggtcaagacggagtggatcatgcacgagtaccgcctcgccgaagccggcggcgcccgcgccaagaagtccggcgccggcacgctcaggctggatgactgggtgctgtgccgcctgtacaacaagaagaacgagtgggagaagatgcagcagcagaaggagaaggagaaggagaagaaggcgatggagtcggaggcgtcgctctcgcactcccactccgacacgcggacgccggagtcggagatcgacgacgacccgttcccggagctgggctctctgccggcgttcgacgacatgggcgcagccccagcccctgccggcgtcgtcctgcccaaggaggaggtggaggacttcggcgacctcggcggcgacgactggctcgcgggcatcaacctcgacgacctgcagatgccgggggatgccgccgatttctacggctccatgctcgtctcgccgatggccgccaagatggagccggacggcggcttccccttcttctgagatccttcggcgactccggggaccggatgcagcgcaacgcaaactgtgtatagttcagattttcttcatggaaccaacaacaacaaaaaaaaagttcttgctaatatcttgttctagtggtgtagtgcagaagtagcagcaggcatgattgaagttccattgtagtactgatgttcatcgccacttgatctgtgacaagtgacggcattctttcgtttcttggctgcaaattcttcgttgtccagaatataatttcagatgggtaatgccaattcgggccgtgttaaaaagaaaaaacacatacattctagataaacaaacacgaacaatgagcagacacaa

SEQ ID NO: 3181 - DNA, 1385 bp, Zea mays
  Clone ID: TF_ZmC545_3
aagacaacaccactccactccctccatttccctcacctcccgcagcagctagccgccagccaacaaccgaaccaaccaaccaacccacaggccacagcgagcgagtaaagcgtccaatggtagcgatggcggccgtgcagcagcagcagcagcagcagcgccgcgacgcggaggcggagctcaacctgcccccgggcttccggttccacccgacggacgaggagctggtggcgcactacctctgcgcgcgcgccgcggggcgccgcccgccggtgtccatcatcgccgaggtcgacctgtaccgcttcgacccctgggacctgccggagcgcgccctcttcggccgccgcgagtggtacttcttcacgccgcgggaccgcaagtaccccaacggctcccgccccaaccgcgccgccgggtcgggctactggaaggccacgggcgcggacaagcccgtggagcacgggggccggacggcggggatcaagaaggcgctcgtgttctaccacggcaagccgccgcgcggggtcaagacggagtggatcatgcacgagtaccgcctcgccggcgacgcgaagaagtccggcgccggcacgctcaggctggatgactgggtgctgtgccgcctgtacaacaagaagaacgagtgggagaagatgcagcagcagaaggagaaggagaagaaggcgatggagtcggaggcgtcgctctcgctctcgcactcccactccgacacgcggacgccggagtcggagatcgacgacgacccgttcccggagctgggctctctgccggcgttcgacgacatgggcccaggcgcagccccagcccctgccggcgtcgtcctgcccaaggaggaggtggaggacttcggcgacctcggcggcgacgactggctcgcgggcatcaacctcgacgacctgcagatgccgggggacgccgccgatttctacggctccatgctcgtctcgccgatggccgccaagatggagccggacggcggcttccccttcttctgagatccttcggcgactccggggaccggatgcagcgcaacgcaaactgtgtatagttcagattttcttcatggaaccaacaacaacaaaaaaaagttctgctaatatcttgttctagtggtgtagtggtgtagtgcagaagtagcagcaggcatgattgaagttccattgtagtgctgatgttcatcgccacttgatctgtgacaagtgacggcattctttcgtttcttggctgcaaattcttcgttgttcagaatataatttcagatgggtaatgccaattcgggccgtctttagcggtttatgtttggagccttaaaaaaaaaaaaaaaaaaaaaaaaaaaaaaaaaaaaaaaacccccccccccc

SEQ ID NO: 3182 - DNA, 1192 bp, Zea mays
  Clone ID: TF_ZmC530453_1
ccggcgtcgtagtactacgcggtgatgaggtccatggagagcacggactcgtcgtccggtgagctaccgccgcagaagcagccgagctcggcgccggatctcccgccgggcttccggttccatcccacggacgaggagctggtcgtccactacctcaagaagaaggccgcgtccgtgccactccccgtcgccatcatcgcggaggtcgacctttacaagttcgatccgtgggagctacctgataaggcgacattcggcgagcaggagtggtacttcttcagcccgagggaccgcaagtaccccaacggagcgcggccgaacagggcggcgacgtccggctactggaaggcgactggcacagacaagcccatcatggcgtccggcggcaaccgcgagaaggtcggcgtcaagaaggctctcgtgttctaccgcgggaagccgccaaagggcctcaagaccaactggatcatgcacgagtaccgcctcgcggatgcggcgagctcaaccaccagccggccgccgccgccttgcaacgccggaggcaaggccacgtctctcaggctcgacgactgggtgttatgccgcatctacaagaagatcgacaaacttggagtcggcgatccgccgcggatcatggagtgcggcgaggactccgtggagaatgcggtggcagcctacccgacgcatgccgcggctgctgccatggccgtcgcagtcgcaggcggaggaggggcttaccataccggcaattacacttcgctgatccaccaccatcacgaggacagcttcctggtggatgggctgctcacagcagaggacgcgggcggcagctccctgagccagctagccgcggcagccagggcagctgctccaacagacaccaccaagcagctcctcgtcccgtcctccaccaccccgttcaactggctcgacgcgtcggcactcacgattcttccgccggcaaagaggttccatgggtacaacagagacaccactgacggcggcggcacgtccctcccgtcgccgtccgagaggaataacctgcaggcggctgtcggcgccgtcgatagtggcgccagcggtggcactagtgccgtcattccatcattcctcaatccgctcggcgtgcaaggtgcgacaacctatcaccaccacgccattttcggcacaccggtgacgccggaagccgcca

SEQ ID NO: 3183 - DNA, 1525 bp, Zea mays
  unsure (1)..(1525): unsure at all n locations
  Clone ID: TF_ZmC545_4
cctcgaggccggccgggacgggggccacaccgcgcgcgcaatacacgggacacacgcagatccgagctaaccaccgcagatccgagattatccagccggagcgaccttttcttttttcttttacacagcgggacagagaaaggagtcaggcagccaaagccacccaccgcttttaccgatcggcgttgccgccaccgctagcattgtcggcttcagctccatccaaatccaccgccagcaagcaagccggcgccatgggtctgccgatgaggagggagagggacgcggaggcggagctgaacctgccgccggggttccggttccaccccaccgacgacgagctggtggagcactacctgtgccgcaaggcggcggggcagcgcctccccgtgcccatcatcgccgaggtggacctgtacaggttcgacccctgggacctgccggagcgcgcgctcttcggggcccgcgagtggtacttcttcacgcccagggaccgcaagtaccccaacggctcccgccccaaccgcgccgccggcaacgggtactggaaggccaccggcgccgacaagcccgtcgcgccgcgcggccgcacgctcgggatcaagaaggcgctcgtcttctacgccggcaaggcgccgcgcggggtcaagacggactggatcatgcacgagtacaggctcgccgacgccggccgcgccgccgccgccaagaaggggtcgcttaggttggatgactgggtgctgtgccggctgtacaacaagaagaacgagtgggagaagatgcagctggggaagaccgccgtcgccggcgtcggcgccaccaaggaggaggcgatggacatggccacctcgcacacgcactcccactcccaatcacactcgcactcgtggggcgagacgcgcacgccagagtcggagatcgtggacaacgacccgttcccggagctggactcgttcccggcgttccaggacccggcgatgatgatgacggtgcccaaggaggagcaggtggacggctgcagcgccaagagcggcaacctgttcgtggacctcagctacgacgacatccagggcatgtacagcggcctcgacatgctgccgccgcccggggaggacttctactcctcgctcttcgcgtctcccagggtcaaggggaaccagcccgccggagccgccgggttgggacagttctgagctgaggcgaggatggagccatggatcaggagatgaagacggttgcgaactctgtaaatacagcataggagtcgaacctgaccctgacccttgttggggttacaaggttttccgagtgtcggtgtagcgtacatggagccggcggcgcggccgggccggctcattctttagtttcacttccaaagcagacgggtagatatatgtgtagctgttcacttaaactctcttcgacagaacaaccgacgaaattttgctcttgtttataagaactaccttgactgtcgcttccaaaaacaccaaaaaaaaaaaaacggacgctggaaaagnctggg

SEQ ID NO: 3184 - DNA, 1386 bp, Zea mays
  Clone ID: TF_ZmC545_6
aatgacagcgcagaacccgcccacaggacaggacacacagagccgagccaccccacccaccatcggcgaccagcagccagccgcgggagcgagctgtttaaagacaccgagtcggagtcggacggaggactggcaggcacaaccgaagccaccgcttctagttctcgggttcatcgccagcaatccagaccacataatgggactgccggtgacgaggaggagggagagggacgcggaggcggagctggacctgccgccggggttccggttccaccccaccgacgacgagctggtggagcactacctgtgccgcaaggcggcggggcagcgcctccccgtgcccatcatcgccgaggtggacctgtacaggttcgacccctgggacctgccggagcgcgcgctcttcggggcccgggagtggtacttcttcacgcccagggaccgcaagtaccccaacggctcccgccccaaccgcgccgccggcgacggatactggaaggccaccggcgccgacaagcccgtcgcgccgcgcggcgcccgcacgctcgggatcaagaaggcgctcgtcttctacgccggcaaggcgccgcgcggggtcaagacggactggatcatgcacgagtacaggctcgctgacgccggccgccgcgccaagaaagggtcgctcaggttggatgactgggtgctgtgccggctgtacaacaagaagaacgagtgggagaagatgcggctggggaaggagggcgccgccaaagaggaggccatggacatgagcacctcccactcgtggggcgagacgcgcacgccggagtcggagatcgtggacaacgacccgccgttcccggatccgccggcgccggcgatgatggtgcccaagaaggagcgggtggacgccggcggcagcgccaggagcagcgacctgttcgtggatctcagctacgacgacatccagggcatgtacagcggcctcgacatgctgccgccgcccggcgaggacttctactcctcgctcttcgcgtcgcccagggtcagggggaaccagcccaccggagccgcggggttgggccccttctgagtgagctcaggcgaggatggaggcatggagatgaggagagaagacggacggcgttgcgaactctgtaaatacagcataggactaggagtcgaacctggtcggggttacaagtcgagtgtgtcggtgtttcgtacatgggagccggcccggtctttggcttggcgctggctcattctttagtttcacttcctgcgcagacggtaggtagatgtgtatgcgtagctgtgcactatcacttcctcttcaacagaaccgattcactccgaatggcaatgtttgaagtgaaatcagcgaacggaaaaggttggttc

SEQ ID NO: 3185 - DNA, 1589 bp, Zea mays
  Clone ID: TF_ZmC13658_1
cccacgcgtccgcccacgcgtccgcccacgcgtccgcccacgcgtccgcccacgcgtccgcccacgcgtccgcccacgcgtccgcggacgcgtgggatcgtcttcctcccctcacatcctctggcctctggtcctccaccgtcctgctagccagagctgctcttgtacgcgcagctggcctctgtgcatatcaccagcacaccgcgcaggggaaggaaattaacaagagaaaaggcaaggagagcaggcaggcaaggaagctgcagaagccaaggaaggagaaggaggatcatcaatgagcatctcggtgaacgggcagtcgtgcgtgccgccggggttccgcttccaccccacggaggaggagctgctcaactactacctccgcaagaaggtggcctcccaggagatcgacctcgacgtcatccgcgacgtcgacctcaacaagctcgagccatgggacatccaagagaaatgcaagatcgggtcgggtccccagaacgactggtacttcttcagccacaaggacaagaagtacccgacggggacgcgcaccaaccgcgccacggccgccgggttctggaaggccaccggccgcgacaaggccatctacaacgccgtcaagcgcatcggcatgcgcaagacgctcgtcttctacaagggccgcgcgccgcacggccagaagtccgactggatcatgcacgagtaccgcctcgacgaccccgctgctgctgctgctgctggatccggtgatgccgtggccaacgacgacgcagccgccacggctgctgctgctgccgccgcgtcgtcggacggcgggcaggaggacggctgggtggtgtgcagggtgttcaagaagaagcaccaccacaaggagtcaggtgggggcgggggcaacaagcacggcagcagtaacagcgagcatgggcacggcggcgccggcaaggcatcggctgcggctgcggctgcggcgcaccagcaccagcaccatggaggcctgcagtactcctccagcgacgaggcgctggaccagatcctgcagtacatgggcaggtcgtgcaagcaggagcacgagctggtgtcgccggcgccggcgccgccgggacgggcggcggcgtccaggtacctccggcccatcgagaccgttctgggcgggcacgcgttcatgaagcttcccgcgctcgagagcccgtcccagcgccaagcccaccaccaggagcgcgcgagtacgccgccgccggctgggacgacgacgacgcgctggaccgcctcgccgcctacgaccacctcaacggcctctccaacgacgacgcgtccaagaacatggccgcgttcttcgacgtcgagcccagcgccgccgccgccgccgtggacggcgacctgtggagcctcgcacggtccgtgtcggcgctgcacgcggacttgaccatgaacaacgtctagctcccgagtcccgaccaacaacaacagggccccgaatccccgatacacatccatggcgtgtgcacgcatgcatgcatgcattgcatgccgcgcgcaccactaaccactcgaccagcatgcatgcatacgtgcgcaccccaccggcgccc

SEQ ID NO: 3186 - DNA, 2141 bp, Zea mays
  unsure (1)..(2141): unsure at all n locations
  Clone ID: TF_ZmC27_10
ccgggaagctctcctcccctcttcctaccattagcagcagcactgcagcagtagccacagccagcaccagcagacagcagggaggaacacgatgagcggcgccggtccggatctgcagctgccaccggggttccggttccacccgacggacgaggagctggtgatgcactacctctgccgccgctgcgccggcctgcccatcgccgtccccatcatcgccgagatcgacctctacaagttcgacccatggcagctccccaggatggcgctgtacggcgagaaggagtggtacttcttctccccgcgggaccgcaagtacccgaacgggtccaggcccaaccgcgccgccggggctgggtactggaaggccaccggcgctgacaagcccgtgggcacgcccaagccgctggccatcaagaaggcgctcgtcttctacgccggcaaggcgcccaagggcgagaagaccaactggatcatgcacgagtaccgcctcgccgacgtcgaccgctcggcgcgcaagaagaacagcctcagggtaagaacaagcgcgctccgccgccgtccgtccgtccgtccgttggcgtcgtcaccgtccaaatcaaacaaaaagaactcggcgataatgtgtcgctttcgtaatgaacgcggggataagcgtggcccatggttttgggccgctgaattttttttacgtgggccatgctaggtggggtgcgtggggggctgcaccgtgcccaatgattcgaccgcgtcgcagtcctcggcgcgcaagtattcgatgcccatgggtcatggtgtacagatcattttcgcccgtcgcgcccctgcgactgcgacggcgacggagagccagtggggtctgggattagacatcgaaatgacgctttgtgattcttaagctcatccatttcttgtcagctgcacggatgacaaactaagttctctattgtgttgacgggtgcagttggatgactgggtcctgtgccgcatctacaacaagaagggcggcgggctggagaaggcgccggcggccggcggcgaccacaagcctgtgttcgccacggcggcggtgagctccccgccggagcagaagccgttcgtggcggcggcgggcgggctgcccccggcgttcccggagctggcggcgtactacgaccggccgtcggactcgatgccgcggctgcacgcggactactccagctgctcggagcaggtgctgtccccggagcagctggcgtgcgaccgggaggtgcagagccagcccaagatcagcgagtgggagcggaccttcgcctccgaccccgtgaaccccgcgggctccatgctcgaccccgtcgtcggccacgccggcggcgacccgctgctgcaggacatcctcatgtactggggcaagccgttctagacgacgccgcccatcatgtcctgagggcgaggggaggtgggggtggcgaagcatgcatgcaaacacccatcctcggctgcggttggttggttggttgatctgtcttgggcagcgcaatgcaatgcaaccgcgcggtgtgggctttgactcaggcgagccgccattgttgacttgcaaggaggatataatatgaaaatatagctggattacatggagaggcggcaatgagacccnctcccccccnccggaagggagacggagacggatggtgcagtgcatcgggtgtggtggntcgngcgcggcatgtgtgtgtggctgtacatatacatactgtacatgattggttcagtgcagggtttctgttccttcattgattagttattatactaataagtactagtaattttgtaagggcttgtagttgcagtctccgtactggtggtaggtagtgcaggccatattcgtcatcgccaagcttcgagtgtacttactcctacaatatatattttacagtatatattgtagctgtgttggctcttcggaagaaaaaaaatggaaggggaaaataacataatccctattttccccaaaaacactgggcttgatttggacgttaatgtgtgcattgtaactggtgtgccctatctgctgacagtgttgcacatcacatgtttggtgttaataaggacagactatgtatcatctgccagattgttgtacatatacattgtggtgatat

SEQ ID NO: 3187 - DNA, 1554 bp, Zea mays
  Clone ID: TF_ZmC27_18
ccggccgggaagctctcctcccctcttcctaccattagcagcagcactgcagcagtagccacagccagcaccagcagacagcagggaggaacacgatgagcggcgccggtccggatctgcagctgccaccggggttccggttccacccgacggacgaggagctggtgatgcactacctctgccgccgctgcgccggcctgcccatcgccgtccccatcatcgccgagatcgacctctacaagttcgacccatggcagctccccaggatggcgctgtacggcgagaaggagtggtacttcttctccccgcgggaccgcaagtacccgaacgggtccaggcccaaccgcgccgccggggctgggtactggaaggccaccggcgctgacaagcccgtgggcacgcccaagccgctggccatcaagaaggcgctcgtcttctacgccggcaaggcgcccaagggcgagaagaccaactggatcatgcacgagtaccgcctcgccgacgtcgaccgctcggcgcgcaagaagaacagcctcaggttggatgactgggtcctgtgccgcatctacaacaagaagggcggcgggctggagaaggcgccggcggctggcggcgaccacaagcctgtgttcgccacggcggcggtgagctccccgccggagcagaagccgttcgtggcggcggcgggcgggctgcccccggcgttcccggagctggcggcgtactacgaccggccgtcggactcgatgccgcggctgcacgcggactactccagctgctcggagcaggtgctgtccccggagcagctggcgtgcgaccgggaggtgcagagccagcccaagatcagcgagtgggagcggaccttcgcctccgaccccgtgaaccccgcgggctccatgctcgaccccgtcgtcggccacgccggcggcgacccgctgctgcaggacatcctcatgtactggggcaagccgttctagacgacgccgcccatcatgtcctgagggcgaggggaggtgggggtggcgaagcatgcatgcaaacacccatcctcggctgcggttggttggttgattgatctgtcttgggcagcgcaatgcaatgcaaccgcacggtgtgggctttgactcaggcgagccgccattgttgacttgcaaggaggatataatatgaaactatagctggattacatggagaggcggcaatgagaccgtctggccccgccggaagggagacggagacggagacggagacggatggcgcagtgcatcgggtgtggtggatcgtgcgcggcatgtgtgtgtgtggctgtacatatacatactgtacatgattggttcagtgcagggtttctgttccttcattgattagttattatactaataagtactagtaattttgtaagggcttgtagttgcagtctccgtactggtggtaggtagtgcaggccatattcgtcaccgccaagcttcgagtgtacttactcctacaatatatattttacagtatatattgtagctgttggctcttcggaaaaaaatggaagttattttgatt

SEQ ID NO: 3188 - DNA, 828 bp, Zea mays
  Clone ID: TF_ZmC27_2
ccctcgaggtcggccggtattccaaagctctcgagacttcctcagcaatctatcagctttccagcgatcggcaggtcctcgatcgtttcgaagctccaatccgcccggccgcctgttgccactagctaggtgatcgatcgaatggactgcggtggcgcgctgcagctcccgcctgggttccgcttccaccccaccgacgacgagctggtgatgtactacctcctccgcaagtgcggcggcctgccgctcgccgcgccggtcatcgccgaggtggatctctacaagttcgacccatggcagctcccagagaaggcgttcggtggggagaaggagtggtacttcttctcgccgcgcgaccgcaagtacccgaatggctccaggcctaaccgggcggccgggacagggtactggaaggccaccggcgccgacaagccggtagggtcgccgcgccccgtggccatcaagaaggcgctcgtcttctacgccgggaagccgcccaagggcgtcaagaccaactggatcatgcacgagtaccgcctcgcggacgtcgaccgctcggccgccgcacgcaagaagaccaacaacgcgctcaggctggatgactgggtgctgtgccggatctacaataagaagggcgttatcgagcggtacgacacagtgaacgacgacgacggcgacggcgccgtggccgaagacgtcaagccggtgccggcgccggcggcgtcgaagaacccgcgtgccagtgcccgcgtaggggcagcagcggcggcgccgaatgaagtggagctccccgagtacggcggcggctactacgactacgacgacctg

SEQ ID NO: 3189 - DNA, 1544 bp, Zea mays
  Clone ID: TF_ZmC27_21
aagctctcctcccctcttcctaccattagcagcagcagtagccacagccagtaccagcagacagcagggaggaacacgatgagcggcgccggtccggatctgcagctgccaccggggttccggttccacccgacggacgaggagctggtgatgcactacctctgccgccgctgcgccggcctgcccatcgccgtccccatcatcgccgagatcgacctctacaagttcgacccatggcagctcccaaggatggcgctgtacggcgagaaggagtggtacttcttctccccgcgggaccgcaagtacccgaacgggtctaggcccaaccgcgccgctggggccggctactggaaggccaccggcgctgacaagcctgtgggcacgcccaagccgctggccatcaagaaggcgctcgtcttctacgccggcaaggcgcccaagggcgagaagaccaattggatcatgcacgagtaccgcctcgccgacgtcgaccgctcggcgcgcaagaagaacagcctcaggttggatgactgggtcctgtgccgcatctacaacaagaagggcggcgggctggagaaggcggcggcgccggcggccggcggcgaccacaagcctgtgttcgccacggcggcggtgagctccccgccggagcagaagccgttcgtggcggcggcgggcgggctgcccccggcgttcccggagctggcggcgtactacgaccggccgtcggactcgatgccgcggctgcacgcggactactccagctgctcggagcaggtgctgtccccggagcagctggcgtgcgaccgggaggtgcagagccagcccaagatcagcgagtgggagcggaccttcgcctccgaccccgtgaaccccgcgggctccatgctcgaccccgtcgtcggccacgccggcggcgacccgctgctgcaggacatcctcatgtactggggcaagccgttctagacgacaccgcccatcatgtcctgaggggaggtgggggtggcgaagcatcctcggctgcggttggttggttgattgatctgtcttgggcagcgcaatgcaatgcaaccgcacggtgtgggcttgagtcaggcgagccgccattgttgacttgcaaggaggatataatatgaaactatagctggattacatggagaggcggcaatgagaccgtctggccccgccgcggaagtgagacggagacggagacggatggcgcagtgcatcgggtgtggtggatcgtgcgcggcatgtgtgtgtgtggctgtacatatacatactgtacatgattggttcagtgcagggtttctgttccttcattgattagttattatactaataagtactagtaattttgtaagggcttgtagttgcagtctccgtactggtggtaggtagtgcaggccatattcgtcatcgccaagcttcgagtgtacttactcctacaatatatattttacagtatatattgtagctgtgttggctcttcggaagaaaaaaaatggaaggggaaaatagggattatgttattttgattattc

SEQ ID NO: 3190 - DNA, 687 bp, Zea mays
  Clone ID: TF_LIB4759-095-Q1-K1-D5
ccggccggggctactcaatactcatgcatgcgcactgcctcccggtgcggcgtatgaaccagacatgaacagggagcacagcagcagcagctccaagctcatcaacgagaagctcgaggaacaccggatctccaccgcgaagcactgcccccactgcggcgagaaaatcgacagcaaaccagattgggtggggttgccggcaggcgtcaagttcgatccaactgaccaggagctgatcgagcacctcgaggcgaaagtgaaggacgaaggctcgagatctcaccctctcatcgacgagttcatacccacaatagatggggaggacggcatatgctacacccaccccgagaaacttccaggtgtgacgagggatggcctaagcaagcacttcttccaccggccgtccaaggcctacacgacgggcacgaggaagaggaggaagatacagacggagtgcgacgtccacaagggggagacgaggtggcacaagaccggcaagacgcggccggtgatggtgagcggccggcagaaggggtgcaagaagatactggtgctgtacaccaacttcggcaagcaccgcaagccggagaagacgaactgggtgatgcaccagtaccatctcggtgacctagaggaggagaaagagggggaagctggtgggtgtgcaagatcttctaccagacgcag

SEQ ID NO: 3191 - DNA, 1531 bp, Zea mays
  Clone ID: TF_ZmC21043_1
atcgaattctcatcttgtagaaaagaaagagtgagagtgagattggcaagggtatagggttcttggtcgatcaaatatctttcccctcttggattctcctcttcctgcttcgttctcgccagatcgatctcactacgtgcctgcgtagctagccactctgtatgcaccatcaccaccaggaccaggccatgggcgacgcgctgtgggacctgctcggggaggagatggcagcggcgggcggggagcacgggctgcccccggggtttcggttccaccccaccgacgaggagctggtcaccttctacctcgccgccaaggtgttcaacggcgcctgctgtggcatcgacatcgccgaggtggacctcaaccggtgcgagccgtgggagctccccgacgcggcgcgtatgggggagcgcgagtggtacttcttcagcctccgcgaccgcaagtaccccacgggcctccgtaccaaccgcgccaccggcgccggatactggaaggccaccgggaaggaccgcgaggtgctcaacgccgccaccggcgcgctcctcggcatgaagaagacgctcgtcttctacaagggccgggcgccgcgcggcgagaagaccaagtgggtcctgcacgagtatcgcctcgacggcgacttcgccgccgctcgccgcccctgcaaggaggaatgggtcatctgcaggatactgcacaaggcaggcgaccagtatagcaagctgatgatggtgaagagcccctactacctgcccatggcgatggacccttccagcttctgcttccaggaggacccaaccgggcatcccctcccgaaccctagtggctgcacccccttccaccacggccacccccaccatagcatgcagccgccgcctccattgccgccgagcaaccatgctggcaaggccgtcttcaccggagcagcagcagcctgctgcatgcaacaagagccggcagacggcagcaacagcgccgtgctgcccatgccgccgttccctcccttcaccaccatcgtcgccggcaagccggcggtcccggcgccgccgccccaggttgtcaacgccggtccacaggagccaccgccacctacctggctggaggcctacctgcagcacactggtgggatcctttatgagatgggtgtgggtccaactgcagcgcccaggggcgcgtgatccggaccgtcggttccttagggttacccccctacgtacgtactgaaacactgatgatccatcgatttacctggtctgtaatgtgcggtgaagcttagtatttccaagtgacatatttcgacaagcacttgtagttattaaaaaagagttatcttgtattcggtggcatcattagtcgtcgttgttatgaaatcatgtgtgcttataacatgcatgaatgcatgcatttggatcatcgatcagagctgtcctctcctgggacgtgctacgtactgtgctcatgcatccatccacatgcaagtggtgcctgctaaaatgtacatccaatgtctatttgtttagcatgcatg

SEQ ID NO: 3192 - DNA, 1495 bp, Zea mays
  Clone ID: TF_ZmC328_1
cccgccccccatcgcctcgcgccccatccgcgcccccgggcgccgctgttgcccacgcgtccgcaggcctgccagccagccgcctttcgaaaccgagcaccagggagcagacgcggtctctggaacccaggttccagcgagcaaaccatctaaccaggcgctgagaattctgtgcggaggaggcggatggcaatggtggcggcggcggaggggagcgggcgcagggacgccgaggcggagctcaacctgccgccagggttccggttccacccaacggatgaggagctcgtggtgtactatctctgcaggaaggtagcgcggcagcaggtgcccgtgcccatcatcgcggaagtggatctttacaagttcgatccgtgggatctgcccgagaaggcgttgtttggtcgcaaggagtggtacttctttacgccgcgggaccgcaagtacccaaacggctcgcgccccaaccgcactgccggaaaggggtactggaaggcgactggggccgacaagtcgatcgtgcccatgggcagcaccagggcggcggggatcaagaaggcgctggtgttctactctggcaaggcgcccaggggcgtcaagacggactggattatgcatgagtaccgcgtcgctcaagcggaccacaccctggggaagaagggctcacataagctggacgagtgggtgttgtgccggctgtataacaagagaaacaattgggacaaggtgaaggtcgaggagcaggagttggaggcggcgccgcgccgacagcatcacttgcagagcgcggaggattccatgtctaacagtttccagacgcacgactcggacatcgacaacgtcttcgagctacaaaattgctacggtaacaacatggtgcaagggcaggccatgacccccaggaacgacattggcgtcgtgacggtgaaggaggacaacgactggttcaccgacatgaatctggatgatttgcaggcatcctacaacatggcccatacggtgaatccgaacccggcccaaaccgcgaacctggtggcagggcaaggccatggctacttgcaaggctatggctacttgcagtacatgaactcaccgtcgatgaagatgtggcagacaatcttgcctccgttctgagtgtccacgatgaagatgagtgtccacgatgaagagatgctcttgtacataaggggacataggagtgactagactggaatagaaacaacagggtatgattctgtatctataggcttgtaacgtttattcattcgttagataatacgtatgtggttggtaataccaaaaaaatgcatctccctttgcactacttgaagaaagcacaaagttgtagttctcgtatctcatatggtcggtctaaatcgattctgatcttcatgtgatgtgatatatattatatgttcgcacatttatttaaagatgatgaaatggtaggggtaacattcagtggacggatataaataaaaccatgtgattctac

SEQ ID NO: 3193 - DNA, 748 bp, Zea mays
  Clone ID: TF_LIB4759-059-R1-K1-C5
ccggccgggaatttctcttctatgatcaggggtaggagaaggaggaggaggagtagaagcagctccacacctgtacgtagctgccgcgcgccggtgagcgaggtcgttcttgagagctgtatatatatatatatagctccgcgacgacgccgatgatggccatcaagtcgctgagcatggtggaggccagcctgcctccggggttcaggttccacccgcgcgacgacgagctcgtgctggactacctggccaagaagctcggcggcggcggaggccctgtggtggtgagcatctacggctgccccaccatggtcgacgtcgatctcaacaagtgcgagccctgggaccttcccgacatcgcgtgcattggtggaaaagagtggtatttctacagccttagagatagaaagtatgccactggccagcgtacaaacagagcaactgattcgggatactggaaggccacagggaaagaccgtccaataagccggaaagggttacttgttggtatgcgcaaaacccttgtgttttatcaaggtagagccccaaagggaaagaagaccgagtgggttatgcatgagtttcgcatggaagggcgagatgatcccatgaaattacctttcaaggtaataattaattacgacgacttgatttcatcattgtgcatccttcttttttcagttgtttgtgttgattcattttattcacagttttccaataatatatgatagatacaatcataaatcat

SEQ ID NO: 3194 - DNA, 2582 bp, Zea mays
  Clone ID: TF_ZmC16461_1
ggaaatgcgaaaggcagccgaggccgcgagccgacgcacgcggctcgttgcttcctccatcccctttcctcacgccgacgccaaagtataccaacgaattcctcctcgggctcccacctaatcgtgttcgccgcctgcctctcccaaaccctagcaacccacgatcgaacccaaatccgctcctcccacccgaggaattatgcgaaattccccgagatcctagcccagcactagcagatcgatccatcgcttgcccacctgccggccaccaacccttgtagtctcagtcaatctgtagattgagactacgatgagcctgtcaccgctcgactcctcctccccgccggccgcggctgcggctgctgctacggaggtgcccctcgccccgggcttccgcttccaccccaccgacgaggagctcgtctcctactacctccgccgccgcgtcctcggccgccgcctccgcgtcgacgccatcgccgagatcgacctctaccgcctcgagccctgggacctcccctccctctcccgcatccgcagccgcgacgcccagtggtacttcttcgcccgtctcgaccgcaaggtcgccggcgctggcgccgggggccggggcggtcccggcaacaggaccaaccgcgctacgccgagggggtactggaagaccacgggcaaggaccgcgaggtgcaccaccgcggcaagcccgtcgggatgaagaagacgctcgtcttccacgccgggagggcgcctaagggcgagaggaccaactgggtcatgcacgagtaccgcctcctcgatgcagacggacctcaggatctgcatgtggtttgtagaatcttccagaagcatgggtctggaccacagaacggtgcgcagtatggtgcaccatacatggaagaggaatgggaagaggatgatgatgctattgagaatggttctacccacgatgcatctggtcaaattgctgcaaccacctgtgctgtagatgaggagtcaaatgaggacgatgagaatgcatattgtgaaacaaacagacctgctcgagtagaaccatctcatctgccttcggtccatgaaatgctcaatccaccagagatggctcctctccaaggtcaagattctaaagagacaagcgatggaagttgttctgatgttgctatttctctggaagagattttgcaggaacctttgtcaaatattagtgtggagaatatgcatagacttgaagggcagaatgccactgatgataacatcagtgttgataacttgttatcagcatatcccacgaaagataatggctacgtaggccagtataacactatgaatgggagtgctccagcagatgaagctcacgcacgctggcctttgagaacatatagtaatcagaattatgtcaatggccctcttgctgatgagttctttgacacagggaatgataccaatggggttgcatattccaggcagcagcaagctgatggcttcccagcacctcgccaagttgatgaaagtatggtattttatgatgccccatctgattacaacttggtggatggaaaagatgacttcgtatatctgaacgacattctgaatgagccacttggaaatgaatcgctctttgatggagatgatatgatggcttactttgatgccacagagaatgatttcaagtatgacattttgggctctggtcagggtttggattatccacttgcagacatgccgttgaactttgcccaaaagagtgacaaggaagacaagtttacattcgaagggatctctgaggttccggaagcaaatcctcagtacggtgcatcctcatctggttcacatgaagatctgtatactgatactgaatttctaggtgtgccaacagatgacactgctgataaaacttacggaaatcgcctggccagcatgttaggctctatcccagctccacctgcaatggcctcagaattcccgccgtcaacagggaaatctgctgggatgctttcggctgtcagctcgagctcaattcgttttactgctggtatcatccaacttgatggcctcactttcagcagcggctccggtcagtggcccttgcagaagaatggagacttgagtttgcttgtctcttttgctgtggagggcgacgtggcatccaagctccctgttggtcttgggcgtgctactcggattagcaccgttcccatggtgctgcgcagtggtttttaccttttctttatgtcggccatgattctcttgtttagctacaaagtagggtcgtgtatctacagcaggtaagttgaagttgatggcgcctcttgtccggccagacctgtgggctgtttattttagttcaacacgtggatcattccctcagtgatgggggtatagcagtcgttcgacaccttttttacacatttaccattttgacctgtcaaaacatacagcaataaactttcgaactggtggtggtgatcaaaaaaaaaaaaaaaaaaagccactaaaagcagtgcactgtgaatttggtgctctgctcttattattgtaaccaaaattaactgcaatatgttatattctgtcctgtagaggaaaagct

SEQ ID NO: 3195 - DNA, 793 bp, Zea mays
  Clone ID: TF_LIB4729-016-R1-K1-B12
atccaatagcagaggacctacgttcaccctttggtccgcgtccgtgcgcgcgccctctctcactcctggcgcaactggccgacgaccgccgccgccgtactcctggttctctggtgcccaggtctagcaacgtcagtcccttcgccaggtcttcgttggggccttcactggcgacgagcacccaccagttattgggtgtacatctgtatgctcatgtcctttgctgggtccgctcctgatcctaccatattgatgtattctgagagttggccaggtctaccaaggggtgtagaatttaatcccagtgatagtgatcttctgtggcatctagcagcagaagttgggaacgctctagctgagcgccatccatttatcaacgagttcattaaatttgttgatgatgttagagaatttatttgcactcatcctcaacatataccaggtgttaggcaagatggtcgtgcatcatacttcttccatagaagttttgagccctacatcaatgagaatgatgtaaataactgctggaagaaaattggaagccctagatccatcatcctggatggaacactgacgggttgcaaggaagtgtttgccctgtatgcagacatgccgagtgataaaagatctcaggaaactgattggagattacatcagtatcatttacaaaacacagtgaaggcagagtcagagatagtggcgtcaaaaatattccttgcatcacggaacagtctgtgtgaattggccgaggaaactcatattgaatccgaatgggatgtttccacacataaag

SEQ ID NO: 3196 - DNA, 1205 bp, Zea mays
  unsure (1)..(1205): unsure at all n locations
  Clone ID: TF_ZmC79048_1
ctcgaggccggccgggccgggaacgactctcggcaacggatatctcggctctcgcatcgatgaagaacgtagcaaaatgcgatacctggtgtgaattgcagaatcccgcgaaccatcgagtttttgaacgcaagttgcgcccgaagccttctggcggagggcacgtctgcctgggcgtcacgcactcctggcgcaactggccgacgaccgccgccgccgtactcctggttctctggtgcccaggtctagcaacgtcagtcccttcgccaggtcttcgttggggccttcactggcgacgagcacccaccagttattgggtgtacatctgtatgctcatgtcctttgctgggtccgctcctgatcctaccatattgatgtattctgagagttggccaggtctaccaaggggtgtagaatttaatcccagtgatagtgatcttctgtggcatctagcagcagaagttgggaacgctctagctgagcgccatccatttatcaacgagttcattaaatttgttgatgatgttagagaatttatttgcactcatcctcaacatataccaggtgttaggcaagatggtcgtgcatcatacttcttccatagaagttttgagccctacatcaatgagaatgatgtaaataactgctggaagaaaattggaagccctagatccatcatcctggatggaacactgacgggttgcaaggaagtgtttgccctgtatgcagacatgccgagtgataaaagatctcaggaaactgattggagattacatcagtatcatttacaaaacacagtgaaggcagagtcagagatagtggcgtcaaaaatattccttgcatcacggaacagtctgtgtgaattggccgaggaaactcatattgaatccgaatgggatgtttccacacataaagattcaagcgtggaatgggccaaaggctttaatcctgaaatctgtactgaaaccgatgagcttgatcatatatctctgaaagagcgctacaggatccttctancagacaaaaggctggggcttactacagtatcaggtgggaaatctataatgcgtgtggaaactagcagagcatctcccaaaagaaatcatgagggaaaaataagcaaagaagatatattcagcatgtggcangaaatttcttctgcaccttctattgatagagagtaatcccatgggtgatgacagcaa

SEQ ID NO: 3197 - DNA, 783 bp, Zea mays
  Clone ID: TF_LIB4725-023-R2-K1-H9
cggtcccggcaacaggaccaaccgcgctacgcctatggggtactggaagaccacgggcaaggaccgcgaggtgcaccaccgcggcaagcccgtcgggatgaagaagacgctcgtcttccacgccgggagggcgcctaagggcgagaggaccaactgggtcatgcacgagtaccgcctcctcgatgcagacggacctcaggttgttttacccttccttccaaatcaatcaaccagcccagccatcctcagtcgatatcaattagagtgttcatctaatcaattagggtgtgtatctaaattatagtgtgtatgtatgtactacttatgatccgatccccaaacacaccacctcccatctctgcaggatgatatccgccccaattcagctacagtgcacgcgcttggctgactgcccagttagctatttgcatacaccaagcggcagtgtatatatattttttgtcggtttaaggacgatctgcaatacaatagatcgatcatcagccgcttaagaggagaagctccccttatggttttgtgttctcacaatttatggatctgcatgtggtttgtagaatcttccagaagcatgggtctggaccacagaacggtgcgcagtatggtgcaccatacatggaagaggaatgggaagaggatgatgatgctattgagaatggttctacccacgatgcatctggtcaaattgctgcaaccacctgtgctgtagatgaggagtcaaatgaggacgatgagaatgcatattgtgaaacaacagacctgctc

SEQ ID NO: 3198 - DNA, 832 bp, Zea mays
  Clone ID: TF_ZmC1120452_1
ccgtaccgcccccaagtgcttcagagaagccggccggccggcaaagaagttaatttagctgatcgagctctcgacctctcgtgccgtgtgtgcagtgtattcttcttcctcctcctgtcgtcgcctagagctagctctttatcaaattaaacactttttgtcaaatcagttcgttctggaatccgttatagttgcctgctgccgtcctcttcaagtagtgcaacaagaaacagggagctttctttatcttttctagcagttggatagggttagggttttccgttctggccttatagatcatcggtcccgattgatctgggtaagtgatcgagtagtagtagtatggaagcgtcagtaggagcagctggtggtggaggggggaagtctaagaaggaggaggagagcctgccgccgggcttcaggttccacccgacggacgaggagctcatcacgtactacctgcggcagaagatcgccgacgccagcttcacggcgagggccatcgccgaggtcgacctcaacaagtgcgagccatgggatctcccgggtaaggatcggaggaaaccaactgtatatatatgtacacgcacatgcatgcatacagcatactcagttcgtcagttattcacgatcaaatctcaattaataaactccaccaatgattcatcgccaatttttataacggggggcaagacctttgacttaaattatattacaagaggtaaaaagagaaattagaggaaccacaattcatcatcaaattaaaagctatggtttttttcttaacaataacatccgcgttttatccacttcaaaaaaaaaaaaaaaaaaa

SEQ ID NO: 3199 - DNA, 753 bp, Zea mays
  Clone ID: TF_ZmC7355_2
cattgggacctcgtcgcggccggccgggaaaaaaggagagcctccctcctcaccctggaaaacacacgcacgcagacctcccccaaccgctctcagtctctccctccctgtctctctgttcaatctctcggctcgccatggacgctccgagcaactgcacgcgtcctgcgcgcgccaagtgaccgaacaagctgagctctgctgctacagttgcttgcccctgtgccaaactggcaggaggtaggtagcttatagcatagcagctagagctaagctgtggtgcgtagcggcagctagagctagcttgtgcacgcgcaggtgcgtgctagctagctagcttgttagctgtgtactagctgtgtagcagcagcagcagcacagtagcagtagtcggtgataaaaggaatttctttggggacatgtcggcggagagagccccggtgctggtgaggcacggcggcggcggcgtggaggcgctccggcagctcccgccggggttccggttccgccccacggacgaggagctcgtggtgcagtacctccggcgcaaggccatcggcgtgccgctccccgccgccgtcatccccgtcttccgcgacctctacagccgcgacccctgggacgtcgtcgccgtctctgcccctgatacgaggagcgagggggagaaatacttcttcgcggtgcggccggcaagcggcggcaagagcagcggcgctggtactggtagcagggcggccgccgacaagtgagctc

SEQ ID NO: 3200 - DNA, 825 bp, Zea mays
  unsure (1)..(825): unsure at all n locations
  Clone ID: TF_LIB5117-019-A1-PF1-G7
ctcgatcccttcccttttcagcccccctcgctgcgtctgcgtctgcgtctgctggaagagacacagcaccacgccgcggccgccccacccacccgccagccagccagccctcacaaagacttgacctgttcctgcgaccgcctcggcctcttcgcctccaccgcctcttccgcgatccccttccgcccgccgtcttccgtccgcagccccagcaccggcttccccctgctggttaccgctctcctctccggtcgatcggtcgggggtacgtcccggcgccgtcgcggcttctgctctccgcaccacagatcatatactatggaaactctacgtgacatggctctgccaccaggatttggattccatcccaaggacactgaactcgtttctcactatctgaaaaagaaaatactcggtcaaatagggcaacggttgctgggtattggaagtctactggaaaagaccgggctattaaggtggataagcggaccataggaacaaagaaaactttagtttttcatgaaggtcggcctcccactggaaaacgtactgagtggattatgcatgaatactacatagatgagaacgaatgtcaagcctgccctgatatgaaggatgcctttgttctatgtaaagttactaaaagaattgactggacatcagagaatggtaacgaggtgggcaataataaccctcagccacaacaagcaaatgttgctgctattttagctgtcagtgttgaacaaccagatactgctgcatcatcaatttattgggtgatgaacttnccaagtgatgctgctaccgtagatatccctgctcaca

SEQ ID NO: 3201 - DNA, 577 bp, Zea mays
  unsure (1)..(577): unsure at all n locations
  Clone ID: TF_LIB3607-017-Q6-K6-E4
cagcactataaaacttggcttcctccttctcctttctcccctttctattgattccctccatctttcttgttcccacaagctagctagcagcagcagcagcagtaccgtagttcttggcatcatcatcatcaattattgaagatattatcgatcggccatggtggagcctagtgtgaaatcttcagagcatggtggaggaggaatcgacctgctgttcctgcctcctggcttcaggttccatcccaccgacgaggaggtcatcaccagctacctcctgcagaagctcctcaaccctagcttcgcgccgcacgccatcggggaggtggacctcaacaagtgcgaaccatgggatctcccaagcatggcgaagatgggggaggaggattccaaggagtggtacttcttctgccgcaagggcntgaaataccccgcgggcacgcgggcgaaccgcgccaccaaggagggattctggaaggcctcgggcagtgtcagggtgatcttcttcaagccagctgctgggcacgactctcttcgccgccgtgtgccgctggtggtgttgtagtagacgctggtgttc

SEQ ID NO: 3202 - DNA, 1066 bp, Zea mays
  unsure (1)..(1066): unsure at all n locations
  Clone ID: TF_ZmC12224_6
aaaccatccggctacagcaagcaaccgtagcagtcgtagatgtgcagcgcgcgcagccaattccttcttactcccccgggccttccctctgtctctctcctcttctcttcagatcgacgtgctggttgcagagtgcaaactgcgtatataatatacagttcgttgttcttccagctccgcacataaagatagatagatatacagggaaaaagtgtagtagctggagcagaagctagctagcatggggctgcgggacatcgagctcacgctgccgccggggttccggttctaccccagcgacgaggagctggtgtgccactacctgcacggcaaggtggccaacgagcagctcgcaggcgccggcgcagccatgggtggaggtggatctgcacgcccacgagccgtgggagctccctgacgtggcgaagctgagcaccaacgactggtacttcttcagcttccgcgaccgcaagtacgcgacggggcagcgcacgaaccgcgccaccaggacgggctactggaaggccaccggcaaggaccgcgccatgcgcgacccggccgcccgcgccgtcgtcgtcggcatgcggaagacgctcgtcttctaccagggccgtgcccccagcggcgtcaagtcatgctgggtcatgcacgagttccgcctcgactcgccgcgtacgacgacgacgccaccgaaggaggactgggtgctgtgcagggtgttccagaagcggaaagtcgacggcagcgagcaagacaacggcgtcttcccctcgccgccggtctttgccggcacatcgcagtcgcagggggtcgtcctgccgccggaccagcccagcgtggtggacgcgtacgtcgtagtagaccagccgggctcttcttccgtcggactcgcgccgccgcaggagaacctcggtagcggcctggacgcgttgctgacgaacggagcgatgtggcagtacacctcgtcggtcttcggtcacttgttgccgcaggaggcgaccagctccccgccggtgatggacctaggctccagnggaggaggaagaggaaggagactacgggtgca

SEQ ID NO: 3203 - DNA, 1684 bp, Zea mays
  Clone ID: TF_ZmC99_1
gcgtccgtgaaagcgctcccctcgattgggcggcacgtaacccatcaccaccaccaccaacccggacccgtcaagcgctgcgtcgtcccgtgcaaagaccgcgcattccgtgcgtgccgtgtccacgcgcgcgcgcgcggtggcgttaagttgtcgagcgccagaggagcgccactagtcgtcgatcgatttgacccaggcgaggaggcgtaggcgcgtaggggagtgagtctagctagctactggtgttgggtccattattcgctagcttccgacgatggaggtgaagaaggaggccacgaaggcgacgctgccgccggggttcaggttccggccgacggacgaggagctgatcgtgcactacctgcggcggcgcgcgctggcctcgccgctgccggccgccgtcgacatcccggacgtccgcatcctggcgcacgacccgtccgacctgctgcccccaggggggctggcagggttcggcgagcaggagcgctacttcttcacgtgcaaggaggccaagtacgtgaagggccggcgcgcgaaccgcgccacgggggccgggtactggaaggcgacgggcaaggagaagccggtggccgtggcggtccggggcgtgcaggggcagagccagagccagagccaggccgtgctggtgggcatgaagcgctcgctggtgttctaccgcggcaagccgccgacgggaagcaagacggagtgggtgatgcacgagtaccggctggcgggcgccgggctcgcgccgtgccgccgccgccacgccgacgccgacggagacggcgtggcgcgggcgccggccgagggctgggtgctgtgccgcgtgttccggaagaagggctccgccgccgtcgcgaggcggcccggcgaccgcagcgacggcgagggcgacgagagcgcgtgcggcggcggaggaggcggcgggcgcgggttcatcgacttcttcgcgcgcgcggacgccgccgggcgaaggcgccgcgctccgtcgcccgccgtgtcgagccggtggcttgcggacgcgtcgccccagccggagcaggaggccaccagcagaggcccgtgacgagacaagggccggccggctggctggcgtgaagcgatcaagcaaggtaagagagagagagagagggaagcttttgctgcattggcagtacccaatgagggagggtccagtacagtaggtgcaggtaggagcaaagtgaattcgttttagcaacgcgagagagagagaggcccgatagtcagtcagtcagtcaaccagtgcagtatcagttgttgagcgtagatggtgaaactaatgtagcagctcagttgtactcctcccgaccacctgatgaatcctacacaattgtagagtggctgcagcaaaatcacggccatggcaccggagctcctccaaggaacgcaagtccaccagctgctgctgctgctggccatggcggtcgcgcggattgctagtgctaatgttccacaggctgttgattgctgagaagcaagtagcggtggtggtggcgggcagcagacggaagatggcgggtgtctgatactggtggtggtggtagtagtcgtgcgtaatctgttgcctggacttggacttggtttctttaatgcaattatgatgatgaagtgaatgcattctgcgtgctggtgttggaacgccgggcaagaaaaa

SEQ ID NO: 3204 - DNA, 582 bp, Zea mays
  unsure (1)..(582): unsure at all n locations
  Clone ID: TF_ZmC519245_1
nacccaatcttcccccccaagctcgagccgccgccgccgccgatcagtcgaaccagccccctcactaaccaatctcccgagcgcccgctgccccccgacctcaagcccccgttcgtgaatggaccacggcttcgacggcgcgctccagctgcccccggggttcaggttccaccccacggacgaggagctggtgatgtactacctgtgccgcaagtgcggcggcctgcccatcgccgcgccggtgatcgccgaggtcgacctgtacaagttcgagccgtggcggttgccggagaaggcggcgggaggagggccggacgccaaggagtggtacttcttctcgccgcgcgaccgcaagtaccccaacgggtcgcggccgaaccgcgccgccgggactgggtactggaaggccacgggtgccgacaagcccgtggggtcgccccgccccgtggccatcaagaaggccctcgtcttctacgccggcaagccccccaagggcgtcaagaccaactggatcatgcacgagtaccgcctcgccgacgtcgaccgctccgccgccgcccgcaagaagtccaacaacgcgct

SEQ ID NO: 3205 - DNA, 601 bp, Zea mays
  unsure (1)..(601): unsure at all n locations
  Clone ID: TF_LIB4727-007-R1-K1-G5
catcgagatactagggacttcgacatctacaagcacgacccgtgggaccttccaagtcgagctcgatctcgggggagaaggagtggtacttcttctgcctgcgggggaggaagtacaggaacagcatcaggcccaacagggtgacaggcaccggctccggcttctggaaggccaccggcatcgaccggcccgtccactcatccggccgcgccggcggcggccccgtcgtcgtcgtcgggctcaagaagtcgctcgtgttctaccgcggcagcgccggcaagggcaccaagacggagtggatgatgcacgagttccgcctcccgccgcgcgctgacgacaccgcccacgccacgcccgccagcgagcgagaggcagaggtgtggaccgtctgccgggtcttcaggaggaacttcacctacaagaaacacccncagcagcagcagcagcagcagcagatggctgcaggcggcagcgaggtgtccgccggcgccggcgcggccaccgtcgcgcagcccggcgagtcgagctccgtcaccggcggcgtcgaatcggacaccggngacgagtacactaatacgatcccgtgaataatacgatcgac

SEQ ID NO: 3206 - DNA, 1665 bp, Zea mays
  Clone ID: TF_ZmC38242_1
ggcatggaaaaagaagactcaaatattaatccctgaaaaatccgaaaattagcagagcaatacgtcagtaccaattccaaacaagcaactggtctgccaactaaaatgagcatattcattacaaaatgtacaagctgatgcaaccaagaaaggccaatctcacactgaacaacactccacagttggtacagcatgattcctcagcctttcatatttcatataaatcatttcatgtgcaccagagctactcaaagcaaaagcgagaccactgttgttgcatacttcactgccgtcccacaaaaaacagatcagttgtttcttcatgtaccaaaatggtgccgagagtgcactagggcagcgtcagtcgtcagtaatcttttcagctgcccatgtcataaagctatcctgtgaaaattcaatttggctgagtcgaaactcatcagtgttgtcaagctcaaggtttgtgttatctgtgggctccaaccgctggcactcctctaaatccttcttgaagtcctctgctgacagatgggcataagcagccaggcagggtttggtctctctaggttcatctccacctccacaagaggtctgagactgactcaggaggaactcgtcacagagagcgagtccttctgccagctgctgagagtctaacaattcaaactgggaatcgccttcccacaacttctgatcttgtgattggagattatctccgtcctttgttgtttttacagagggtgggaggacaacagtctcttcaatgcttatttcacagtttctattaagctggtaaagattatgctcaggattatgaacaacttcttggactgtaccaacatgtttgtcagtgggcaatgtagtaaaatctgggagatttgattcagcagccattgattccagatcatcggatgtagttagctcttgagcattcttgtccccaggtttaaactgttgctgaaaaaatagtttggagacaacatattcaccatctctctcatcctctccagtgcctaggtggtactggtggatcacccaattggtcttctcagcctttccacccttcaacgggcttatataaagcaccattattttcttacaaccaaggtgttttccatcaactagtactggctttgtcttgcctgtcttgtgccaacggacatcagcatcgtcagtgtttatccttcgacgcttcctagtcccagtgttgtaagccttaaatgttctgtggaagaaatgtgatacacttccattttgtttaacacctggaagtttctgtggatgagtgtaacagatgccttcatcttcctcaactgttggaatgaattcatcaatgaacggatgaggttttattccagattttccatgttttgccattaagcgccagattaattcctggtcagaaggatcaaattttacacctttaggcaaaccgggccactggtgaacaacctacagcaagaaaacagtcatgagctgatcacactttaacggaattgtcaggcctgcagctgaccacactttaatatctgaagacccagagatattttttacaaaagccccaaatctttggctgtcaattatccaagttgtccctgtcatggctgcggcagcgcttcctaccacggccgcagggtcctagggttccggcgagcacgcggcgac

SEQ ID NO: 3207 - DNA, 617 bp, Zea mays
  Clone ID: TF_ZmC545_12
aaaaacgggctcgggcccggcgtgggacaccgcgcgcgcaatacacgggacacacacgcagatccgagctaaccaccatcgacgagcgccagccgccagcagccgagccggagcgaccttttcttttttcttttacacagcgggacggagaaaggagtcaatcagccaaagccacccaccgcttttacccaccgatcggcgttgccgccgctagcattgtcggcttcagctccatccaaatccaccgccagcaagcaagcaagcaagccggcgccatgggtctgccgatgaggagggagagggacgcggaggcggagctgaacctgccgccggggttccggttccaccccaccgacgacgagctggtggagcactacctgtgccgcaaggcggcggggcagcgcctccccgtgcccatcatcgccgaggtggacctgtacaggttcgacccctgggacctgccggagcgcgcgctcttcggggcccgcgagtggtacttcttcacgcccagggaccgcaagtaccccaacggctcccgccccaaccgcgccgccggcaacgggtactggaaggccaccggcgccgacaagcccgtcgtgccgccgcgccgcgcggcc

SEQ ID NO: 3208 - DNA, 1444 bp, Zea mays
  Clone ID: TF_UC-ZMFLMO17204B05_FLI
ttgagtggaagactgcatgcttgttgctagctgcatcaagagcatccagacatatcgatcgagctcctactcctggcggtggcgggaaatataatattgtatactatacgtccacagccacagtttcttggtagaaagatcggcagatcatggtagtcaaggagttcggaagagaagtagtaatgagcatggacaaggtgaagaggggtggagaagcgctcacggccgccggagccggagatgaagagaaagatgacgcggtgctccctgggttccggttccacccgaccgacgaggagctcgtcacgttctacctccgccggaaggtggccaggaagccgctcagcatggagatcatcaaggagatggacatctacaagcatgatccatgggacctccctaaggcgagcacggctgctggtggcgaaaaggagtggtacttcttctgcctgagaggaaggaagtaccggaacagcatcaggcccaacagggtcaccggctccggcttctggaaggccaccggcatcgaccggcatatctaccctgccaccgcgaaccccgtcgagtccgtgtccgtcgggctcaagaagtccctcgtgtactaccgcggcagcgccggcaagggcaccaagaccgactggatgatgcacgagttccgcctcccgccggccgccgccgcctcgccgacgccgacgagcatgcaagaagctgaggtgtggaccatctgcaggatcttcaagaggaacatcgcctacaagaggcagccgcagctgccggcgtggaggcagcagcagtccagctccaacacggggagcttcgagtccgacggcggcggcggcggggacgagtacatgaaccgctgcctgccggtgccggccacggccaccgctcatcagatcggcggcatgctgaacggaggaggcgtcgtcagtgccactcgcagcagcagcagcagtttcttcagggacagggagagcgtgcacggcggccagcagttccacttccacgagcagtggctgagccgcttccccgccgcgccagcagtcgagcagaagccgcagctcctggacccgtcggcgatggccatcgcgttccatcagaacgacgaccagagcgtcgccaccgctgccgctgcgagcgagtgctgcaaggacgggtactactgggacgagatcgcgaggttcatggaggtcaacgatccaacggtgcttcacgactgtagatacgcttgatcggtagcaagttcagacagatcgtagacagacacccaggttaggtaaccaaggaacgatgatgcaagcatgagagactggcaatgcaggagccaggaggggctgccccagtgaggctaggttttgcgcacccttctgcgtctattttctacctgatcgaatgtattgtatacaggacgttgttgtgaccaaaataaacacatagttcagcc

SEQ ID NO: 3209 - DNA, 1811 bp, Zea mays
  Clone ID: TF_ZmC1440_1
gccggccgggccgggatgtagtcatgtactgtaaggacgaccatgtatttgtaagcagcttccattcagccatgcatccaaacatattaatacagcggttaaccaagtccgtacatcagcttccattaggccccgtcgtcatgcatgttagcagcaatcaagccctagaaacctcgagctcgtcatagaaaccaagaaagaaccatccaagccatggaggatgatgaggagaagccatcacaaaggatcaccaacaagcatggaagactgcatgcttgttgctagctgcatcaagagcatccagacatatcgatcgagctcctactcctggcggtggcgggaaatataatattgtatactatacgtccacagccacagtttcttggtagaaagatcggcagatcatggtagtcaaggagttcggaagagaagtagtaatgagcatggacaaggtgaagaggggtggagaagcgctcatggccgccggagccggagccggagatgaagagaaagatgacgcggtgctccctgggttccggttccacccgaccgacgaggagctcgtcacgttctacctccgccggaaggtggccaggaagccgctcagcatggagatcatcaaggagatggacatctacaagcatgatccatgggacctccctaaggcgagcacggctgctggtggcgaaaaggagtggtacttcttctgcctgagaggaaggaagtaccggaacagcatcaggcccaacagggtcaccggctccggcttctggaaggccaccggcatcgaccggcatatctaccctgccaccgcgaaccccgtcgagtccgtgtccgtcgggctcaagaagtccctcgtgtactaccgcggcagcgccggcaagggcaccaagaccgactggatgatgcacgagttccgcctcccgccggccgccgcctcgccctcgccaacgccgacgagcatgcaagaagctgaggtgtggaccatctgcaggatcttcaagaggaacatcgcctacaagaggcagccgcagctgccggcgtggaggcagcagcagcagtccagctccaacacggggagcttcgagtccgacggcggcggcggcggggacgagtacatgaaccgctgcctgccggtgccggccacggccacggccaccgctcatcagatcggcggcatgctgaacggaggaggcgtcgtcagtgccactggcagcagcagcagcagtttcttcagggacagggagagcgtgcacggcggccagcaattccacttccacgagcagtggctgagccgcttccccgccgcgccagcagtcgagcagaagccgcagctcctggacccgtcggcgatggccatcgcgttccatcagaacgacgaccagagcgtcgccaccgctgccgctgccgctgcgagcgagtgctgcaaggacgggtactactgggacgagatcgcgaggttcatggaggtcaacgatccaacggtgcttcacgactgtagatacgcttgatcggtagcaagttcaggcagatcgtagacagacacccagacccaggttaggtgaccaagggatgatgcaagcatgagagactggcaattttgcgcacccttttgtgtctattttcctgatcgaatgtattgtatacaggacgttgttgtgcccaaaataaacacatagttcagccatgaagaatcgtgactttagcacctgctctggtctctgttccgaaaattataggcaagatttgagttggcctaaagtcaaacgatgttgatatttggtgtctgaatatcagttctctttttctat

SEQ ID NO: 3210 - DNA, 281 bp, Zea mays
  Clone ID: TF_ZmC176741_1
cgcactgatctatctaattaaccgccgctctagctagcacacaacctacaaaagcatctgctgcctgaaatatttgcttggcagagttgacatttacattcgatctctcggttactagtgtagtagtagtgttggatcggcagcatttatttgcttcccctgcccctgccggccatgggcaccatgaccctgccgcccggcttccgcttccaccccaccgacgacgagctggtgagctactacctcaagaggaaggtggacaacctcaagatcgagctcga

SEQ ID NO: 3211 - DNA, 1598 bp, Zea mays
  Clone ID: TF_ZmC13154_1
ttgacgcgtgggcggacgcgtgggttcacacgtaccgccggcggagaaggaaggaattggtcgccgccgcctgcctctctcctcctcctcctccgtcagtggctgtggccacgccgtgctaagctaagctaagctaagctaagcttgcgcaagtgacaagttctttggttggttggaggcagagccagatggcatcgtcgtcgcggctggatctcccgccggggttccgcttccaccccaccgacgaggaggtggtgtcgcactacctgacccacaaggcgctggacagccgcttctcctgcgtcgtcatcgccgacgccgacctcaacaagatcgagccgtgggatctcccaagcaggcaaggctaagatgggcgagaaggagtggttcttcttctgccacaaggaccgcaagtacccgacggggatgcgcaccaaccgcgccaccgccagcgggtactggaaggccacggggaaggacaaggagatcttccgcggcagtagcagtagtccccgccgcgtgctcgtcggcatgaagaagacgctcgtcttctacacgggccgcgcgccgcgcggaggcaagacgccgtgggtcatgcacgagtaccgcctcgagggcagcctgccgcccaacctccaccgcggggccaaggacgaatgggctgtgtgtaaggtgatcaacaaagacttggcgggcaaggctgggcaacaacaaatggcgccgccgccgcacgccgtgtccgtgggcatggagcgcagcgactcgctggccttcctcgacgacctggtgctcgacaacgccgacgacctgcccccgctcgtcgactcgacaacgtacgccgccggctccctcttcgccgcggcggggacgaccacgacgacgaacgacgacagcggcgggtaccaacaagccaccaaggcggagccgcagccgcagctgcccgcgccgagcaacagcccgtaccagcaccagcagcaggccatacggaggcactgcaaggcggaggcgccggcgccggcgatggtgctgagcccgtcgcgcgagacgccgggcgcggacatgttccagctccagcatgtggacgagctgctccagctggacggcggcttcatggaggactactacaacatgaacatgtggaaggtctagttaggctgggatcgaccggccggccggacactagtactatacgtaattagttccatttagtccctatttaatttgggtccatcggtttgccgggcggatggattgattagttggttgattggatatattaacctgttattagacgcagaagagtggaaggaaaggccggccgcgccgattggcatggacgaggtctgtctgacgaagatgtgtcgagacctcgccggcggtgtggtttgtgatgattggttagttggctaatcttcagtagctagctacgtactgagtaattagaacagctagcagtagtgtgtaaccgcgcgcgtgtcgttgcctctggtcgacaggattgaagcacgcattgtgtacataataataggtaggagtcgtcgtcgtcgtcgttgagtgatgagaaaaatggatgaaacatactatatatgctgttgatt

SEQ ID NO: 3212 - DNA, 2280 bp, Zea mays
  unsure (1)..(2280): unsure at all n locations
  Clone ID: TF_ZmC17732_1
cctcgaagccggccgggccnggaagagaaagagggcggcggcacggcagagccaaagccgaggcgagccgagcagtacatgcatcccgcttcccgcattcctcatcgaggtccggtccagcagccttttgcgccttcgtgtccctcccctccactccctcaccgggggctgggctggtggggagtggggactgggggcagtcgccacgccgcagtccattctttcgtcacccatcgcagctccaacacctctcgctagtcgtcatggcggcttccgcggcagcgttccccctcccaccgccgacgcctcctcttcgactttcacatgtcttttgatatcacagaaaaggattgcccctgccttcactgctgtgaatgccagggacgtttctgtcgccctacaatatatggacattggacttgatagttggcaaactttcttctatatactggacgttccagctttcgccaacctgctgctttaaccacatcttttccttctttcccgattttgcctctcactatcatcaattaccgctaaaagtgaaacaagtgttctccctatggccaagacatcacttcctcctggattccggtttcatccaactgatgtagaactcacagtctactatttaaagaggaaactactgggaaaacacttacgctgcaatgctatcactgagattgatctatacaagttcgccccttgggatcttccagagagagcttccttggagagtaacgatctagtgtggtatttcttttgcccgcgcgataggaaatattctagtgggttaaggactaatcgctcaactggagttggatattggaaagctaccgggaaggacaggccggtggtatataattctaggactgttgggatgaagagaactttagtgtttcatcttggcaagccaccacgaggtgatagaactgactgggtaatgtatgaatataggctggaggacgaggaaatagctgcttctggtgttaaactggatgcctgcgttctatgcaaaatctttcagaaaagtggcccagggcccaagattggcgcacagtatggtgccccattcaatgaagaagactggaacgatgccagtaatgtagagtgttctccatgtgtgccttctgtggccccttgcgcacctgaatcaagtcgtggtgggttgaattctgctggtcaacgcctggctgtgagttatgatgtcaaggtttccttgggctcctcggcagaaggtatcaacagacctgctgtcaatggagttcatcctgtcagaccttctcctgatgctcctaatgactgcatacacattcaattgctggctgaggttatgagatgttcctcaacctcaatgcatgttttacgtactgctggtgacgatggtttgctggctgattcaactgctgactacagtagtgataatagaatatctttggatgctattgaaactatattctgtgaagtggatgagcttgggccccaggctatggtgaacaatactaaccattgtgactcatgcggtgagtatttgattcaccctacgatggtggcacgaggagctgaacagtacttagagctaaatgacctgtccttttcgctcaccgatggtcctgattcctgtggcgtgcttttctctaatggtgtatctgttgagcaactaccggatcttgagctcaggtttgagcagttctctcctgaccacatctccaataccgctattgcttccacatcaacaacggttggttcatctgcttcagtgcccttattggaggatcacaggacctgattcagaattggagtcatctggcgcacatgttaattgaatctaggaggatctgcaggacaaaggcataatgctccctttttttcaattttcatgaagttagaatttttttttggatgaaggcacggattagtgaccacttggcacagaaatatgtttgtgttgcggcttgtgaatccaggaccatttctctgcctgtagttttgcatggtagaactagatgggcaacaacaaaatgtgttcagtattgaataacgcactcactgcattaactactttgcctagcttagtatagtattctggatcttgaggcagggtagaagtgggggtgtgggacaatgtactcacagcttgttgtcatttagcagcaatatcttgtttcggtaacctgtggcaatatcttgtttggttacctggatttgctagtgcccatgcaagatgatgttttcgttgacgccataataataaatagcaatcgattttaaaggaaaaaa

SEQ ID NO: 3213 - DNA, 2605 bp, Zea mays
  Clone ID: TF_ZmC12473_2
acgtctcctacactcctccgcctgccgtcctgtcctgcgcccttactcctcggacgccccccacgccaccaatccccaaccccccattccgcactcccctctccctgccccgccgcgcttccttcgctgctaaagcggctgcgatggcgctctgggcgctgccggtcggcttccgcttccaccccaccgacgaggagctcgtcagccactacctcaagggcaagatcaccggccagatcaactccgaggccgaggtcatccccgagatcgacatctgcaagtgcgagccgtgggacctcccaggtaagtctctgatccggtccgacgatcctgagtggttcttcttggcgcccaaggaccgcaagtaccccaacggtagcaggtcgaacagggccaccgtggccgggtactggaaggctactggcccggacaggaacatcaagtccaagggcgacaagagcaaacagtttaccatcggcaagaagaagacccttgtcttccaccgtggacgcgccccgaagggcgagcgcacagggtggattatgcacgagtaccgcaccaccgagcctcagttcgagtctggcaagcagggtggttatgttctttatcgcctcttctggaaaccagaggagaaaactgagcgctccagcccaaaggaaatggatagaagtggcaactcgcctactactattcgttcttcacgtgacaaccaagaggcgaatgaggaagctaatacaccattaaataaaaaatctctagaatctgctctgcatgatccgattgagctgcccaattctgctgaaacccctgctgggccaaggaaaatgtgcctggcggacagaaatgataatttggtggctactgcaccggttgtttcccatatacctttccagggacatgctgctggtgtagctaaggttgatccttcagctgctgcttcagcccacttcgttaatccccagaatggaaatgacgactgcaacaattttatgtctgatttcacccccattctaccgcatgaaaatgcattcttcactggtacacagcaaggagcttttggttttgatggaaatggcatcatgaatcatcctgatgccctggatgctttcttgaaccaaacacttgttgatactgatgaacattcatcgacaacatcaaaagttcagtatgattctgacattccaacagaatttgcgaaccattggaatatgcaggatgagcatcaagactggtgggaaaagttagattttgagccatatgaaccaactttgcttccttatgacaccactgacctagacgtactctcagtagactctggcgccgattccttcaatgacctcttcaatgtgactggcattactcttaggcctcaacggttggactccactgtgcaaccagactgtgtgttccctgatcagggcactgcactaaggaggctgaagctacaggttgttgagtgtggggagagcataactaaagatgagagtgaagatgaagtatcatgtgttgaaagtccaaactattttgatgaatctgtcgagttcgctgcagagaagggtgtggcttcttatggggatggggctgactcaactgggattgttattagaagccgttaccctgccccaagttcaagctcagagagttcattcactcaacagggaactgctatgcgaaggctacggttgcagttgggccttaacgaaggcacatgtcctagtagtggtgattcatcaagctgcatcgtagatgaatcagaaagtcagcagaaagcagagattgaagaggatgcaagcacgaacctagctggaagtgttgataatctacctggcaatagccatgatgatgagcaaaaggacatccctgaacatggagttaaatctgtcctgaggctgcggaaaacttctgcggaaagtctgaaggatgtgaagcaggaggattgtctggagccagacgggagagcaccgatgcagagggtaggcttccaatcatccatcatctggctggttctttcggtggctgtgctgctgcttctctattgtggcgtatggatgagtatgatatgtatcctggtgcggtgttttgcgcacatgggttcctggcatcaacctgatgtgtgaacttctgtcataacatgcgtttgacagcagtaagacatcccgacatatgccaatgcagctaaaaataaaaaaaagaggtagcaagtgaagagggagaaaaaagagatgtgttattgtaggtcttagtacatcctagtcttgccaatgcagctcaaaagaaaaaagaggtagcaagtgaggagggagaaaaaaaaagaggtgttattgtaggtgttactaatgttgtagctgttgtgcagttgtaaatcccccttcggcagctggttttatttcctgatgtaatgtaagcaagagcaaggtcctgtcagatgcgtgcgctgaaagtctgaacctccgataatatctgatgcttcttgtagatagctgtttcagaattttcggttaatgaacccagttactgcttgcttgttgatctattttctaaaaagctatctgatgggattgttgtggtgaattcgagttcattgggaatacatgacagaattgtg

SEQ ID NO: 3214 - DNA, 362 bp, Zea mays
  unsure (1)..(362): unsure at all n locations
  Clone ID: TF_LIB3354-108-Q6-K2-B3
gcgctccatttccctcacctcccgcagcagctagccgccgccagccaacatccgaaccaaccaaccaacccacagcgggcgattaaagcgtccagatggtagcgatcgccaccgtgcaacatcatcgccgcgactcggaggcggagctcaacctgcccccggccttccggttccacccgacggacgaggatcttttggcgcactacctctgcacgcgcgccgcggngcgccgcccgcctgtgtccatcatcgcctacgtcgacctgtaccgcttctacccgtgttacctgcccgagcgcgccctctttagtccccgcgagtattacttcttcatcccgcgagaccgcatgtaccccaacgtc

SEQ ID NO: 3215 - DNA, 2021 bp, Zea mays
  Clone ID: TF_ZmC603_1
gccggccgggaatcctcagtcggcctttgactgctccttgacttgaacttcgcgcagcaagacggagaaacaagaaccatccctccccctaccgctgctactcatgcacgcgcgcactgcctcctggtgccgccgcgtatgatccagacatgaatagggcgcacagcagcagctccaagctcatcaacgagaagctcgtggaacaccggatctccactgcgaagcactgcccccactgcggcgagaaaatcgacagcaaaccggattgggtggggctgccggcaggcgtcaagttcgatccaactgaccaggagctgatcgagcacctcgaggcgaaagtgaaggatgaaggctcgagatctcaccctctcatcgacgagttcatacccacaatagatggggaggacggcatatgttacacccaccccgagaaacttccaggtgtgacgagggatggcctaagcaagcacttcttccaccggccgtccaaggcctacacgacgggcacgaggaagaggaggaagatacagacggagtgcgacgtccacaagggggagacgaggtggcacaagaccggcaagacgcggccggtgatggtgaacggccgtcagaaggggtgcaagaagatattggtgctgtacaccaacttcggcaagcaccgcaagccggagaagacgaactgggtcatgcaccagtaccacctcggcgacctagaagaggagaaggagggggagctggtggtgtgcaagatcttctaccagacgcaacccaggcagtgcagctggtcctccgaccggggcgccgccgccactgccttggcagcaacggcggcggcagcggcggcgcaggagcagcataggagggatagtggcagtggcagctgctcgtctagggaccacgaggtgtcagccacatcgttcccagccggatacacagtcaccacggccgtcgagatgcagcagcatatgaagcagcctgcggaccatttcagcttcgcgcctttcaggaaaaccttcgaccaggaggttggtataggtggtgatcaggtgccatctaatcagcttggacgttcagagccgcatcatgccggcctggggcagcagccacacggcccggtgctcgcgacgaagacggctgtgcctgctacagctttcctgatcagtaggccatcgaaccctgtctcgactatagtgccacctgcaatgcagcacgcatcagttgttctcgatcatgatcagttccatgtgccagcaatccttctccatcaccatgacaaatttcagccacaacaaaagcttgaccgcagatctgccggcttggaagaactgataatgggctgcacgtcgtccacaagcacaaaaggagatgcttccattgctcacccccaagagacagaatggccttacacgtactggccacctgacaaccaagatcatcatgggtagtagcaacagggacctggtaaatagtggcgatgtgaatgctgaaggaacactaaccgcaaccactttcactggaatggtttttgtctgcttgaatatgcagcgttgctttcttggagaatgtacacctacaatagtggggaaagaacagagaaaaaaaacgtatctctgtagatctccctcaataaagaaatgaggataaaactagttaacagtgtgagctctccaagacagaagagacaaaatggccaacgaaaagagaagggggaaagaccgatgggaggaaaggtactgtgtgtgctgacattgaagggatcatgtgtggacagtttagatgtattagaacaccttaatcaagtataactataatcagtttacggtttatcacagttttttattcgtgctacctgttttccaattgtaaaaactagtggcattgtttgcatgtacattaacccttttaatttcttttagtttctaaattgatgctgattttcctttggttagttcatgctaatatgcatcacgaagaaataaagttagtaagaagcgcaaaaaaaaaaaaaaaaaaggccccta

SEQ ID NO: 3216 - DNA, 1376 bp, Zea mays
  Clone ID: TF_ZmC12224_1
tttaagagtgtgtcccttggcttgggtccagcagccttcagaggcaaaccgtcggccggcatgcagtagaggcaggctagctgcaagagagttcatcgatctagctagctagctagcgtgtgtttagggtacctagctagctagcttcaacatatatatcttagttgcacacacagctcaaaagaaaggaaccatcgatcgatcggcagggagggatggggctgagggagatcgagtccacattgccgccggggttcaggttctatcccagcgacgaggagctggtgtgccactacctctacaagaaggtggccaacgagcgcgccgcgcaggggacgctggtggaggtcgacctgcacgcgcgagagccatgggagcttccagacgcggccaagctgacggcgagcgagtggtacttcttcagcttccgggaccgcaagtacgccacggggtcgcgcaccaaccgcgccaccaagacggggtactggaaggccaccggcaaggaccgcgaggtgcgcagcccggccacccgcgccgtcgtcgccatgaggaagacgctcgtcttctaccagggacgcgcacccaacggcgtcaagtcctgctgggtcatgcacgagttccgcctcgactcgccgcatacgccaccaaaggaggactgggtgctctgcagggtgttccagaagcggaaagacagcgagcaagacaacggcggcggctcctcctcgccgacgacctttgccggcgcgtcgtcgcagggggtcgttctagatctgccggacgaccagcccagcatgacgatggccggcgcgtacgtagcagtggaccaccaccagccaggctcttccgccgtcgggttcgcactgccgccgcatgcgcaggacaacggcctcggcgatggcggcctggacgcgttgctgatgaacggagcgaccatgtggcagtacagctcatcggccctcgccgaccacttcccgccggaggaagtgaccgccgcgcccatgatggggctaggctccaggggaggaggtgacgggtgcagcttcttctacgacagcggcttcgacggcatggggttcccgcagggatggatgggctgaggaggcaaggcaccaactacaacgccatgggatgatggattgtgaaggaaacgattgaattgattccattagtggtagtattgtacagtaggtacgtagtgtgaggttaggtaattggaaattattagagtgcacctccccaatccaaaaaaaaaaacacaacggaatgaaaagtagatcgagcgcatgacgacaattgtatgtatctattcactcttactactatgcttgtacattaattaattagtataaacgaatccaagtacgtaccccccccaa

SEQ ID NO: 3217 - DNA, 1365 bp, Zea mays
  unsure (1)..(1365): unsure at all n locations
  Clone ID: TF_ZmC12224_4
acctcgaggccggccggngatgacttttaagagtgtcgacccttggcttgggtccagccttcagacttcagaggcaggctgcaagagagttcatcgatctagctagctagctagcgtgtgtttagggtacctagctagctagcttcaacatatatatcttagttgcacacacagctcaaaagaaaggaatcatcgatcgatcggcagggagggatggggctgagggagatcgagtccacattgccgccggggttcaggttctatcccagcgacgaggagctggtgtgccactacctctacaagaaggtggccaacgagcgcgccgcgcaggggacgctggtggaggtcgacctgcacgcgcgagagccatgggagcttccagacgcggccaagctgacggcgagcgagtggtacttcttcagcttccgggaccgcaagtacgccacggggtcgcgcaccaaccgcgccaccaagacggggtactggaaggccaccggcaaggaccgcgaggtgcgcagcccggccacccgcgccgtcgtcgccatgaggaagacgctcgtcttctaccagggacgcgcacccaacggcgtcaagtcctgctgggtcatgcacgagttccgcctcgactcgccgcatacgccaccaaaggaggactgggtgctctgcagggtgttccagaagcggaaagacagcgagcaagacaacggcggcggctcctcctcgccgccgacctttgccggcgcgtcgtcgcagggggtcgttctagatctgccggacgaccagcagcccagcatgacgatggccggcgcgtacgtagcagtggaccaccaccagccaggctcttccgccgtcgggttcgcactgccgccgcatgcgcaggacaacggcctcggcgatggcggcctggacgcgttgctgatgaacggagcgaccatgtggcagtacagctcatcggccctcgccgaccacttcccgccggaggaagtgaccgccgcgcccatgatggggctaggctccaggggaggaggtgacgggtgcagcttcttctacgacagcggcttcgacgacatggcgaacatggggttcccgcagggatggatgggctgaggaggcaaggcaccaactgcaacaacgccatgggatgatggattgtgaaggaaacgattgaattgattccattagtggtagtattgtacagtaggtacgtagtgtgaggttagtttattggaaattattagagtgcacctccccaatccaaaacaacggaatgaaaagtagagcgcatgacgacaattgtatgtatccattcactcctactactatgcttgtacattaattaattagtataaacgaatccaagtacgt

SEQ ID NO: 3218 - DNA, 883 bp, Zea mays
  unsure (1)..(883): unsure at all n locations
  Clone ID: TF_LIB4764-075-R1-K1-G10
ttgggtacctcgaggccggccgggacccttcgtcttcgtcgtccctatccctgcctgcccagcgactccaattaagtttgcaccgcgagcatgggaggaggagccaccaacctacctccgggcttccatttcttcccttcagacgaagacctcgtcgtccatttcctccgccgcaaagccgccaacctcccgtgccgccccgacatcgtcccgacgatcctcctgcaccgctacgacccgtgggagctcaacggcacggcgctgcaggctgggaaccagtggtacttcttcagtagccacgcccacgcccacgcccacgccgcggcggggcagaccagaacatctccgtccgggtactggaaccccgccggcgccgatgaaacagtagtactagcgagcagcggccgtgtcgttggcctcaagaagacgctcgtcttctgcaccggagagcctttcagagggttcagaacgaactgggtcatgcatgagtaccaccttcacgacgggcccgggtgcaatgtcggcgggagcagcggcgccaccaccccaagtagctccagcagctccgccagcagcaggagatcgcagaggaagagagttcactcgagcacggagtcaaacagctgggtgatatgtagagtgttcgaatcaagctgcggttcgcaagtgagcttccatgacgagggcacagagctttcgtgcttggatgaggtgttcttgtcgctagacgactacgacgaagtgagcttgccaaataattagaaccctagctagcgcgcaggccatttgattagtaccctgtgatggtgacgtcgccgtctgcgtaagcttaagtggttgcaagntgcattgtgcatgatgcanatggcctgatgataggcat

SEQ ID NO: 3219 - DNA, 539 bp, Zea mays
  Clone ID: TF_700048290_FLI
cttgccttctatccctttcacacacgcctctccttccctctctctctctctatcttcctgcctgaggcagcagccatttccgcttccgatcgtggaggcttggtgtggaaggaggaaaggaggccagctgctggttttcggtgcggcggagatgtctgaggtgtcggtgataaaccaggcggaggtggaggatgcgggtgccgggcagctggacctgccgccggggttccgcttccaccccaccgacgaggagatcatctcgcactacctcacccacaaggccctcaaccaccgcttcgtctccggtgtcatcggcgaggtcgacctcaacaagtgcgagccatgggacctgccaggcagggccaagatgggggagaaggagtggtacttcttctgccacaaggatcgcaagtacccgacgggcacgcggaccaaccgcgccacggagaccggctactggaaggccaccggcaaggacaaggagatcttcaggggccgcggcgtcctcgtgggcatgaagaagacgctcgtcttctacc

SEQ ID NO: 3220 - DNA, 860 bp, Zea mays
  unsure (1)..(860): unsure at all n locations
  Clone ID: TF_ZmC175915_1
cattgggtacctcgaggccggccggaattcggcacgcgagagaaaggggtcgaatcggcggctgatttgacccggctcgctattagagctgcgaaagtgatccgagcagtcacggtttcggaagcggcgcgtcggccggaggagaaacgcaaccagctgtcgaggagctatgagcagcggtggcggaggcagagtgccggcggcggcggcggcgcagtcgcaggagctgcagctaccgccggggttccggttccacccgacggatgaggagctggtggtgcactacctctgccggcgctgcgccgggctgcccatctccgtgcccatcatcgccgaggtcgacctatacaagcacgatccctggcagctcccaaggatggcgctgtacggcgagaaggagtggtacttcttctccccgcgggaccgcaagtacccgaacgggtcgcggccgaaccgcgccgccggcgccgggtactggaaggccaccggcgcagacaagccggtgggcacgccgaagccggtggccatcaagaaggctctcgtcttctacgccggcaaggcgcccaagggcgacaagaccaactggatcatgcatgagtaccgcctcgccgacgtcgaccgcaccgcccgcaagaagaacaacagcctcaggttggatgattgggtgctgtgccgaatctacaacaagaaaggcgcgctggagaagccgaccggagccggcggcagggccgaggccagcagccagggcgcgctggggtccatgtccatgggctcgccgccggagcagaaaccgtccgtaaacacgtctgccacggcaacggccgcggccgccgactngagtgctcgtcgaaccaggaatt

SEQ ID NO: 3221 - DNA, 377 bp, Zea mays
  Clone ID: TF_ZmC145568_1
ctacaacttctgagagatcaagaactcatatatgcgcacaacactcttcctctgacaagagtttgttctgcaactaaccactatatatatagatcgatcctctatctgacaaggtgcaggtgcaggtgatcatatgaactccatggaatcatgcgtgcccccgggtttcaggttccaccccaccgacgaggagctcgtcggctactacctcaggaagaaggtggccgcccagaagatcgacctccacgtcatacgcgacatcgacctctaccgcatcgagccatgggatctccaagggcattgcgggatcgggtacgaggagcaaaacgagtggtacttcttcagctacaaggaccgcaagtaccccacggggacgc

SEQ ID NO: 3222 - DNA, 1795 bp, Zea mays
  Clone ID: TF_ZmC3782_1
ccggccgggaaaaaaaaaaaaaaaagaggttcagttcagcagccagtcagtcagtcctcgatctgatatcctctcctccctgcagcgactccagctccgatcgattccattccatccatcgagctgcagcagggccatgacgatggcagctacgacgacgatgatgtcagcagcagcgcaggcggcgacgtcgcagctgccgccggggttccggttccacccgacggacgaggagctcatcctgcactacctccgcaaccgcgccgcgtcggcgccgtgccccgtgcccatcatcgccgacgtcgacatctacaagttcgacccatgggacctgccggccaaggcgctgtacggcgacggcgagtactacttcttcagcccgcgggaccgcaagtaccccaacggcatccgccccaaccgcgccgccggctccggctactggaaggccaccggcaccgacaagcccatccacgacgccgccaccggcgagggcgtcggcgtcaagaaggcgctcgtcttctacaagggccgcccgcccaggggctccaagaccaactggatcatgcacgagtaccgcctcgccgccgtcgccggctgcaccagccccctcgccgcctaccgcccgccctccaagttcaggaacgtctccatgaggctggacgactgggtgctgtgccggatctacaagaagtccggccacgcgtcgccgatggtgccgccgctcgccgactacgagcacctcgaccgcgacggaccttctcccggcggcttcttcgacgactacttctgcggcagcaccagcttgtacgccgccgccgcgccggccatcggcggcggtgctgctgctgctggtactacaaacactactacgacgccggccgtcgtcatgcagcagcaccagcagccggcggcgctgccgaggctccccaagatcccctccatctccgagctgctgtgggacgagtacgcgctcgcgcagatcttggaccccccggccgacgtggccgccgaccacgcctcgttcgccgtgcacccgtccctcaaccagctcctggccgtcggcgacgacggctccgatctcatgatgttctcgccgcccccggccgccgcagcaggcgggaagcgcaaggcgatggtggcgatgaacatgagcccagctgacgagtgcgccgccactgcccaccagcaccagtctccggcggccaagcggctcaacggtggctcctgcttcgacgacgcgccgcagccggccagcggcttgccggcgacgatgtcgtccgtgcttggcggcggcctcaaccaccacatgctcccacagttctagatagacgacttctggtagctgactttgttgggggcacatcttccgtgcatgtactgcgtcatcaactgatcaatatggtggatcgtctacgcggaatagctagcaacctgcggcgacatggaaagcaaggatcgagctcgtggattggaggccattaataaagatgggtcgtgcggtgaagaacaattgtagcagtacgtagcactatttgtactggagccagtgttgatcaacgttaggcgtaaccatggtatgtatcccatttttttccctccgttgtagagtacaggtactctatattcatttcaggcgcagtgcgaaggtagctggagcttgatgggtccatgtactactacactagtactcttatttattattcaatatgaagtatatattatattgtcttgctagataaaaaaaaaaaaaaaacagcggaattttaattccagatatatagacagattattaagt

SEQ ID NO: 3223 - DNA, 493 bp, Zea mays
  unsure (1)..(493): unsure at all n locations
  Clone ID: TF_LIB4759-100-A1-K1-D3
attgggtacctcgaggccggccgggatgactttccggcaggccgccgtcgatcgatggggggagcatccggaggcgaccacccgcagcagcacggcggcggcgacgatgggcacctgcagcaaggcggcggaggtgacatggtgatgccggggttccggttccaccccacggaggaggagctcatcgacttctacctccgccgtagggtggagggcaagcgcttcaacatcgagctcatcaacctcgtcgacctctaccgctacgacccatgggatctccctggtaaccataagccgccgctgccgctaaggatgtgaaccgctgctagctagctcctgctcataaggggatctgctggcatatgtgatttcatgcatgtgactttgttttcttttggnttccatctcgtgtgtgcctttatatctagcctgctttttgctctcttgctttactttacgtggatgctatgatggagaggatgttgtcctgaat

SEQ ID NO: 3224 - DNA, 982 bp, Zea mays
  unsure (1)..(982): unsure at all n locations
  Clone ID: TF_ZmC21253_4
cccagcgtccgggnagagtggtacttgtactgcctccacgaccgcaagtacccggcggtcctgcgcaccaaccgcgccacggcggctggctactggaaggccaccggcaaggaccgcgaggtccgcaatggccgcaacggcgtgctggtgggcatgaagaagaggctcgtcttctaccgggggcgcgcccctaggggccagaagaagagttgggtcatgcacgagtaccgcctcgacggcatctacgcccaccatttcctcctcgtctctacgaggttaaacttgggaattaccattcatccgtggccgctgttgtaaataatgatacttctgctcaagaggctgaatggcgcactattcgaagtatacttgatcagggcaagacaacaactacattgggaaaagtaaataatgataaagcaagaatcttgaagtgaaatttgatgtaagcctgtaaccactgatgtttcaagtttacctgaaaatgtcgctgaaatggaggaccaagttaaacgtaagaattgggagaacgaaatggttcttgaagatatgaaaagggaggaagatttgctgaaacaagttaaggaattatacaggaagcagaagcaagagctcatggattatgtcactcaaccagcagtgacacagacgtcacgtgattcgccagcaactcattcacccgcaactcctgggagtaatccgtttggagccaagctctccaacaagtggcgataacattttggtggcgtacatccctattttgttggggcttattgcctgttctggcatcagcacgacgtaactagcatttgccacaagcttggtgttagtttgtgagggtgataggctagtgaaattgttctgctgcttagcattgttggccctatggataccaattgatctatagacagccgggaacttggctaacttattatgactatggatgagacttttgtgatgtaattgatgagactattgattt

SEQ ID NO: 3225 - DNA, 1132 bp, Zea mays
  Clone ID: TF_ZmC7355_1
acctcactcgcgcgcacacccccccccaccccgctcaccccccccctccccgccccccccctccctctctcgccgcgccatcgccccgcgggccccgctcgacccgcgcggggacagacgcgtgggcacgcgcgcagtcactcacgcacgcccccagctctctccttctccctgctcgctcgctcgccatggacgctccgagcagctggaagagtcctgcgcgcgccaagtgaccggagaagctgcgagatcagagtagttgcttgccgctcccgtgccaccaaattagattggacgtagctagcagctagctgagccgtagtgcgtagcggcagctaggctgctagctcgatcgttatagctgcgtactagtggtgtcgcagcagaagcagtagccagcttcagtagccgatccggtggtaaaagcaactttttttggacatggcggcggagggagccccggtgctggtgaggcatgctggcggcgtggaggagctgcggcagctcccgccggggttccggttccgccccacggacgaggagctcgtggtgcagtacctccggcgcaaggccttgggcgcgccgctccccgccgccgtcatccccgtcgtccgcgacctctacagcctcgacccctgggacgccgtcgacgtgccggccgcccctgatgcgagcagccaaggcgagagatacttcttcgcggtgcggccggcgggcggcgtcggaagtgctaggagggcgaccgcgagcgggcggtggaggccggcggggaaggagaagccggtggccctgccccgcccgtgcggcggcgggagcctcctggtgggcgtgaagagggcgatggcgttcgttccccggcggaagaagaagaaggcggcggcggcggcggccctggcgatcggctgggtcatgcacgagtaccgcctcgccgcgccgctgcacaagcacggctgcagcctggcccaggctcagggagagtgggtcgtctgccgcgtcttccagaagggcagcggcaggccgaggaggaggaggcaacgaccggtgtcaccgtcaccgtcgtccgctagcagctgcgtcacggacgggtcgtcgtcgtcgagctcggacatggacgaggtcagcagctagctaa

SEQ ID NO: 3226 - DNA, 545 bp, Zea mays
  Clone ID: TF_ZmC7355_3
tgcgcgcgccaagtgaccgaacaagcttgagctctgctgcttcagttgcttgcccctgtgccaaactggcaggaggtaggtagcttatagcagctagagctaagctgtggtgcgtagcggcagctagagctagctagcagtgcacgcgcaggtgcgtgctagctagctcgttagcggtgtagcagcagcacagtagcagtagcctagccggtgataaaaggaatttctttggggacatgtcggcggagagagccccggtcctggtgaggcacggcggcggcggcgtggaggcgctccggcagctcccgccggggttccggttccgccccacggacgaggagctcgtggtgcagtacctccggtgcaaggccatcggcgtgccgctccccgccgccgtcatccccgtcttccgcgacctctacagccgcgacccctgggacgtcgtcgccgtctctgcccctgatacgaggagcgagggggagaaatacttcttcgcggtgcggccggcaagcgacggcaagagcagcggcgctggtactggtagc

SEQ ID NO: 3227 - DNA, 554 bp, Zea mays
  Clone ID: TF_ZmC545_18
acgctcgggatcaagaaggcgctcgtcttctacgccggcaaggcgccgcgcggggtcaagacggactggatcatgcacgagtacaggctcgccgacgccggccgcgccgccgccgccaagaaggggtcgcttaggttggatgactgggtgctgtgccggctgtacaacaagaagaacgagtgggagaagatgcagctggggaagaccgccgtcgccggcgtcggcgccaccaaggaggaggcgatggacatggccacctcgcacacgcactcccactcccaatcacactcgcactcgcactcgtggggcgagacgcgcacgccagagtcggagatcgtggacaacgacccgttcccggagctggactcgttcccggcgttccaggacccggcgatgatgatgacggtgcccaaggaggagcaggtggacggctgcagcgccaagagcggcaacctgttcgtggacctcagctacgacgacatccagggcatgtacagcggcctcgacatgctgccgccgcccggggaggacttctactcctcgctcttcgcgtc

SEQ ID NO: 3228 - DNA, 778 bp, Zea mays
  Clone ID: TF_ZmC1509_2
attgggttgcgtccccccgggcgggggtttctcttgatcgctttgtcacttgaatccgtgcctgctctaacagagagcggagacgaccacgacgacggcgaggccaggctctgcgatggagcaggagccgcaccggcccatggagctgcccccgggcttccgcttccacccgaccgacgaggagctcatcacgcactacctggcccgcaaggccgccgacgcccgcttcgccgcgcttgccgtcgccgaggccgacctcaacaagtgcgagccctgggacctgccatcgctggcgaggatgggggagaaggagtggtacttcttctgcctcaaggaccgcaagtacccgacggggctgaggaccaaccgggccacggaggccgggtactggaaggccacgggcaaggacagggacgtcttcaggggcaaggcgctcgtcggttccaagaagacgctcgtcttctacacggggagggcgcccaggggcgagaagtccggatgggtcatgcacgagtaccgcctccacgccaagctccacggccacggccacggccaaggcgcagccgtcgtcgtcgtccccaaggccgccgggtccaagaacgagtgggtgctgtgcagggtgttcaagaagagcctggtcgtaggtggtgcagctgcagcagcagcaccaaccgcaggcaagaggggcggcacggagacgtcgtccaactacaagacgggcgacgtagcggccatcgcccacctccctccgctgatggacgtgtccggctccggcgct

SEQ ID NO: 3229 - DNA, 792 bp, Zea mays
  unsure (1)..(792): unsure at all n locations
  Clone ID: TF_ZmC1509_3
ttgggaccctcgaggccggccgggggcggctcttgatcgcttcgtcacttgaatccgtgcctgctctaataggaggctctgcaatggagcaggagccgcaccggcccatggagctgcccccgggcttccgcttccacccgaccgacgaggagctcatcacgcactacctggcccgcaaggccgccgacgcccgcttcgccgcgctcgccgtcgccgaggccgacctcaacaagtgcgagccctgggacctgccatcgctggcgaggatgggggagaaggagtggtacttcttctgcctcaaggaccgcaagtacccgacggggctgaggaccaaccgggccacggaggccgggtactggaaggccacgggcaaggacagggacgtcttcaggggcaaggcgctcgtcggctccaagaagacgctcgtcttctacacggggagggcgcccaggggagagaagtccggatgggtcatgcacgagtaccgcctccacgccaagctccacggccacggccacggccacggccaaggcgcagccgtcgtcgtcgtccccaaggccgccgggaccaagaacgagtgggtgctgtgcagggtgttcaagaagagcctcgtcgtaggtggtgcagctgcagcagcagcaccaaccgcaggcaagaggggcggcacggagacgtcgtccaactccaagacgggcgacgtagcggccatctcccacctccctccgctgatggacgtgtccggctccggntcccgnngccgnncgccgcggcggcggcacacgtgacctgctt

SEQ ID NO: 3230 - DNA, 804 bp, Zea mays
  Clone ID: TF_ZmC1509_4
gggaacacgacttcttcagtgctagctctatctatctatctattggtctagtgcgctttgtaccctacttgcgtgcctgctctaacagagagcggatcagcggagacacgacgacgacgacgaagccaggctcaggctctgcaatggagcaggagccgcaccggcccatggagctgcccccgggcttccgcttccacccgaccgacgaggagctcatcacgcactacctggcccgcaaggccgccgacgcccgcttcgccgcgctcgccgtcgccgaggccgacctcaacaagtgcgagccctgggacctgccatcgctggcgaggatgggggagaaggagtggtacttcttctgcctcaaggaccgcaagtacccgacggggctgaggaccaaccgggccacggaggccgggtactggaaggccacgggcaaggacagggacgtcttcaggggcaaggcgctcgtcggctccaagaagacgctcgtcttctacacggggagggcgcctaggggcgagaagtccggatgggtcatgcacgagtaccgcctccacgccaagctccatggccacggccacggccaaggcgcagccgtcgtcgtcgtccccaagcaggccgccgggtccaagaacgagtgggtgctgtgcagggtgttcaagaagagcctcgccgtaggcggtgcagctgcagcaccggccgcaggcaagaggggcggcacggagacgtcgtccaactccaagacgggcgacgtagcggccatcgcccacctccctccgctgatggacgtgtccggctccggcgctg

SEQ ID NO: 3231 - DNA, 740 bp, Zea mays
  Clone ID: TF_ZmC1509_5
ttgggtacctcgaggccggccgggatctgtctatctatctactggtctagtgtattgattactctacttgtcggctgtggcgcacagagagcggagacgaccacgacgacggcgaggccaggctctgcgatggagcaggagccgcaccggcccatggagctgcccccgggcttccgcttccacccgaccgacgaggagctcatcacgcactacctggcccgcaaggccgccgacgcccgcttcgccgcgcttgccgtcgccgaggccgacctcaacaagtgcgagccctgggacctgccatcgctggcgaggatgggggagaaggagtggtacttcttctgcctcaaggaccgcaagtacccgacggggctgaggaccaaccgggccacggaggccgggtactggaaggccacgggcaaggacagggacgtcttcaggggcaaggcgctcgtcggttccaagaagacgctcgtcttctacacggggagggcgcccaggggcgagaagtccggatgggtcatgcacgagtaccgcctccacgccaagctccacggccacggccacggccaaggcgcagccgtcgtcgtcgtccccaaggccgccgggtccaagaacgagtgggtgctgtgcagggtgttcaagaagagcctggtcgtaggtggtgcagctgcagcagcagcaccaaccgcaggcaagaggggcggcacggagacgtcgtccaactaacagacgggcgacgt

SEQ ID NO: 3232 - DNA, 857 bp, Zea mays
  Clone ID: TF_LIB4743-023-Q1-K1-B5
cattgggtacctcgaggccggccggaatatcctttgcacctgcgctgatccgttccaatcgatcttgcacctcctcacctcctcagctcggcgcctcagctgatcatggggggagcttctgattctaaccttcttccccctggcttccacttcttcccgtcagacgaagagctcgtcgtccacttcctccgccgcaaagcctcgctcctcccatgccagccggacatcgtgcccacggtgtgcatgaatcaccacgatccatgggaactgaatggcaaagcgcttgaggctggtagccagtggtacttcttcagccacgcgaagcaaagtagggccacgccgaacgggtactggagctctgtttgtgctgacgagacggtgctgagcggcggcggcggctgcagcgtcgtcgtcggcctgaagaagacgctcgtcttctccactggagagccctctgatggggccgaaacaaactggatcatgcatgagtatcacttgctggatgggaggacggggggtagcagcagcagcagtagcgcttcatcaatccatagttcgagcaagaaatcgcatcacccaaacacagagttcagtaactgggtgatatgccgagtgtttgattcgacgggcggcgggtcgcaggcgaactgccatgacgacgagggcatggagctttcatgcttggatgagttgttcctatccctcgacgactatgatgaagtcagcttgtcaagtaattagaagcctagtatcaccagaaccggcagtactagtaggcgctccctacgaattttacagaagatcaaatgattccataggtgtgtttagcccttaacactgcgtctaattaaacacag

SEQ ID NO: 3233 - DNA, 1418 bp, Zea mays
  unsure (1)..(1418): unsure at all n locations
  Clone ID: TF_ZmC22900_1
cgcctgctttttttttttgttctctcatctcgctcatatatatcctttgcacctgcgctgatccgttccaatcgatcttgcacctcctcacctcctcagctcggcgcctcagctgatcatggggggagcttctgattctaaccttcttccccctggcttccacttcttcccgtcagacgaagagctcgtcgtccacttcctccgccgcaaagcctcgctcctcccatgccagccggacatcgtgcccacggtgtgcatgaatcaccacgatccatgggaactgaatggcaaagcgcttgaggctggtagccagtggtacttcttcagccacgcgaagcaaagtagggccacgccgaacgggtactggagctctgtttgtgctgacgagacggtgctgagcggcggcggcggctgcagcgtcgtcgtcggcctgaagaagacgctcgtcttctccactggagagccctctgatggggccgaaacaaactggatcatgcatgagtatcacttgctggatgggaggaaggggggtagcagcagcagcagtagcacttcatcaatccatagttcgagcaagaaatcgcatcacccaaacacagtaagatcaagctagctacttgtgcgtgtgtgtaggcagtaggcactactgtatttatacatgtatataactatatatacggcatgcatgattatcttgacaagggtaatataaaatacttccatgaccattacaggagttcagtaactgggtgatatgccgagtgtttgattcgacgggcggcgggtcgcaggcgaactgccatgacgacgagggcatggagctttcatgcttggatgagttgttcctatccctcgacgactatgatgaagtcagcttgtcaagtaattagaagcctagtatcaccagaaccggcagtactagtaggcgctccctacgaattttacagaagatcaaatgattccataggtgtgtttagccttaaacactgcgtctaattaaaccacagatgtggattgctctcctcatcaaattggagtcggtcgaggcacatgcatgtaacaagctgagttagttttatataaatatgggcatagtgtgtggataatctcctgtactacaaggttcgaggtatctatgttcgagcataaaaaggggatagacaaggcatgtataactctatttaatataagatctcttgagcgatctttagagagttaattaaaaaaacaagcaaataagacgacttgtttcattgattcttgaagagatcgagcttcttttgcaccacaaggtcgaggatgtcttgcaactgcggatcaagctgcggctgcggctcaagctgcaagtgcggcaagaagtaccctgacctgnaggagacgagcaccgccgcgcaggccaccgtcgtcctcggcgtggc

SEQ ID NO: 3234 - DNA, 1272 bp, Zea mays
  Clone ID: TF_ZmC1429_1
cccggccgccccaaggctccattagcagggccctgttgggcggcctctgcccacagcccctcctctctctctctaagacgggaaactgcagcacatattaattagtaactagctaggtagaagaagatgagctcgtcgatcagcatgatggaggcgagaatgcctccggggttcaggttccaccccagactggatgagctcgtgatggactacctcctacaaaagctctccggccatggccaccatgccggcgctgccatcgtcgtcgacgtcgacctcaacaagtgcgagccatgggacctcccagattccgcgtgcgtgggtgggaaggagtggtacttcttcagcctgcgcgaccgcaagtacgcgacggggcagcgcactaaccgcgccacgcactccggctactggaaggccaccggcaaggaccgcgccgtcgtcgtcggcggcgaggtggcggtggggatgcgcaagacgctggtcttctaccggggccgcgcgcccagggggaagaagacggagtgggtcatgcacgagttccgcctccacccccatgccgcgccgtgcctgctagcagcagctgcgccaaacaaggaggactgggtgctatgcagggtgttctacaagagcagaacaaccagcccaaggccagaatctgaagacgcccgggacggcaccccatcagctgaaccgcaactgccggctgccctgccgcttgcgcccctcgctgacacctacgccgccccaacggttgcagagcaggtgtactgcttctccggtctgccggcactgccattcagaagaccagtgagccttggggaccttctggagttcgacgcctccgagaaggaatctgtcacgacagcgatgaccagtgtctcgaacaacactagttcagtgctggagctggctccaaattgcaactggaaccaggaaaatggcatgtcacggatgtggagcccccttgggatatgagatagatctgtgttgtttgctggatctggatgtatggagtgttagtactgagtggccagtagggttctgctgcttagatttgattagcagtgtgacttgcagattgtgtagattagattatccgttattggactaatggcttggcgtagtatttgtacatattgctactgaaggaacagtgtccttatccttgtttggcgtagtatttgtacatagcacctgctaaacttcagacaatcagtgaaagacaaatgtgtacattgtaacatagtgttaagaaactctgagagttgctcc

SEQ ID NO: 3235 - DNA, 3798 bp, Zea mays
  unsure (1)..(3798): unsure at all n locations
  Clone ID: TF_ZmC26324_1
acgtacgcgtgggcgtacgcgtgggtttttatcgaaactagttctgacggacggtgattagtccgaactccggaaaaattttcagggaaatagaaagaaggattttggaccagtttcatttttttgaactaaagctcaacgtccaagactttaaagagaagtaatgatcttgttcaaaaatgaacagagaatgtattgccctttttttgggggagttagatgcatgagctgatcttctgggtccaggtgggctaaattctccctttcttcttcctgcattcctcaaaggcgacgtgaagttgtgagatctgggtctccttatgaattgagctggctaaccgtactttaccatttggttaagtccatcattgccaggtgagctgagctacgtactgccggcatgcacgcagccattgtgcaccgaccagtaacagtaaccatatgggctatggcatgcagcacacattcacccctctagctagcattaacatgggggacagaagcacagacgaactttagcccagagttggttggttgccactccgcttcaggggaaaaaaaaaattaagagtcagttgagacagataatcgcttctggcaaaagtactggcggcacaaacagtactgtacatggattagctgctaatcatgcagattcaggcacaggcatcgaggcagggaggcccccacctgccggcaaatctacatgggggtccgtgtgggaacgtgacgtaaaccgtcaaagggaaaaaggtgcggggaatcgagtaccaaccttgggcccctcaccctttccaacgggggagctgactaggcattgctctggtggcccacaaagcagccaatggccttccgatcctacagtcctgctgcggctacaccagctcgctttggctgccaaagacaagaagagaagattgggatatttctattctattcaccgatataaagctactgacgcaggacacagcaaaagcaaaagccaaagtttgagagagagagagagaggggtaatatagcttcatgtgaaagatgacaagaatcccagcataaaataatctcccaaactttgctataaagccacaacccctccccctcctcctttccctccctctctctccttcctcatgcgcgcgcctgccattagcccaggtctccttctccctcttgcctgtctactgcacctcctctttgttacattacatacgacgatctcggttaaatttctgcagcttacgtctctcttctatattttttttgtgtttcaggctgtgtacattatttgtagctgaccattcattcatatagagctagttgagcaggcctggttggctgtccataatttttgcttcggatagcattgctgccaggcgactgcaaagctccaagcagacttttgctgtgaggatttttttgcgaggaagggcagagggagcaatggcgccagtcagtttgcctcctggtttcaggttccaccccactgacgaggaactcatcatctgctaccttaagaggaagatcaacgggagacagatagagctcgaaatcattccagaggttgatctttacaagtgtgagccctgggatctgccagaaaaatcatttcttccgagcaaagaccttgaatggtacttcttcagccctcgggaccgcaagtacccaaatggatcgaggacaaaccgcgcaacaaaatctgggtactggaaggcaactgggaaggacagaaaagtgaactcgcataggcgtgcagttggtatgaagaagaccctggtgtactatcggggccgagctccacatggttctcgcactgattgggtcatgcatgagtaccgcctcgacgagagggaatgcgagactgacactggcttacaggacgcatatgctttgtgccgagtgtttaagaagacagcgcctgggccaaaaatcatagagcattacggcgcagtgcaccaccccatcgagcaaactcagtggatgggaagcagcgttgagcgctccccaacgctggacttgtccagtgatgttagaggcgatgacttcgacagcagcagtttctcgttcccgacagaggcgccaatggactcctccatgcatggtgggttgttcgggatgcagatgagtgcacctcacgaggatgccaaatggatgcagtttctgagcgaagacgcctttaacgcaaccaatcctttcttcacgaatccagcttcttccagcttctcatgcctcccatccaaggtggatgttgcactggaatgtgcaaggcttcagcacaggctctcattacctcccctggaagtggaggacttcccacacgacgtcagcctcgacacaaaggcgagcgtgctccgcagcagcaaccccaacaacgaggttgacatccttcaagagttcctctccgtggcgtcggcctcccaggagctaatcaacggcaccagcagcagctacgctgcagaaatgtgggcaggcgctggcacgagcagcaccagcggcacccactacgtcaacgaactatcttccctctttgagtttggggtgaaggctaaagaggaggccgacaatttctaccacatggactgcattggcacatctgcaggcttctcaccgaagccggtccgtgtcgatgaaccggttaggttggttgagatcgctgacatggaggagttcaaggaagagaagaggcgagtagagaaccttagaggagtgaggctgcacaacaatgacgacctaggagagattccaacagactgctgcatcacacaataccccatatcggacactgctgacatttcaggagaagccggtcacctgaccaatcccactagcgccggcggcctagacactgcacccatcttctcgcaatctcaacctgacgacttcgctattgggttcagtgacgacgccgaccccaacgcatctttcgacctatgcgagagggttgacgtcaagcatgggctcttcgtctcaacggtgggtgcgcccaagacgttcttccaccacgttgagccatcgaagaaggtcagcttccacctgaataataatcccgtagcaagcgacgacgacgtcagcaaggcgaccgggaagtcccgttcccccattattagtgtgatgacaaccaaagatagtggcagcagcttttctgtttttagcaagttgaaggcgctcatcagggacaaattcctggtgaagaagctgccttcatcgtgccagaggtccttgttaggcagcaaagaaacagcggcagtgagcgagctgctgcagatggtggtgtcgtcgctcctcttaacaccaacggaggtgacaggccccacgacgatgactaccgagcaagaagagttggccaggaaggcgatgaagccgggaccccgtcgttgtgatggaagccatgcgtggcttcttccactccccaaaaggagcaaaggcatttccagcatgttttttagtgggaaatgggcatttctgacatccgcattggccatccgcgctccaggtccagggtgcaatcactgaaagaaaggtcttccttctggtcatagctcgtgtaaaaattaaagtacggctctttataatgctactgcttaggaaactcgtatcgggtgccagtgcacgggacgcatagtctttcgtgcatcagacagttaacagcgggtgtataacgggagaaatgtcataattcgtatttattttttttattcgtctttgtattaacacgtctgaagtctagccccctgttgtacatcgaaacacatgcagttcataaattgaaattttaatttatccgnnnnnnnaaaaaaaaaaaaa

SEQ ID NO: 3236 - DNA, 213 bp, Zea mays
  Clone ID: TF_13150961
gcatgaaccatgggatttaccttcaaagtgyaatcttccaatcgaggrcaacaagttgcatttcttttcctctcgtkacaagaagtacccbactggstckaggkcaaacagggcaacactcgcyggttactggaaaacaactgggaakgaccsarccagaaarctgaagaagcgaacyctaggaacaaagaagactttagtctttcatgargg

SEQ ID NO: 3237 - DNA, 2962 bp, Zea mays
  unsure (1)..(2962): unsure at all n locations
  Clone ID: TF_ZmC151_2
gtgcggcgctcaggcggcggtgccggccggggccgggattcctcacacccacacaaaccgcacctcatccccgttgacccgacggtggcgctcatctcctccccgacggttctccccatcggcctgctggcttcccttcgtcttctccgacactgatcctcatcactcatgtctgctgaagttgccggaggaaacccttatttcctctcgtgctacttctggttcatatactgcataaaattccgagatttcacttgatacaagtggaacactaggagttttgtgcaaatacttcctaccatgtgaatcagttgtagctagtgaatttggcaagactcaagttctctcatctgggttcagaaaacatctgtcggttgattgcttggtctcctttttcctttgagtcttgccaaccaaagttttctctcagcatcagttgtggtctacgaactctttctgtgacttgaccaacatctcttttggtcctgtcaatcttgcaacactcccttccaaagacttgtctagaggctggattgccctgctctctgctggcgctgcatcctcctttagtcttccaagttttctctcggcagcagttgtgatctacgaactctttttgtgacttgatcaacatctcttttagtcctgtcaatctcgcaacactcccttccaaagacttgtctagaggttggattgccctgctctctgctggcgctgcagcctcctttagtcttcccttgctgcattctgtgctcactttcaaaagctgctctgttctgctctgctttgttgattggtgcacttggattctcttgtctgtgtaatcaagcttctctcttctggggcacaactagtcaccccattgaagcatttcagcttttgtcttgagatctttctatcagtgctaaaggcaaaagaggtcttagggcgatggcgcaaactagcctgcctcctggatttcgtttccacccaactgatgttgagcttgtttcctactatttgaagaggaagattatgggaaagaagcttattgtagacgctatatcagaggttgatctctacaagtttcctccctgngatctccctgaaatgtcctctccttcgaagcccccaatgcctagcattttcgatgtttttcctccccaatggggtcctcttaacagatggtccagcaacttcttgggcccagccatgcagttccctttttcatgattgggcagcttttgtcatggagctccctgttgttacaactctatcccccctgaacgtcaaggacgtcatttatgtcatgcctgggcccctgaaattttttgttgcttttttgaaccaaaccgcccttgggtggtatttttggaaacccacgcgtccgaaagatcttgaatggttctttttttgtcctcgtgacaagaagtatcctaacgggtctaggacaaatcgtgccacaccaaatggttactggaagactagtggaaaggatagaataattatgcttaactcccgcaccgttgggatgaagaaaacattgatatttcatgaaggcaaggcccctaagggcgacagaactgattgggtgatgtatgaatacagaatggaagatgaggatttggtttctgctggtttctcaaaggatgcttatgtactctgcaaaattttcaagaaaagtggccttggtccaagaatcggagagcaatatggggctccatttaatgaagacgaatgggataatgcagaagtcgaaacttctctgtttcctttgacttgttcagaagtgaatccaacagagggacaacgtgctcagcctactgtcctggctggtgctcttctggaacccgaaccacctctacataattcatcttctacatgtgctggagaggaatcatcatttggtcatgccactgctgaggacttaacttttagccatagtgttgctagctctgctatccaagatacacctgctcggatgtcaggagacggtgtggtttctgtgaacaacatatccaatgtggccaatgacatgcgtagtcctcgtgactgtgatgaatttctatcggagttgtctagatttatgaatgattctcctctgcgtaacactcctcttggagagtgctctggtcttcctccgatgtctgaagctgaggctcatgcttttgaagtcaactcttttggcctctacaatgaattatcagagcttgttgggttaggatgcgcggataacaacttaaacaccagcaatgtggaaactacggattatctcatgttgccacctgacagagaactgtcggctaatgattacatggaactaaacgatctccttgctcctgacccaagcttccccagtgaattttctgctcaggacaatcaatatatgcagcatcctcttgctcagtacaatggacattatgatctgtcaggtccttcggagccaacaatgcctagcattttcgatgtttttcctcccaataatggagtcctcttaacagatgatccagccaactacttggacccagccatgcagttccctttctcatgattggtcagcttttgtcatggagctcgctgttgctacaactctatccaccctgaacgtcaaggacgtcattgatgtcatgcctgggcccatgaaatcttctgttgctcttctgaaccaagccgaccttggctggtattcttggaagcacggtgcttggaacaatctgcatcgactgctgtatgctcccaactggttgagctaacggccaatctcggctcactctgctgaggagatcatagcctgtaaatctttgattatgctattacttgtgtgtgtcgcaacctgcctgattaccattgtcttgtgtttcgagttttgacaatatgcaaaccataataatgtcgtaatatggaactcgtttatcatgttatgtttaaaaaaaaaaaaagcccctaaaaccannnnnnggnnnnnnnnnnnnnnnnnnnnnnn

SEQ ID NO: 3238 - DNA, 398 bp, Zea mays
  unsure (1)..(398): unsure at all n locations
  Clone ID: TF_LIB4301-007-Q1-K1-B2
gtccggattcccgggtcgacccacgcgtccgcttccattagcgactaatccagccttcgttaagggtgattagaatttgattaatttcaaggcctcagatcggagattgaatggagtgcggtggtgcgctgcagctgccgccggggttcaggttccacccgacggacgacgagctggtgatgtactacctgtgccgcaagtgcggcggcctccccctcgccgccccggtgatcgccgaggtggacctctacaagttcaacccatgggatctccccgagagggcgatgggaggggagaaggagtggnacttnttctcgncgngggaccgggagtacccgaacgggcagngggcgaacagggcggnggggacggggnactggaaggcnacgggggcggac

SEQ ID NO: 3239 - DNA, 650 bp, Zea mays
  Clone ID: TF_LIB5116-032-A1-PF1-G7
gtgatcataagccgaatagcgggaaggaagaccctacaaagggagcagctaagagagctaagtgcaagtctgggacttaagctcgagcttccttctctctttaagtagctgcatgccatagttccctcatagttttgttcctcgctttggttgataaggaacaggcagtgcttagagctaggttatttaggttaggtcaatcttgtgttcaagtcgtcgagtgagatccctcttccacctccggtgatcagtagaaacccaagtcctagctagttcctgtccagtaaagtctcacctagcacatcagtcattagggtttagtacgctcctgataattagggctaaggttagcgccaccgatttgttttacggtggtaaagatatggaggagatcaggagtgatgacatggagaagcaagatgaagttatgttacctggcttcaggtttcatccaactgatgaagaactcgttcggttctacctcaagaggaaaatccagcagaagtctcttccgattgagcttattaggcagctggacatctacaagtttgatccatgggatctcccaaaactagcaagcactggagagaaggagtggtatttctactgcccaagggataggaagtaccggaacagcacaaggcctaaca

SEQ ID NO: 3240 - DNA, 1341 bp, Zea mays
  Clone ID: TF_ZmC232_1
ccaagcgcgacggatcccaatccatcttctcctcatcccccaccacgaccaaaaaaaatccggtcgccgatgccgtctgctgcctgacatcggtcagccagggtagatcgcgcaggcaggcaggcagccccacacacatacgaaacccaatcctgcttcgatcccgtcggccggcgatggagggccggcggccgggcgcgcccgtggcgggcctgcccatcggcttccgcttccgccccaccgacgaggagctgctgctgcactacctccgccgcaaggcgctggcctgcccgctccccgccggcgtcatctccgacgccgacctcgcgcgcctccacccgtgggacctcctccccgccgccgccgccgcaccaggtaccgtgcctctccatcacacccctccccgcattgccgctcgcgtcccttacctgacgagcacgcgcgaccgaattggatccaaccctgcagggggatccggagccgacgccgacggggagcgcttcttcttccaccgcccggcgacgcggtgctggcgcaagggcggcggcgcggccagggcggccggcaccggcgtctggaggccgtccggcaaggagaccctcgtcctgtccccgcgctgcaagcgccccgtcggcaccaagcggacgctcgtattctgcccccgccgcggccgcgcccgcacccactgggccatgcacgagtaccgcctcctccccgccggcctccacccctatggctgcgccgccggcgccggcgccaacgcgcctccgcccactaatgtgagctcccacggcggcgacgcggcggccgactgggtggtctgccgcattttcaggagggccaggccggcccaccgcgcccgccttggtggtggcgccagggaggaactagaagaggagcacgcggcggaggagagcccgtcgtccccgtcgtcctgcgtcaccgacgcctccgagaccctcgaccaggaagaggatgacggcgacgaagggagcagcagcagcaccgtcgcctcctctaactgagactgagtagaagagttggctaccccctgtcgatcagatcgcgggcgccatgttctaattgccgtagaagcctcatcatcagtacctagttgcaatcaatagagagacaagaagatcggcctccaacaaaccaacaaaaaaaaagagctaagcgctttggtggtatgttgctgttggagctcgtcgcgaatccatattgttaattagcgagaaattaatccgttcccccctccggcaattattaattaatcaccgttccctggttctcccacaatgtgttgctcattcgtcgaagcaaaacaatgccattcgccgt

SEQ ID NO: 3241 - DNA, 602 bp, Zea mays
  unsure (1)..(602): unsure at all n locations
  Clone ID: TF_LIB3592-100-Q1-K6-E5
ctgctctgcttcggtgctactcactgtgcagtgtgcacagccagccagcttcagcagagtccggctcggctgtcggctgcgagtcctgctcctgcaggaatggacaggcctgcgcaggcgcccacgcagctgccgccggggttccggttccaccctaccgacgaggagctggtcgtgctgtacctccgccggaaggccctggctcgcccgctgccggccgccgtcatccccgtcgtccacgacgtcgccaggctcgatccgtgggacgtcactggtgcgtactacgccgtgcgcgtgatttgcggatcgatccagagtttccctgattgcttggtgtaactaaaccgcgcaggggcgagcgaaggggagggctacttcttcagcctgcggcgagcgccggcgaccggccgcaggaggagggctgggagcgggtactggaaggccacggggaaggagaagccggtgttcctgcagtgcggcggcgagcagaggcagctgctcgtgggcgtcaagacggcgctcgccttccaccgncgtgagccgccgncgncgtcgtcgcggacaggctgggtcatgcatgagtaccggctcgccgtgccccg

SEQ ID NO: 3242 - DNA, 1146 bp, Zea mays
  Clone ID: TF_ZmC99_3
ggctggcagggttcggcgagcaggagcgctacttcttcacgtgcaaggaggccaagtacgtgaagggccggcgcgcgaaccgcgccacgggggccgggtactggaaggcgacgggcaaggagaagccggtggccgtggcggtccggggcgtgcaggggcagagccagagccagagccaggccgtgctggtgggcatgaagcgctcgctggtgttctaccgcggcaagccgccgacgggaagcaagacggagtgggtgatgcacgagtaccggctggcgggcgccgggctcgcgccgtgccgccgccgccacgccgacgccgacggagacggcgtggcgcgggcgccggccgagggctgggtgctgtgccgcgtgttccggaagaagggctccgccgccgtcgcgaggcggcccggcgaccgcagcgacggcgagggcgacgagagcgcgtgcggcggcggaggaggcggcgggcgcgggttcatcgacttcttcgcgcgcgcggacgccgccgggcgaaggcgccgcgctccgtcgcccgccgtgtcgagccggtggcttgcggacgcgtcgccccagccggagcaggaggccaccagcagaggcccgtgacgagacaagggccggccggctggctggcgtgaagcgatcaagcaaggtagagagagagagagagggaagcttttgttgcattggcagtacctaatgaggggagggtccagtacagtaggtaggagcaaagtgaattcgttttagcaacgtgagagagagaggcccgatagtcagtgcagtatcagttgttgagcgtagatggtgaaactaatgtagcagctcagttgtactcctcccaaccacctgatgaatcctacacaattgtagagtgtggctgcagcaaatcccggccatggcaccggagctcctccaggaacgcaagtccaccagctgctgctgctgcttgccatggcggtggcggattgctagtgctaatgttccacaggctgttgattgctgagaagcaagtggcgggggtggtggcgggcagcagacggaagatggcgggtgtctgatactggtggtggtggtagtagtcgtgcgtaatctgttgcctggacttggacttggtttctttaatgcaattatgacgatg

SEQ ID NO: 3243 - DNA, 751 bp, Zea mays
  unsure (1)..(751): unsure at all n locations
  Clone ID: TF_ZmC175915_2
nggtttcttagctcgccctgtacctgctgctgactcctgatctcggtactactgctgtctgtgcagggatggcgctgtacggcgagaaggagtggtacttcttctccccgcgggaccgcaagtacccgaacgggtcgcggccgaaccgcgccgccggcgccgggtactggaaggccaccggcgcagacaagccggtgggcacgccgaagccggtggccatcaagaaggctctcgtcttctacgccggcaaggcgcccaagggcgacaagaccaactggatcatgcatgagtaccgcctcgccgacgtcgaccgcaccgcccgcaagaagaacaacagcctcagggtacgttgcgatcgatcgagttccggccggcgcgtccaccagaatatctcattcgtttctgtgcagaaaattatctcttgctcgtatatattattatttgttaataatatatatctcctgtcactgccgtatcaacaaagaaaaagttgagataagaacgtaacgtatggatcacaaagaataattattagcagtcggattttcactagctagctagtcgccgataaaaaggacggcgagacccatttctctccggtgtgaaccctggagatgctgcgccgtgcgtcatctccttcaaccgccaattatttcttgcgcttttgcgagctacgacagcgatccgatacggtcgaaagcgacgcatcaatagtgcctatacatttcatcgcactagttctagatcgcga

SEQ ID NO: 3244 - DNA, 550 bp, Zea mays
  Clone ID: TF_ZmC545_19
acgggacacacacgcagatccgagctaaccaccatcgacgagcgccagccgccagcagccgagccggagcgaccttttcttttttcttttacacagcgggacagagaaaggagtcaggcagccaaagccacccaccgcttttaccgatcggcgttgccgccaccgctagcattgtcggcttcagctccatccaaatccaccgccagcaagcaagccggcgccatgggtctgccgatgaggagggagagggacgcggaggcggagctgaacctgccgccggggttccggttccaccccacggacgacgagctggtggagcactacctgtgccgcaaggcggcggggcagcgcctccccgtgcccatcatcgccgaggtggacctgtacaggttcgacccctgggacctgccggagcgcgcgctcttcggggcccgcgagtggtacttcttcacgcccagggaccgcaagtaccccaacggctcccgccccaaccgcgccgccggcaacgggtactggaaggccaccggcgccgacaagcccgtcgcgccgc

SEQ ID NO: 3245 - DNA, 746 bp, Zea mays
  Clone ID: TF_ZmC2195_14
aggattgacattcgttctcatctatgtagtattcatgcataatccactcagtacgttttccagtgggaggccgaccttcatgaaaaactaaagttttctttgttcctatggtcctcttatccaccttaatggcccggtcttttccagtagacttccaatacccagcaaccgttgccctatttgaccgagcaccattaggatactttctgtctcgagcagcaaagaaatgccacttgttatcctgtgttggaacattgcacttcgcaggtaaatcccatggttcatgcttgtatatatccacctctggtataatgtcatattcaattttctgaccaagtattttctttttcagatagtgagcaacgagttcagtgtccttaggatggaatccaaatcctggtggcagagccatgtcacgtagagtttccattgtatatgatctgtggtgcggagagcagagccgcgccggcgccgggacgtagccccgaccgatcgatcggaggggagagcggtaaccagcagggggaagccggagctggggccacggacggaagacggcgggcggaaggggatcgcggaagaggcggtggaggcgaagaggccgaggcggtcgcaggaaccggtcaagtctttgtgagggctggctggcgggtggggggggcggccgcggcgtggtgctgtgtctcttgccagcagacgcagacgcagcgaggggggggctggaaaagggaatgggatgcgggcag

SEQ ID NO: 3246 - DNA, 631 bp, Zea mays
  Clone ID: TF_LIB4741-044-R1-K1-H12
ccctccggcctcccgtccagcccccttgccttctttctcagctcacctctctctttacgcacgcctctctctctctctctctctctctctctctctctctctctctctctccttatctgtcctgaggcagccatttcctcttccgatcgtggagaggcttggagtggaaggaggctgctggttttcggcacggcggagatgtctgaggtgtcggtgataaaccaggcggaggtggaggacgcgggcgccgggcagctgatggacctgccgccgggcttccgcttccaccccaccgacgaggagatcatctcgcactacctcacccacaaggccctcgaccaccgcttcgtctccggcgtcatcggcgaggtcgacctcaacaggatcgagccatgggacctgccaggcagggccaagatgggggagaaggagtggtacttcttctgccacaaggatcgcaagtacccgacgggcacgcggaccaaccgcgccacggagaccggctactggaaggccaccggcaaggacaaggagatcttcaggggccgcggcgtcctcgtgggcatgaagaagacgctcgttttttaccgaggccgcgcgccgcgcggggagaagaccggatgggtcatgc

SEQ ID NO: 3247 - DNA, 786 bp, Zea mays
  unsure (1)..(786): unsure at all n locations
  Clone ID: TF_ZmC13043_3
ccgggggaaatgtagctcgaggctgactgggatctctctcgggactttccccaatccactccactccaatccccttcccccctctgtcaaccctagccgcgccgccggcagtctgctcgggtggcgcatacatgacccacccttcctcgccgtcgtcctccgcgccgccaccgccgcccgccgcggcggcggcagcggcggcggccgaggccacctccctcgcgccgggtttccgcttccaccccaccgacgaggagctcgtctcgtactacctcaagcgcaaggttctcggccgcccgctcaaggtcgacgccatcgccgaggtcgacctgtacaagctcgagccctgggacctgcccccgcgctcccgcctccgctcccgcgactcccagtggtacttcttcagccgcctcgaccgcaagcacgccaaccgcgcccgcaccaaccgcgccacgtcgggagggtactggaagaccaccggcaaggacagggaggtgcgccatgggcccagggtcgtcgggatgaagaagacgctcgtattccacgccggacgcgcccccaagggcgagcgcaccaactgggtcatgcacgagtaccgcctcgagggcgacgccgccgtggagataccgcaggactcgtttgtggtgtgccggatattccagaaagctggcccaggtcctcagaatggggcacagtatggagcgccgttcgttgaggaggaatggggaggagacgatgcanatgtgggtttgcttccagtggnaggtgatgctgctgtcgaccctg

SEQ ID NO: 3248 - DNA, 487 bp, Zea mays
  unsure (1)..(487): unsure at all n locations
  Clone ID: TF_LIB3595-041-Q1-N6-B1
atctgaacaggttaggctaaaaattaactaagggtagacgaatgttcataaacggagacactactggtatatacatctctttcatgagctgggatatcacatactcctacgacacatgcacattattatttttatctggagaagcggacactgggaggccctggctaggaggaccagaactagtggtacttatatcagcacaaggacaagaaggacccgacgggcacccagtccaaccgcgccattgacgcctggttctggaagggaaccgcttgagcaaacacatttacgcatcaacttgcgaggggcggtgtgcttgatgaacacgctggtgtactacaacggcagagcttcctttggccactagntcgattggatcatgcaccattaccgcctgcaccaagggtgccaacgtacgttagtttatccagccgtgatgctccatgctggactgcaccttaagatggaaccttcctgcatgacctta

SEQ ID NO: 3249 - DNA, 673 bp, Zea mays
  Clone ID: TF_LIB5116-070-A1-PF1-B2
aaaaaaaaaaaaaaaaaaaaaaaaaaaaattcccattcatacctcgctttgctttcttgtgcacccaagcaagcctccttgctcttcttcttcctccttccgaccgatctcactcctagccagcttagcttgatcgagagagcgagcatggtggagagcgtagcagcaagtccgtcggaggagcaaggccgcggcggcggcctgtcgctgcctccggggttcaggttccaccccaccgatgaggagatcatcacgagctacctcctgcgcgagttcctcgaccctagcttcgtctcccgcgccgtcggcgaggtcgacctcaacagctgcgagccacgagatctcccaggcaaggccaacaagggggagaaggagtggtacttctttgtgcacaaggacctcaagtaccccaccgggagccgggccaaccgcgccaccaaggagggctactggaaggccaccggcaaggacagggagatcttcaagccccgcgcccgcgagctcgtcgggatgaagaagacgctcgtgttctacacgggccgcgcgccccggggcgccaagtctgagtgggtcatgcacgagttccgcctcgaaggcaagtccagaggccaaaccatgaacaatcccaaggacgaatgggtcgtgtgcaaggtgttcaacaagaagggggagg

SEQ ID NO: 3250 - DNA, 941 bp, Zea mays
  unsure (1)..(941): unsure at all n locations
  Clone ID: TF_ZmC5878_1
ccttgccttctttctcagctcacctctctctttacgcacgcgtctgctgctctctctctctctctgtctctatctctctctctctctgtacgtatctgtcctgaggcatccatttcactgttgcagatcgtagagaggcttggagtggaaggaggctgctggttttgccagtccaagcccccttgccttctttctcagcccacctctctctttcacgcacgcctctctctctctctctctccctctccctatctgtcttcctgcctgaggcagccatttcctcttccgatcgtggagaggcttggagtggaaggaggctgctggttttcggcacggcggagatgtctgaggtgtcggtgataaaccaggcggaggtggaggacgcgggcgccgggcagctgatggacctgccgccgggcttccgcttccaccccaccgacgaggagatcatctcgcactacctcacccacaaggccctcgaccaccgcttcgtctccggcgtcatcggcgaggtcgacctcaacaggatcgagccatgggacctgccaggcagggccaagatgggggagaaggagtggtacttcttctgccacaaggatcgcaagtacccgacgggcacgcggaccaaccgcgccacggagaccggctactggaaggccaccggcaaggacaaggagatcttcaggggccgcggcgtcctcgtgggcatgaagaagacgctcgtcttctaccgaggccgcgcgccgcgcggggagaagaccggatgggtcatgcacgagttccgcctcgagggcaggcttccccagccgctcccgcgctccgccaaggacgagtgggccgtggtgcaggtgttcaacaaggagctgcangcggcgaggagcgagccactattnnggcgcggccggcngcgcggaactcgagcgcgtgggctcgctgggctt

SEQ ID NO: 3251 - DNA, 672 bp, Zea mays
  unsure (1)..(672): unsure at all n locations
  Clone ID: TF_ZmC3395_2
ggccggcggggagaagncggtactcgtgcatgacccagtcggtgcgggcgccgccgccgccacggcggcgcgggcagaagacgagcgtccgcttggtgccgacggggcgcttgcagcgcggcgacacgacgacggtctccttcccggacggcctccagacgccggcgccggccgccctggccgcgccgcctcccctgcgccagcaccgcgtcgccgggcggtggaagaagaagtgctccccgctggcgtcgtcggcggctccccccgcaggtggtgcggcggcggggaggaggaggtccgacgggtcgaggcgcgcgaggtcggcgtccgggatgacgcccgccgggagcgggcaggccagcgccttgcggcggaggtagtgcagcagcagctcctcgtcggtggggcggaagcggaagccgatgggcaggcccgcgacgggcgcgccggggccccgctgctgcaggcgccacgcgccgggccgggcctccatcgccgccgccgccgatcgacgggatcggatcaggattcggttttggatttgtttgggtggcttgcgcgcgatctgcctgggtgatcgatgtcagacggtaggcggcatcggcgacctggtttttgtggcctggtgggggatggggggattctcgtcgtcgtgggaggagcgccggccgg

SEQ ID NO: 3252 - DNA, 1329 bp, Zea mays
  Clone ID: TF_ZmC16864_1
ggtcgtctaaaaaagcagcagctgctcttctcttctgctagcagctttatttgcctgcctccctaccggcgagggaggtacgtgcgccgatcgagaagcagcagcagcaattaataactaaacatggatcaggcggcggaggagtcttgtgttcccccaggcttcaggttccaccctacggaggaagaactggtgggctactaccttgccaggaaggtggcctcccagaggatcgacctcgacatcatccaggaggtggatctctacaggatagagccatgggatctgcaagagcggtgcaagccgcagcacgccggcggtgggcacgacgagcagacacaggagtggtacttcttcagctacaaggaccgcaagtaccccagcgggacgaggacgaaccgcgccacggcggccggcttctggaaggccaccggcagggacaaaccggtgctgtcgtcgtccaccaggaccaccaggtgtagcagggtcatcggcatgaggaagacgctggtgttctacaagggcagggcacccaacggcaggaagagcgactggatcatgcacgagtaccgactccaatccaacgagcacgcaccggcgcaggaggaaggctgggtggtgtgccgcgctttccagaagcctatccccaaccagcggcccttcttccccaccagctacgccggctactacgaccacaacctctcaacgacggcacggctgcacgtagacggcgaccgccatttcctggcgggctcatcagcagcagcagcagcactgctacagcagccaccagggcttgcaggcagcagcttcccgcagctgtactccgacgacgacttggagtccaagaagcagctgttgagtatcccgccgctggagagccccactgccatggcctgctgttccgacgccggcggctacgcgcagagaagcagctacgatgaacatgagatgatgatgatgatgatccagcagggaggaggaggaggagagcaagctgcagccgccatcgactggaactttctggacagcctgctgtccgcgacgtcgcaactccatgggccctcgggatccttgttgcagtgacctccggccatcgtcgatcgatccatctttctttgatccagcggagaacattattcattcatcggcattatacaatatatttattagttgcatacacacacagagtatacgtatatgctaataattcagatgtgttcatacacacttccattgtcatgtgtagttcgttgcgacttacattacagactgccttagatgattcaggtatactgtatacaacatgatgcacagtatagtaggagt

SEQ ID NO: 3253 - DNA, 745 bp, Zea mays
  Clone ID: TF_ZmC593119_1
cgaggccggccggggatccgctaccaagatactcctgcaccgattaataaattcatgcagctctataatttatttgcataaagcagcgagagctcgatcatcatcaggaactatctacccccttcaatttgcagccgcaaataatctatcggtcgtcgtcagcttgcgagcgacaaggcgcgacagatcgagatgatggaaagcagtggtggtagtggcagcagtgatccgttgctgctggcgccgggattcaggttctacccgacggaggaggagctgctgaccttctacctccggcaccgccttgccggcaccaagcccgtcgtcgagcacctgatccccgtcatggacatctacggctaccatccctccgagctccaggcgatggccggcgcggcgaacgtgtgcgacacggagcagtggttcttcttctgcccccgcgcggagcgggagctgcacggtgggcggcccgcgcgcaccacgccgtcgggctactggaaggccactgggtcgccgtcctacgtctactcctcctcgcccaacaaccgggtcatcggggagaagcgcaccatggtcttctaccagggccgcgcgcccaccggcaacaggacccgctggaagatgaacgagtacaaggccgtcgccgacatgtgcgccgccgccgcccggggcgcccgtcatgctgcggaacgacttcagcgtctgccgggtgtacatcagcacgggcacgctgaggtccttcgac

SEQ ID NO: 3254 - DNA, 356 bp, Zea mays
  Clone ID: TF_jC-zmX700098954b1
tctctggtacttcatctgacacaaggaccgcggggaccttaaggggatgcgcggcatcacagccaccggcagcgggtactggaaggccacaggcaagaacaaggagatcttccatggcaggagaaccagccgcgtgctcgtcagaaagaagaagacgctcagcttgtacacaggtcatgcaccgagcggaggcaagactatgtgggagatgcacgagtgccgccttgagggcagtctgtcgcccaacctgcaccgtggggacaaggacgaatgggctgattgtgaggttatcaacaaagactcggcggccaaggttggatagcaacaaatggtgcgcgccatacgctgattacgag

SEQ ID NO: 3255 - DNA, 440 bp, Zea mays
  Clone ID: TF_ZmC232_4
ccgtccgacgaaacccaatcctgcttcgatcccgtcggccggcgatggagggccggcggccgggcgcgcccgtggcgggcctgcccatcggcttccgcttccgccccaccgacgaggagctgctgctgcactacctccgccgcaaggcgctggcctgcccgctccccgccggcgtcatccccgacgccgacctcgcgcgcctccacccgtgggacctcctccccgccgccgcaccagggggatccggagccgacgccgacggggagcgcttcttcttccaccgcccggcgacgcagtgctggcgcaagggcggcggcgcggccagggcggccggcaccggcgtctggaggccgtccggcaaggagaccctcgtcctgtccccgcgctgcaagcgccccgtcggcaccaagcggacgctcgtattctgcccccgcccggcc

SEQ ID NO: 3256 - DNA, 1405 bp, Zea mays
  Clone ID: TF_ZmC566_1
ggaaacgcgtgaatcgatggccatgtaaagcggcggttccccgtgcccaatgcctcaggttcctattccatctcgaattcggagtcttctctcgtccctgtccccctccagcaccgccgccgccgccaccgcgccgcaacctcgccatggcacgccctccgtcggcggccctcaagccgccgtatccggccttccaatcccatcccagcgatctcgagctcgtcaacttctatctccgtccctgggtcgagaccggcgtcaagaccggcgcgttcatccacgacgcagacgtgtacgccgctgaccccaactacctcacccgtcagttcgcgccggcggtggcccaggacggcgagcgggcgtggtacttctacaccccgctgcgccacaagagcgtccacgggacgcggaagacgcgcaccgtggccaccggcggcgggtgctggcacaacgaggcgaaagctaggcccgtgtacatggtctccaacgggatgcaccagattgcgcatcgccagagcttctccttcgtcgagaaggatggcggcgtgcgggtccgcacgggttggctcatgatggagctccgcctcgtcgaggacggcgccgccgggcagaaaccggaggaggacggcgccctcgggagtcgcgtcctgtgcaaggtgtaccgcagcccgcgcaaccccgagccaagcggcatcgaagccgcgacggcgcccgggcagaaggcggaggcagacgacgatgaatcttgcgacgacgaatctagcgacgcgacgttggacgacgatgacagctccaacgcgtcactagcggcggcatcgggacccaagagggaatccgacgaggtggaatccagcgacgcgacggtggcggcacctagtcgccatagcgcgccgaacgacgagatctccggccggtccgcggtggcgcccggacgcaaggaaaagacggagatcggggaggtctccaccgagacgtccgcggcggtgcgcaagaggagaaaggccgacggcagcagctcccctggcactccggtttctacgacggatatgcactgccctcagtgcggcacccatctcatgctaacactgaacatggcggagtccaaatcggaaacggggctcgcgaaggacgagtcggccaccgccgcgcctgatcaaggcgggacgggtgagtcttcacagaaggatgttcgggttcggttccatcagttcctgtgagatccagggttccttcctgcccagacaaatcctgggaaacagagccatggtttcttgtctgttatttggaagaacgaaataagaagattttagattaagaattcgttagaagtaaccgtgtctattgctgcaacggtgatgtaatcgtgaaaccaagacataaggcgtacgaatttacacagtcatgc

SEQ ID NO: 3257 - DNA, 1058 bp, Zea mays
  unsure (1)..(1058): unsure at all n locations
  Clone ID: TF_ZmC151182_1
tttacatcgattcgcgcgaagcgggccggtcggccggcgaggaaagggtggtggtgcggcgcgaagcgttttggcccggtgctccagtaccttgcagtcggcgtgtgctacacggagtgtgtgaagccgccggcgcagctttctttggcacgagcacgaccgcacgaggcaagctcagcgaggtttgcttgacgtctaccagctgcataataacttgactcagaagaagaagatggacgctttcacacatgttcctcccggntttcgtttccaccctaccgacgaggaactcgntgattactaccttaggaaaaaggnagnactgaagaagatagatttggatgtgataaaagatgtggatttgnacaagattgagncttgggatctgcaagaaaagtgcaggattggaagcgaagagcagaacgagtggtacttcttcagccacaaggacaagaagtacccaaccggnactcgcaccaacagagcgacgacggncggtttttggaaggccacggggagagacaagncgatctacgtgaagaactgcctcgttagggatgaggaagacactggttttctacaaaggccgggcgcccaatggacagaagtcagactggatcatgcacgagtatcgcctggagaccaacaacaatggaattccacatgaggaaggatgggttgtatgcagggtgttcaggaagcgactcgcgactgtccaaagaatggtcggggactcgccttactggttcaatgaccacgcggggttcatggcgccggagctcggctcaccgaggcaggcggcgcaccaccagcagaacgtcatgatgtaccacaggcaacagagcagctacagctacccttgcaaggtggagctggagtaccaccacctccttccccaggagcacttcctgcagcagctccctcagctggagagccccaagctccctgaccttattggccaagtagacactactctccagccagcatgcggccttacacaggagcatggtgcccctcgctacaccctgcaggagcttcaggccgagcctctctatctg

SEQ ID NO: 3258 - DNA, 584 bp, Zea mays
  Clone ID: TF_LIB5117-066-A1-PF1-B2
attttctctcaacactccccttcgatccatccgttgccgattgagtccatatcatcatcatcagttccaaaagagggaaaaggaagtgatggagcacagcgagcaggagcagcacgccatggacctgccgccgggcttccgcttccaccccaccgacgaggagctcatcacgcactacctggccaagaaggtcgccgacgcccgcttcgccgccctcgccgtctccgtcgccgacctcaacaagtgcgagccctgggacctgccatcgctggctaggatgggggagaaggagtggtacttcttctgcctcaaggaccgcaagtacccgacggggctgaggaccaacagggccaccgagtccggctactggaaggccaccggcaaggacaaggacatcttcaggggcaaggccctcgtcggcatgaagaagacgctcgtcttctacaccggcagggcgcccaagggcgacaagtccggctgggtcatgcacgagtaccgcctcaacgccaagcttcacgccgccaggaccaggcgcggctccctctccggggggcaggccggcgtcggtccaccaaccagtgggt

SEQ ID NO: 3259 - DNA, 365 bp, Zea mays
  unsure (1)..(365): unsure at all n locations
  Clone ID: TF_LIB3245-008-P1-F12
ctcacctcccgtggcagcanccgnccaacaccggcaccgcagtccatattggggaccaanccacancnaanaaaanatccaatggtgatggcgccggctgcggcgcaacagcagcggcgccgcgacgcggatgcggagcttaacctgcccccgggcttccggttccacccgacggacgaggagctggtggcgcactacctcttcgcgcgcgcctcgggtcgcccccccccggtgtccatcatcgccgaggtcgacctctaccgctttgacccctgggacctgcccgagcgcgccctctttggccgccgcgagtggtacttcttcacgccgcgggaccgcaagtaccccaatggctcccgccccaa

SEQ ID NO: 3260 - DNA, 627 bp, Zea mays
  unsure (1)..(627): unsure at all n locations
  Clone ID: TF_LIB3061-086-Q1-K6-B4
cccacgcgtccgcccacgcgtccgcccacgcgtccggaaagagtggtacttcttctaccagaaggaccgcaagtacccgacggggctgagggcgaaccgggccaccgaggccggttactggaaggcgacgggcaaggacaaggaggtctacaacgccgcggaaggagtggcggtactggtcggcatgaagaagacgctcgtcttctacaggggcagggctcccaggggtgacaagacaaactgggtcatgcacgagtacaggctcgaagggcagcggcaggctccccgccggcctcgcgtccgcaaccggctcaaccgccgccaacgccgcggcggccttgaaagcttctgcttataaggatgagtgggtggtatngtcgtgtgttccacaagaccactgggatcaagaagaccaccactgctgcaccggcgtaccaggtggccatggccggcgctgagatggatcagaatcagaacaacatccccttccccatgccgatgcaattttccatgctgcccgacttctccttggacccggtgcccccctactacccgtaccccagcccatgagcttctaccaccagatgggcacggggactgcttgcgctggcgngcttcgatgtttct

SEQ ID NO: 3261 - DNA, 1366 bp, Zea mays
  Clone ID: TF_ZmC545_7
cggacgcgtgggcggacgcgtgggcaacaccactccactccctccatttccctcacctcccgcagcagctagccgccagccaacaaccgaaccaaccaaccaacccacaggccacagcgagcgagtaaagcgtccaatggtagcgatggcggccgtgcagcagcagcagcagcagcagcgccgcgacgcggaggcggagctcaacctgcccccgggcttccggttccacccgacggacgaggagctggtggcgcactacctctgcgcgcgcgccgcggggcgccgcccgccggtgtccatcatcgccgaggtcgacctgtaccgcttcgacccctgggacctgccggagcgcgccctcttcgggcgccgcgagtggtacttcttcacgccgcgggaccgcaagtaccccaacggctcccgccccaaccgcgccgccgggtcgggctactggaaggccacgggcgcggacaagcccgtggagcacgagggccggacggcggggatcaagaaggcgctcgtgttctaccacggcaagccgccgcgcggggtcaagacggagtggatcatgcacgagtaccgcctcgccgaagccggcggcgcccgcgccaagaagtccggcgccggcacgctcaggctggatgactgggtgctgtgccgcctgtacaacaagaagaacgagtgggagaagatgcagcagcagaaggagaaggagaagaaggcgatggagtcggaggcgtcgctctcgcactcccactccgacacgcggacgccggaatcggagatcgacgacgacccgttcccggagctgggctctctaccggcgttcgacgacatgggcgcagccccagcccctgccggcgtcgtcctgcccaaggaggaggtggaggacttcggcgacctcggcggcgacgactggctcgcgggcatcaacctcgacgacctgcagatgccgggggacgccgccgatttctacggctccatgctcgtctcgccgatggccgccaagatggagccggacggcggcttccccttcttctgagatccttcggcgactccggggacgaccggatgcagcgcaacgcaaactgtgtatagttcagattttcttcatggaaccaacaacaacaaaaaaagttcttgctaatatcttgttctagtggtgtagtgcagaagtagcagcaacatgattgaagttccattgtagtactgatgttcatcgccacttgagctgtgacaagtgacgacattctttcgtttcttggctgcaaattcttcgttgtccagaatataatttcagatgggtaatgccaattcgggacgtgttaacttgtttcttgcctctgaacatacaatagcttgttgtgct

SEQ ID NO: 3262 - DNA, 2668 bp, Zea mays
  Clone ID: TF_ZmC13043_1
gggaactggtgttccggaaggacccgggcctttcttatagccccagccactcccttcttcctcctctcacctctctcgaaactttccccaatcccatctcctgcccccctctcccaaccctatccacgccgccgccagccctgctcgggtggtgcgcatacatgaaccatccgtcctcgtcttcgtcctccgcccagccgccgccagccccggcggcggcggccgaggccacctccctcgcgccgggcttccgcttccaccccaccgacgaggagctcgtctcctactacctcaagcgcaaggtcctcggccgcccgctcaaggttgatgccatcgccgatgtggacctttacaagctcgagccctgggacctgcccgcccgctcccgcctccgctcccgcgactcccagtggtacttcttcagccgcctcgaccgcaagcacgccaaccgcgcccgcaccaaccgcgccacgtcgggagggtactggaagaccaccgggaaggacagggaggtgcgccatgggcccaggcttgtcgggatgaagaagacgctcgtattccacgcgggacgcgcccccaagggcgaacgcaccaactgggtcatgcacgaataccgcctcgagggcgacgacgccgcagggataccgcaggactcatttgtggtgtgccggatcttccagaaagctggaccaggtcctcagaatggcgcacagtatggagcgcctttcgttgaggaggaatgggaggaggatgacacagatgatggtttgcttccagtggagggtgttgctgctgctgaccctgaggttccccttgcttctgtggagatccctggtgctttggatagaggctatcttcaaatgagtgatctcattcagggtttggatgatcaaaatggaaatggtacacctagtttgccagtttctgatacttcaaataatagcaaccattctgaagacgtagatggaaattctggggacattttaagtgacccaaaccttggctctaattttcttcagtgtgttgaacctggggagcaaaatagcttaatgcttaatggaactatcatatctaatgcaaatgctggagatttttttgataattccagccacagtgatgggtttctagagctgaaggattttgcagatgctgcaaatctggatttccctttgggcaatggatcatccatctggcctttggatggttgggcatggaaaacacctgactcagcggaatctgtaaatggagctaatgatgagattcctccacttcctgatgaccagactttccagccagatgagctggaacaactgttacagtcaatacaagaagattcccatttaggctcaagtatcattgaccccccgcattcttctatgacaaattcagttctgcctgatgaggattgtttgatgttctatgatgcaccgttcgattccaccatgtgtgatgatgggtttgcacagaatgggatccttggctctgcagcaaccaatctatctggtattggcatggtggacgatggtatgccatactttgatgcaatggatggtaatttatttaatgacattctgggctccatacagcagccagatggtagcagttcccatgcttttaatggcccagtccttacccaagaggtcaacaataccatgtttacatatagtccaactcaaaaggttttagaacctaatattctagttggcgccccgtcgtctgctaggttacctgaagctggtagtcagttaaattgtgttgttttaccagatggtcaggctaagagtagtactattggaaagggatttgtaaggattttggattcaatctccgctcccccagcttttgctggagagttcccagctatccaccgcaaatctttggctcatatttctggggggcgccccaacacactccatgtttctgctgaagtgatccgcgtaggaagtttagctgttccttctggcgcagataagtgggcgctgcaaaaggatcaaggcatggagctggtcttttctgcagattttgagcctgatgcccgtatacattgtggctgcaacaccattaccgcggtgctgcgtggtggcttctgccttttctttgtttcagcaataatgctcttagtgagctacgaggtgggcatgtgcatctatggcaagtagcagcctggtactggtttaagataaatctcacagcatttaggttaatcctatgttttgaggcagactcaactggggggggcctcctgctagcttttaagtgtgccgcattgcatggcatggacctgtggggtgtttagcactagcagtaccattttgcagctcgagagctaatggtgtatgtatgaattcagtgctatttagaaatactatgagaattgcctcattggcgtgtgatgatgccatttgccatgcttgtggtcgcagtggtcaatgttagtgcaaaatattgtatatatatttgagatccaccataggaatcatgatgcttgtgcagtacagttgtgttggtgttttgagtgtttgcaggtttcaaaatgaatgttaatcgtgttgcaagccatggtgatcaagatgcttgcctggaaatcctgttaattcagatttgcaattcttttgcaaaaaaaaaaaaaaaaaaaaaaaaaaaaagaaaaaaaaaaaaaaaaaaatga

SEQ ID NO: 3263 - DNA, 1726 bp, Zea mays
  unsure (1)..(1726): unsure at all n locations
  Clone ID: TF_ZmC24820_1
gcgatcgagtcgtgcagcggctgcttgcgttcgtgcatttttcgtacaggaccgcgcgcgccgcgggtttgagaggagcgcgtgcacacgtacgatacgagcatggcagactaccacaggatccacccagtgagcgcgggctcgccgccgccgccgtccgcgccgccggagcaggcgtcgaggagcggcaagaaacccagccacgaccagctgccggtgacagcccctgccccggcgccgccgcccccgcccccgcccccgccgtcgcggcgcaagcgcagccgctgctgccggtgcgtgtgctacaccgtcctcgccctcgttttgctcgccgttgcgctgggcgccaccgcggggatcctgtacctggtgttccggcccaagatcccgacgttccacgtggaccgcctgacggtgacccgcttcgacgtgaacggcacgtcggccacggtgaccgacgcgttcgacgtggacgtgacggccgacaacccgaaccgccgcatcgggatctactacgacggcggcgacgtgacggcgtccttcaacggcaccgtgctgtgcagcggcgccttcccggcgctgtaccagggccaccgcaccaccgtgcacccgcgcatctcgctcgcgggggagacgcggctcgacagcgccgtcgcggcgcagctgctgcagcagcgggcggccgggttcgtgccgctcaccgtgcgggcccgcgtgcccatccgcatcaagttcggcgccgtcaggctgtggacgatgacgggcaaggcaaactgcaacctggtggtggacaatatccaggcaggcacgcagctgagcatccgctccaattcctgcacttttaagcttaagatctagatgcgccttcctttgtcggccatgcatggttgttgcctccaatgactacggctacgggggtggtagtggtagaggtgtacagtacattcttttcggcacctgtatccatagcttaattgatggctgtaataaataacatccgatatgcatactattttgctatgagattatttattatataataaatattatttatataataaagcatgattttttaggccaaaaaaaaaaaaaaaaaagtcgtttcccactaccttaagggcaagatcaccggcaggatcaactccttgttcgaggtgattcctgagatcgacgtttgcaagtgctagccttggtacctcccggataagtccctgattcggtccgactatcccgagtggttctttttttccccctaggatcgtaagtaccctaatggtagctggtcttacaggtccaccgttgcttgttactgcaatgcttctgttcatgattttattatcaagttcaagggtgacttgcgtattcagtgttctattggtatgaattttacctttcttttccacctttgtctttcctcnnnnnnnnnnnnnnnnnnnnnnnnnnnnnnnnnnnnnnnnnnnnnnnnnnnnnnnnnnnnnnnnnnnnnnnnnnnnnnnnnnnnnnnnnnnnnnnnnnnnnnnnnnnnnnnnnnnnnnnnnnnnnnnnnnnnnnnnnnnnnnnnnnnnnnnnnnnnnnnnnnnnnnnnnnnnnnnnnnnnnnnnnnnnnnnnnnnnnnnnnnnnnnnnnnnnnnnnnnnnnnnnnnnnnnnnnnnnnnnnnnnnnnnnnnnnnnnnnnnnnnnnnnnnnnnnnnnnnnnnnnnnnnnnnnnnnnnnnnnnnnnnnnnnn

SEQ ID NO: 3264 - DNA, 955 bp, Zea mays
  Clone ID: TF_ZmC58420_1
cccacgcgtccgaaacccatatccctccggcataaacccaaaaagctgcaagcagtgtgaccaaaagcaggcctgacggcgatcctcggctcactatccaggcaggagatggagcacgacgtgctaccatcaccaccagcagcagcaggaggacgaggaggaggccatggagctgccgccggggttccgcttccaccccaccgacgaggagctcatcacgcactacctcgccaggaaggccgccgacccgcgcttcgccccgcgcgccgtcggcgaggccgacctcaacaagtgcgagccgtgggacctgccatctcgggcgacgatgggcgacaaggagtggtacttcttctgcgtcaaggaccgcaagtacccgacggggctgaaggcgaaccgggccacggagtccggctactggaaggcgacggggaaggacagggagatcttcaggggcaaggccctcgtcggcatgaagaagacgctcgtcttctacacggggagggccccgaggggaggcaagaccggctgggtcatgcacgagtaccgcctccaaggcaagcacgccgccgcctccagcagtagcagcctcgtcccgtcgtcggtcagctgtggcgcgtcgtcgcagcaggacgagtgggtgctgtgcagggtgttcaagaagagcatcgagccgccatccgtgcccggcagcaagaggtcatcgtcggttgcgtgcatggggacggagggcacgggagtgggagtggggccgtcgtccatgtccacagaggacgacttcgccgcgtgcgccgcgttgcctccgctgatggacgtgtccggcggcagcggcgccaacatgtcgctttcagcagcggcggcggcggcgttcatcgaggtgacgccacctgcaggtgcagcaccggcaccacacgtgacctgcttctccacgcgccgctggagggccagtttctgaacc

SEQ ID NO: 3265 - DNA, 1390 bp, Zea mays
  Clone ID: TF_ZmC1367_1
cgtttctcctggctactacctctcgctccctccggctccgatccagggtgcgagctgagcttgggctagtttagtctccccaagctcgtggcgcagcagcagactcgttggtggaggtggattagtagccaaggctttgcagctaggtagggttttgtagctagttcctcgcaggctcagctctctcatactagctagcgtcggtcagtcgggcgagcaggccaatggtcatggcgaacccggacatgctgccgccggggttccgtttccacccgacggacgaggagctgatcctccactacctccgcaaccgcgccgccaacgcgccgtgcccggtcgccatcatcgccgacgtcgacatctacaagttcgatccatgggacctgccatccagggctgcgtacggggacaaggagtggtacttcttcagcccccgcgaccgcaagtacccgaacgggatccggccgaaccgcgcggcggggtccggctactggaaggccaccgggaccgacaagcccatccacagcagcaccaccgccggcgagagcgtcggcgtcaagaaggcgctcgtcttctacgagggccggccgcccaagggcaccaagaccaactggatcatgcacgagtaccgcctcgccgccgacgcgcaggcagcgcacgcctaccgccccatgaagttccgcaacgcctccatgaggctggacgactgggtgctgtgccggatctacaagaaggccagctgccaggtgccggcgatggcggcggtgccgcagctctccgaccacgaccaggacgagcactgcggcttcgacgacaacccgtacgccgccatgctcctgcagggcgcgtcgtactcgtacccggcgccgccgcatgccgcggccggcgcgcagaggatgccccggatcccgtccctcacggagctgttcaacgacccctcgctggcgcacttcttcgaggagggcggcggcatgcaggacatggcgcggctcagcaacccgcagcagcagcagcagcacgctcctctcctcggccgcgccgtcacgagccaacagctgctgctcaacaacggccacagcatgcccggcggggggcaggcgcagatggatcctcatccgcctgctgctgccgcctcgacgtcgtcggccgccgctggcaacaacaagcgcaagagatcgagcactactactgatgccggtgcgctgtcgtcgagccaggcgtctgaggccaagaaaccgaacgggtcctgtttcggcgcaacgttccaaataggcaacggactgcaggggccctccctgggccaccaccacatgccgcttcactctaacatgggcacgatgaactgacagattattgctgttgttctccgctgaaagctatacttgagagc

SEQ ID NO: 3266 - DNA, 634 bp, Zea mays
  Clone ID: TF_ZmC13898_3
atcaaaatctctctcgggcgctcgctcgctctcctggctccagctagactgtcctgctctgcttcggtgctactcagtgtgcagtgtgcacaggcagccatgcttcagcagagtccggctcggctgtcggctgcgagtcctgctcctgcaggaatggacaggcctgcgcaggcgcccacgcagctgccgccggggttccggttccaccctaccgacgaggagctggtcgtgctgtacctccgccggaaggccctggctcgcccgctgccggccgccgtcatccccgtcgtccacgacgtcgccaggctcgatccgtgggacgtcactggggcgagcgaaggggagggctacttcttcagcctgcggcgagcgccggcgaccggccgcaggaggagggctgagagcgggtactggaaggccacggggaaggagaagccggggtttctgcagagcggcggcgttggcggcgagcacaggcagctgctcgtgggcgtcaagacggagctctgcttccaccgacgcgaggcgccggcgtcgtcacggacaggctggatcatgcacgagtaccggctcgacgtgccccgcggcgtggctgaccagaggaagaaaatgtgagacatggctactgtgtgaa

SEQ ID NO: 3267 - DNA, 390 bp, Zea mays
  unsure (1)..(390): unsure at all n locations
  Clone ID: TF_LIB3060-026-Q1-K1-A3
attccgggctacggcgtacgctcgagctctaccgctacgacccatgggagctcccatcaatggccgcgattggggagaaggaggggtagttctacgtgccgagggaccgcaagtaccgcaacggcgacaggcccaaccgggtgacggcgtcgggctactggaaggccacgggcgccgaccgcaccatcaaggcggacaacagccgncccatcgggctcaagaagacgctcgtcttctactccggcaaggcgcccaagggcgtncgcagcagctggatcatgaacgagtaccgcctcccgcccgacgacaccgaccgttaccacaagaccgaaatatccttttgccgcgtgtacaagcgcaccggtatcgacaacggcggccacgggcatc

SEQ ID NO: 3268 - DNA, 2742 bp, Zea mays
  unsure (1)..(2742): unsure at all n locations
  Clone ID: TF_ZmC2195_3
ttcatggatgtaaggcccaatgctgggttacacaaccagcttgctagattatttattgtacttcgtattgttggatggaatgcgtttaagctgaagtcttcagtggtagaattttccgatgagagattggatgaaccgagtatccgtttgtgcatatatggtcacatcttagnnnnnnnttgccagtaaatgtgagctccatttctgcctgtttgcagaagatttgacctgaactcgtacaagtttgcgatgcaagcaaagttgtgtctagtgccctcggcgggtaaggtaccagctagcgtttagtgtcatgaagccacacccacggtatcaaatggattactggagtgcttacaaactcttagacagcagaaatcaaatggattgctggagtacaattctgtagtttagcgagagatcatcttcacttgttcnnnggccgccttttataatttttttttctttcaatgcagtggccgctccactatgtagtgtactgtacaaacatggttcagatttacaaagctaaggatagtagtaacagtctgaagctacatcttttttgttcatacgaccaacccttttcccactttttttctttttcgattttcgataggcacccgttggtagcaactagacgatcaaaagaagagagaaaaaaaattaatatgtacagcaccacaaaaaaaaagtggagataactgggaatcagtggtcgcaaaaatgtatttccagtaatcccagtgagataagctgaggaactcgatttctattccatttccaatgcaagcaaagctagcgaactactccaaggacgaagccaatgctgccactgaccactagagctacaatcaagcatgctgatgttccatgattcaaattcataggttggcattggagcggtgataatgcagcactagagcagcaactccaaccacaaaaagggcaacaaatatgtatgccctgaatccagctgatgaacatcttttgaagccctcgagataaccttggttgctgtgggcttcatgattggctgcatcagactgcttggcagaaatgacattgtttgcatttttcttctggtgctcaacatcagtcctgagatcaagacgacgaccactgttatctgtaaacttcatagtctggttgatagattctgaattactcgtaaccatcctcttaattccaacctgcattttaatcttgccagctgctagtgaaatgttagcgggaggcgcagttgctctgcgccttcgtattgtaattccggtgtcaatattttcatttgacatatccatcttgttattttcatgatctaactgcaattcggcattcggagtttcattctcaaagttgtttggaagaacatatgaaccaatccccatcatgtagtttgtctgattgttattaccttcctggccagtttgttccaaaaatatgctatcattgaactggtcagtaccaggatacaacatactgtaaagatcctcgggaagatcatctgtgaataggtagtctgtggcatctgttccatcctggatagggctagcatggcctggtctgatattcggagccatggaaccaggattctgcaaatttgatgattcagcatattgttcagtcggacacacgtcagcagaaccagtatcagctacaaggttaaatggaggtgaaggatccaacagttcttgcagccatgtttccagttcattaccaccatttggagttgttgaatcaggagtgatagctgcaggagtgatagctgcctgagcaacatcattagatagttcagcactgccaattggtgtagttgcatggttcgattcttctggacagatgactgaggcagcaacatcttctggctttacagtgctgacaactgatgtagcagcatctggttgttccagatgagagctcctgttgcccacctcattatcattatctaatgaccagtcatttcttttagtaacacggcagaggacaaaggcatccttcatatcagggctgactttacatccattctcgtcaatgtagtactcatgcataatccactcagtgcgtctgccagagggaggtcggccttcatgaaaaactaacgtcttttttgttcctagagttagcttgttcagctttatggctcggtccttcccagttgatttccagtaaccagctagtgttgccctgtttgacctagagccagtagggtacttcctgtcacgagaggcaaagaaatgccacttgttgtccttgattggaagattgcactttgcaggtaaatcccatggttcatgcttgtatatatccacctctggtataagatcatattcaattttctgaccaagtattttcctcttgagatagtgagaaacaagttctatatccgaaggatggaatccaaatcctggtggcaggtgcatatcacgcagtacttccattttacaatgtctctccggagcccaggtgcccgcacggccgatcgcgcccgaccggcgccccgcgtaaccaccaggacggcgccgccgtgcggggaagaggagcctggagggggcacagcgaagagctcgagggcggtgttcggcccagcggacgagtcaaggctgggagtggcggcactgggtgggggaagcgtcagaggtagggtggtgacgagcgagtagcaggggagggcgattgggcgagatggacgaagcagccaggaagctgtgggtgcactgcttcccgccggccggcctcgagtacccc

SEQ ID NO: 3269 - DNA, 1807 bp, Zea mays
  Clone ID: TF_ZmC24893_1
ccttcctcctcttctcttcctctcgatctcgtttctctccaggctcggacggcacagcgcgcggcggcgtggatcccgtctccctctcctcgatccagccctctgaaccacatgcatgtgatcatgcacgggctggtatggtaaagggcgcgccgtgctgctagactcgtatgggctcttggcagcaaggagagctgcagggagcagccatggatggtgcagcggcggcggcgactggaagcggcggcggccaccgcgtcgtgggctcgaggaacgaggagcacgggaagtacctgtcggagtcgagctgctgcccacggtgcggacacaagctcgacccgaagctggactggctggggctgccggcgggggtcaagttcgacccgacggatcaggagctgattgagcacctgcaggccaaggtctggcctgcctcggcagcggcgccgtcgcaccctctgatcgacgagttcatacccaccattgaaggggaggacggcatatgctacacccatcctgagaggctgccaggtttgacgaaggacggcctgagcaggcacttcttccaccggccatccaaggcttacactaccggcactcgcaagcgccgtaagatccagccgcccgtagccgatgcctcatcatcctccgccctgcccgcgcagcagcagcatcagcagcagcagcggagcgagacgcggtggcacaagaccggcaagacgcggccggtggtcgtcgccgggcggcagcgcgggtgcaagaagatcctggtgctctacacgaacttcggcaagaaccgcaagcccgacaagaccaactgggtgatgcaccagtaccacctcggcgacaaagaggaggagcgcgagggcgagctcgtcgtgtccaagatcttctaccagacgcagccgaggcagtgtggcgtcgcggcggagcctgccgccacagccgcctcctctgacacggtggaggaggctgctgacccgccggcgccggagggcttggtagtgccgccaccaccagatgtagccggtgccttccaaggcgccgctggcattgatgagttcagctttgcgcagttcaggagcagcttcgaggaggtggacgtcggagcatcagttcaggtttcgatgagggacgaggaggaaatgcatgcagcgcatctcaaccttcaccaggatcataatcttcaccgcaatcaatttggcaaccaagagcacaggcgccgcatggctgcaactgctgcagcattccacatcaacacaccagtagagcctatcaccacgatgatcacctcctcgccggtggttcacggttctgccatacttcaacatccagaggcatatggccatggcagctcgacttattgtcatcatcagcaccagatggaggaggatgagcagctacaccaacaacctcaaaattttgatgggcgacggtcgacttctgggctcgaagaggttattatgggatgtagttcgaggaggtccaaaagagcggaagcatctggcccaggtggaaacaaggagagcagaggatggcagtacccatccttctggccatctggcagccaacaggatcatcatgggtagaagagcagcaacacatccctgcctggcactgtatgtgccgcaccacctttgcatgaagccaaccttggagagggcaaccgaaagcagagagacacctgacatcatcattactagctaccatgataagatcatcatataaacctagctacactgtcgtacctaccatatctaggcttacaatactttagcgtgagtgcagtcgcttccaagaagcaaac

SEQ ID NO: 3270 - DNA, 757 bp, Zea mays
  Clone ID: TF_LIB5115-005-B2-PF1-D6
acacagggtgcaaaacgttagccaaatggtaggaagggaaaccctacaaagtaaccaaccaagagagctaagactacgagtctgcaacttaaagctgcttcttccttctctgagattttgtgctagcttttctccaaatttagttagtctttgataagagcagagccagtgcttagtgacccaccttgtttggccccaaagaaatatatggtagtcccacactgagtggaagaaagggttcgttttagctccagtaatcagcagaaaccagaatcttttagctacttcctaccgagtgaagtttgaccatacagattaaccgttaggttttgtagctggtaacttcttgtaactagaagcaggtgagcactgcttgagatatacagcatctaaccagtagtttgttgtactgtgtaaacatatggatgccatcagaagtgatgacatagagaagcaagatgaagttatgttacctggattcaggtttcatccaacagatgaagagcttgtcaggttttaccttaaaagaaaaatccagcagaagtctctccccattgagctcatcaggcagctagacatctacaaatatgatccatgggatctcccaaaactggcgagtactggagagaaggaatggtatttctactgtccaagggataggaagtatcggaacagcacaagaccaaacagggtaactggagcaggcttctggaaggctactggaactgacaggccaatctactcttctgatgggagc

SEQ ID NO: 3271 - DNA, 1390 bp, Zea mays
  Clone ID: TF_ZmC345_1
gtctgttcttctcctctccctctcatcctggcgtttgtaccgagagtacgactgactgggtgaagggtggtgcctagctgatcgcctgatccatctcgtccgcccggggcccaagcagggttacaagagttactagggatcctctgatcgaaaggatggacactttctctcatgtcccccctggattccgtttccaccccaccgacgaggagctggtcgattactacctgaggaacaaggtggcgtccaacaagatcgaccttgacgtcataaaagacgtcgatctgtacaaaattgagccctgggatctccaagagaagtgcaagatcgggacggaggagcagaacgagtggtacttcttcagccacaaggacaagaagtacccgacgggcacccgcacaaaccgggcgaccaccgccggattctggaaggcgacgggtcgcgacaagcccatctacaccaagagctgcctcgtcggcatgaggaagacgctcgtcttctacaggggccgcgcgcccaacggccacaagtccgactggatcatgcacgagtaccgcctagagaccaccgagaacgtgaccgccgcccctgaggaaggatgggtggtctgcagggtgttcatcaagaagcgagtggaggccgtgcggcggatggccgacggcgcgccgccgtggttcgatggccacgtccccggcggcttcatggcgcccgcgggccttggctcgccgaggcagctgatgcatcaccacccaaacccggcagcagcagcgccactgctgtacagcggccagcagctctaccactgcaagcccgagctggagtaccatcaccttctgcagccgagccaagaggccctgttgcagcagctccctcagttggtggagagccccaagcctcctcctcccgccttcatcgaccaaggcagctgcagcctccagtcccccgacgaggcttctgggtacaacaccaccccgcagcaaccgccgcccatgacgacggaggccgcctacatggacgacgactcggtcaccgactggagagtgctcgacaagttcgtcgcgtctcagctcttcagccacggcgacggcatggcgaaagaggatggttaccccaacccggggcaggcattatttcaggctgagaacaagcagccggaagaagcactggactacgcctccacgtctgcgtctggtggcggcggcggcgaggcgaacatgtggaaatagcgtatgccgtatacaattcatctgcgagtttaccatatatatgcctcccaaacctgatttagtgtacaaatatatagcgtgcaatataatgcttgtcatgctgacacatgataatatacacatgcatgcatgataataaacacgtaaccgaagtggttattttt

SEQ ID NO: 3272 - DNA, 617 bp, Zea mays
  Clone ID: TF_ZmC58420_2
ccccctcggagtaacaactccactcccgcggaaaaaaaacccatatccctccggcataaacccaaaaagctgcaagcagtgtgaccaaaagcaggcctgacggcgatcctcggctctctagccaggcagcaggagatggagcacgacgtgcaccaccagcaccagcaggccatggagctgccgccggggttccgattccaccccaccgacgaggagctcatcacgcactacctcgccaggaaggccgccgacgcccgcttcgccccgcgcgccgtcggcgaggccgacctcaacaagtgcgagccatgggacctgccatcccgggcgacgatgggcgagaaggagtggtacttcttctgcgtcaagtaccgcaagtacccgacggggctgaggacgaaccgggccaccgagtccggatactggaaggcgacgggcaaggacagggagatcttcaggagcaaggccctcgtcggcatgaagaagacgctcgtcttctacacggggagggcgcccaggggaggcaagaccggctgggtcatgcacgagtaccgcctccacggcaagcacgccagcagcagccgcctcatgccgtcgtcggtcagagctggcgcgtcaaa

SEQ ID NO: 3273 - DNA, 791 bp, Zea mays
  Clone ID: TF_ZmC218_42
tctgacagtggttgatcaagaccctcaatcggaagctcacggtcagtaattgcatgctcctccattgtagatggtgggctgttggtgttaggaacaggattagcggctgcacccgcaatcactctctcatcgtcgtcatccaaccaatcctcctctcgaaagggagcaccgtactgttcgccgttctttggcccggccccgctcttctggaacagcttataaagcgcgtagaactcccgaccctgcgcagcaggcgggagcgcatcggcaagtagggtatactcgtgcatgacccagtccgtacgctccccgcgcggggcgcggccatggtggtacaccagcgtcttcttgttgccaaccgcccggccgccgccgcagatgaagcggtccttccccgtggccttccagtagccgtcgccagtggtgcggctggcgcgcgagccgttggggtacttgcggtccatccggctgaagaagaaccactgcctgtcccccgtctgcagcgccgacctctcggggaggtgggaggggtgtgacttgtacacttcgacgtcggcgacgtagggacaggggcggccggaggcgatccggcgcttcaggaagtagagaacaagctcctcgtcggtggggctgaagcggaagcctggcggccaccggccccgcggcggggtctccatctcgctctcgccggatggttggtgctggtggcgtgtcgtctgccgggtcaacccgatgctccggctacttatgctaaagacatctcaaggggctgccggttctgccccggccgg

SEQ ID NO: 3274 - DNA, 2870 bp, Zea mays
  unsure (1)..(2870): unsure at all n locations
  Clone ID: TF_ZmC151_3
ngattcaaaaaaaaaaaaaaaaaaaaaaaaaaaacataaaaaacctcgaggccggccggggccgggattcctcacacccacacaaaccgcacctcatccctgttgacccgacggtggcgctcatctcctccccgacggtggcgctcatcttccccccgacggttctccccatcgacctgctggcttcccttcgtcttccccgacactgatcctcaccactcatgtctgctgaagttgccggaggaaacccttatttcctctcatgctacttctggttcatatactgcataaaattccgagatttcacttgatacaagtggaacactaggagttttgtgcaaatacttcctaccatgtgaatcagttgtagctggtgaatttggcaagactcaagtcctctcatctgggttcagaaaacatctgtcggttgattgcttggtctcctgtttcctttgagtcttgccaaccaaagttttctctcagcatcagttgtggtctacgaactctttctgtgacttgaccaacatctcttttggtcctgtcaatcttgcaacactcccttccaaagacttgtctagaggctggattgccctgctctctgctggcgctgcatcctcctttagtcttccaagttttctcttggcagcagttgtgatctacgaactctttctgtgacttgaccaacatctcttttggtcctgtcaatcttgcaacactcccttctaaagacttgtctagaggttggattgccctgctctctgctggcgctgcagcctcctttagtcttcccttgctgcattctgtgctcactttcgaaagctgctctgttctgctctgctttattgatttgtgcacttggattctcttgtcttaatcaagcttctctcttctgggtccccttttgtcttgagatccttcatcagtgctaaaggcaaaagaggtcttagggcgatggcgcaaactagcctgcctcctggacttcgtttctgatttgagattgtttcctactatttgaagaggaatatgggaaagaagcttattgtagacgctatatcagaggttgatctctacaagtttcctccctgggatctccctgaaaagtcctctcttcgaagcaaagatcttgaatggttcttcttttgtccttgtgacaagaagtaccctaatgggtctaggacaaaccgtgccacaccaaatggttactggaagactagtggaaaggatagaataattatgcttaactctcgcactgttggaatgaagaaaacattgatatttcatgaaggcaagccccctaagggtgatagaactgattgggtgatgtatgaatacaaaatggaagatgaatatttggtttctactggtttctcaaaggatacttatgtactctgcaaaattttcaagaaaagtggccttggtccaaggattggggagcaatatggggctccgtttgacgaagccgaatgggacaatgcagaagctgaaacctctatatttcctttgatgacctcttcagaagtagtgaacccaacagagggaccacacactcagcctgttgcccctgctggtgctcttcaggaacctctacataattcatctgctacttgtgttgtagagggatcgccatttgatcatgccactgcaaatacttgtgctgagggtgtaacatttggctatactgttgctagctctgctattgaagatatgcctgctcagctgtcaggagatggtgtggtttctatgaacaacatatccagtgaggtcaatgatatgtacagtcctcatgactgtgatgaatttctattggaggagatgtctagattcctgaatgatcctccaatgcgtaacactccttatggagagtgctctggtcttcctccaatgtctgaagctgaggctcatgcttttgaagtcaactcttttgacctctacaaagaattatcagggcttattgagttaggaggcatggacaataacttcaacaccagcaatgtggaaaccacagattaccttgtgctgccacctgacagagaattgtccactgatggttacatggaacttaatgatctccttgcttctgattcaagcttccccatcccagtgaatttcctgctcaggacaatcaatctatgcagtatcctctggctgagtacaatgtgcattatgatgtcgctactctgtcaggtcctttggaaccaacaatgcctagcattttcgacgattttcctcccaataatggaccccatgtcacagatgaggaagacgactacttggacccgaccatccctttcccgtgattggtcgaataatatgcctgcccttttttgtgtccttacatgtttggactgttccgatgttgcaacttgcagttctttgctactacaactctatccaccttggatgtcgcgatattgttgatgcaatgcctgggctcatgtcagctgagagctgaccttggcagcttggctgtctgctgaccttggctggaagcacggtttttggatgaatctgcatcgactaccacatgcaagttccaactggttgagctgaccgcctatcttgtatcgctctgctcaatatcggtaggacttggcatgtaaatctttgattatgtctatgctgagtatcaataagacttggcgtgtaagtctttgattatgatattacctgtctgtattgcaacctgcatgattgccaccattttaagcaatttgtcatttgtgtattcacaatatgcaaaccattattattgttgtaatgtgatattgaatgtttaatactatattttaccctgaaaaaaaaaaaaaaaaaaaaaaaaaaaaaaaaaaaaaaaaaaaaaaaaaaaaaaaaaaaaaaaaaaaaaaaaaaaa

SEQ ID NO: 3275 - DNA, 1346 bp, Zea mays
  Clone ID: TF_ZmC1229_1
gcgccgcgcggggagaagaccggatgggtcatgcacgagttccgcctcgagggcaggcttccccagccgctcccgcgctccgccaaggtccggccctcgtgtacttactcgttccgtcgttcggcgttgcaagcaagtctcctgcccttaatttccggccggtgggcgtgggctaacaagtcccctctcttctttttcttgccgccttgtcctttttgttgcgtgcggtgcaggacgagtgggccgtgtgcaaggtgttcaacaaggagctgcaggcggcgaggagcgagccattattggcggcggccggcgcggcggagctcgagcgcgtgggctcgctgggcttcctcaacgagctcctcgactccgcggagctgccggccctcgtcggagccgacgtggacgaggtgatcgacttcaagggccccgcccccgcgtccgttccggacgcgagctacctcccggtcaagatggaggagcacgcgctgctgcagatgcagcagtgccagtaccagccgccgcccccgatgttctacccgagccagtacttctctcttccggcgatgaactccggccacctccccccggcgatccggaggtactgcaaggcggagcagcaggtggtctcggcgcagacggcgtcggtgatcagcccgtcccgcgagaccgggctcagcaccgaccccaacgcggcgggcggctacgcggagatctcgtcggcggcgaccccgtcgtcgtcgcaccagttcctgcccgagctcgacgacccggccctcaacctcgccgacctctggaagtactgaagcctgggcgacgatcgaccggtggctgggccgcccacccgccccggtcacgtggtctggttggttaatttgcttgatttgattgattatcttggtctcttgtgggatctggggttggtgaccggttcgctgatgcgtcctcgttcgtcacctccgccaggtccggcctctactgacctcgggtctgactagattattatccgtccagaccgccaggggattagggcttccttgttaattaattaatcctaggttcctttgtattggtctctgtacatagtactggtaccctactctgattgtgtcattagcagtagcatgattactgataggattaatgaaatgggggtagattaagggggcctgcatctgcgtcagcaatgcagtgcatggtggggggttttacgggttgattagttaatttgggcgcttggtgagccagctagcgctagcttcatatgtacatgtactgccattaattgctgcttgagctcgacataccattatgtgaatttgatgcttcagttaagctctcgtttaaag

SEQ ID NO: 3276 - DNA, 1744 bp, Zea mays
  Clone ID: TF_UC-ZMFLMO17336E02_FLI
gcgcaaatgaaagcgctcccctcgattgggcggcacgtaacccatcaccaccaccaccaacccggacccgtcaagcgctgcgtcgtcccgtgcaaagaccgcgcattccgtgcgtgccgtgtccacgcgcgcgcgcgcggtggcgttaagttgtcgagcgccagaggagcgccactagtcgtcgatcgatttgacccaggcgaggaggcgtaggcgcgtaggggagtgagtctagctagctactggtgttgggtccattattcgctagcttccgacgatggaggtgaagaaggaggccacgaaggcgacgctgccgccggggttcaggttccggccgacggacgaggagctgatcgtgcactacctgcggcggcgcgcgctggcctcgccgctgccggccgccgtcgacatcccggacgtccgcatcctggcgcacgacccgtccgacctgctgcccccaggtgagtgagtgagcgagtgagtcggcactcgagggatccatcccatctccatctcagactggggctgattggttttgttgctggattggggggcggtggtgccgtggtggtggcagggttcggcgagcaggagcgctacttcttcacgtgcaaggaggccaagtacgtgaagggccggcgcgcgaaccgcgccacgggggccgggtactggaaggcgacgggcaaggagaagccggtggccgtggcggtccaccggggcgtgcagggccagagccagggccaggccgtgctggtgggcatgaagcgctcgctggtgttctaccgcgggaagccgccgacggggagcaagacggagtgggtgatgcacgagtaccggctggcgggcgccgggctcgcgccgtgccgccgccgccacgccgacgccgatgccgacgccgacgccgtggcgcgggcgccggccgagggctgggtgctgtgccgcgtgttccggaagaagggctccgccgccgccgccgccgttgcgaggcggcccggcgaccgcagcgacggcgagggcgacgagagcgcgggcggcggcggcgggcgcgggttcatcgacttcttcgcgcgcgcggacgccgccgggcgaaggcgccgcgcgccgtcgcccgccgtgtcgagccggtggcttgcggacgcgtcgccccagccggagcaggaggccaccagcagaggcccgtgacgagtcaagggccggccggctggctggcgtgaagcgatcaagcaaggtaaggtagagagagagagggaagcttttgctgcattggcagtggccaatgagggtccagtacagtaggtgcaggtaggagcaaagtgaattcgttttagcaacgcgagagagagagaggcccgatagtcagtcagtcagtcaaccagtgcagtatcagttgttgagcgtagatggtgaaactaatgtagcagctcagttgtactcctcccgaccacctgatgaatcctacacaattgtagagtggctgcagcaaaatcacggccatggcaccggagctcctccaaggaacgcaagtccaccagctgctgctgctgctggccatggcggtcgcgcggattgctagtgctaatgttccacaggctgttgattgctgagaagcaagtagcggtggtggtggcgggcagcagacggaagatggcgggtgtctgatactggtggtggtggtagtagtcgtgcgtaatctgttgcctggacttggacttggtttctttaatgcaattatgatgatgaagtg

SEQ ID NO: 3277 - DNA, 478 bp, Zea mays
  Clone ID: TF_LIB3960-012-Q1-N6-H1
gcgccgtgcccggcccccgtcatcgccgaggtcgacatctacaagttcgacccatgggacctgccagccaaggcggttttcggggaggcggagtggtacttcttcagcccgagggaccgcaagtaccccaacggcgtgcgccccaaccgcgccgccgggtcaggctactggaaggccaccggcaccgacaagcccatcacgctctcctcctcctcctccgccgccgccgccgccggcatgatcggcgtgaagaaggcgctcgtcttctacagggggaggccgcccaagggcgtcaagacgagctggatcatgcacgagtaccgcctcgccgaggcgctccacgccgtcgtcaacgcctacagacccacgcggttcaagaacaacgcctcgtcgtccatgaggctggacgactgggtgctgtgcaggatctacaagaagaccaccccgcagctggcgtacagcatgtccgccgccgccg

SEQ ID NO: 3278 - DNA, 454 bp, Zea mays
  Clone ID: TF_cC-zmpo148030h05a1
cttaaccctttgaatgtcttaacgtccattattttataacatttctattgaccaatcgcttattgtttataggtattttttaaatttagaatctgcgcatatcaatacataaaaccctattcgatctctttcttctccaatctaagttgcagaaccatggccaaaactctctactgcaattttttttgatcttttcttttactttttctcttcgtaatcgctggttcgagaaatggagaatcccgtgggtttaagattcccgccgaccgacaaggacatcgtcttctattacctccgaccaaaaaactccgatagggacacgagtcatgttgatcgagtcattagcacagtcactatccgtagcttcgatccttgggagttaccttgtaagtgtttttacgagttttcctcttcaaccatcggctactttttaagtttagggtttttctctttg

SEQ ID NO: 3279 - DNA, 1539 bp, Zea mays
  Clone ID: TF_ZmC119_1404
ggagaattgtgtaatgataattatcacagtaaaatatgtcatgatactttcaagtcaaatagagcttccctctcggcaaggtgataagccgataaccatacaacatagtgcaccgtgagaggacaagagatatgacacacaccctgacacgctcaaactgggtcttagcaccatcacttgcatgctggtaaattcaggtcacaccaaaagcttcagacaatgttcagcatagggcaagaaggctggtagcagcatgacttgcgcctcttggcccttctgctctccagcgtctgttgcgcctgctcaaactcttcttccgtgggctccgagctactcgccttggagtcacacttggacatgatgttcgagaggatggagttgaactgttttttccgctcagccctgcgctgtgagatagccagtatcagatcattctcctgactgttcttcctcttcctgccatggagttcaagacaacgatcagtattcagcactaaagaataaggcaaagatgcaaccaagaaaacaacaacgctaccaaagaaaggttgcctattatattatataagaacacagtattcagcacacgtttaggtgtatagcaatggttgagtaactaaacaaaaaaaaccaggacatgttccttccacgcttgacttctccctgctcatctgcacggcaaggtggccaacgagcggctcgccggcgccggcgcgaccatggtggaggtggatctgcacacccacgagcctgggagctccctggtacatgcttgctgtgcctgcttgccactgaaattgaattccttaattgcttaatttacttgattgttagctctgsgtccatctccctctctcgcaagcaagactctggctaattaactcagttccgtgtcatggaatgagtgattaggcacgcaaccgcgccaccaagtccggctactggaaggccaccgacaaggaccacgtgatccacaccccctgcagctggcccgccgccgccgccggccaccaccgcaccgtcgtcggcatgtacaagaccctcgtcttctaccgcggccgcgcccccaacggcgtcaagaccagctgggtgatgcacgagttccggatggagaacccgcacaccccgcccaaggaggactgggtcctgtgcagggtcttctacaagaagaaggcagacgccatggattatgccgactgcagcgaccaggacgccatcgccgtgcatatggcttgcggcagcgctgacccacgaggggcggcagtagcagcgtcggaccgaggagggagacaacagggtgggggagaggcaccaactgcgactgcgcgaggaggacgacctcgggacggggtggcgacacgaggatgaagacgaggcgcggacaggaagacgatggagtggcgcgcagatcgagagggcggcgactccatgggggccgcaattggcgacgcgggcgtggcggcgagacgcgggcgtgaggaaaaggtagggcacggtggaagggaggcggcgaggtcgagaggatgagagcccggccgg

SEQ ID NO: 3280 - DNA, 805 bp, Zea mays
  Clone ID: TF_ZmC2195_10
cagtcacttctcttagtaacacggcagaggacaaaagcatccttcatatcagggctgactttacattcattctcatctatgtaatactcatgcataatccactcagtgcgtctgccagagggaggccgaccctcatgaaagactaaagtcttctttgttcctagagttcgcttcttcagctttatggctcggtccttcccagttgatttccagtaaccagcgagtgttgccctgtttgacctagagccagtagggtacttcctgtcacgagaggcaaagaaatgccacttgttgtcctcgattggaagattgcactttgcaggtaaatcccatggttcatgcttatttatatcaacctctggtataagatcgtactcaattttctgtccaagtattttcctcttcaggtagtgagaaacaagttcagtatccgaaggatggaatccaaatcctggtggcaggtgcatatcacgcagtacttccattttacaatatatctctcctgagagccgggtggccgcacggccgatcgcgcctgaccggcgccgcacggaacctccaggacggcgccgccgggcgccgggcggcgaggaggagcccggagaagcacggcggaagagcaccaccgggcggtgttcggtccagcgaacgagtcaggactgggagcgattgcaccgggtggggaggaagcgtcagggctgggctggctgcccctgctggggagcggaggggagaggccgattgggtgggagcggacgaagcagccacagccagcaaggaagcgaagccccggccggcctcgagg

SEQ ID NO: 3281 - DNA, 297 bp, Zea mays
  Clone ID: TF_ZmC1343_1
gccgaccggccggctctcctccatcgcaacatttcaagggggccgggcgaaagcaccaaaaatcccagcgcagatcactcgaccgccgcctgctccatttggaccctcccaaccgacagcgtaaggctctctgcaacagagccggggttccggttcgacccgacggacgaggagctggtcgtccactacctcaagaagaaggccgccatcatcgcctttacaagttcgatccgtgggagctaccttgtaaataccctgtgatttataatcatgcgaaaaatagtgagattgttgttg

SEQ ID NO: 3282 - DNA, 2059 bp, Zea mays
  Clone ID: TF_ZmC198_15
ccgcctccccctcccacccccacccccacccctggccccccgagcggcggtggcgtggcgtccattatcacagaagatctcttcgagaggatgctgaagcaccgcaacgaacctgactgcaaagctcggggcttctacacgtacgacgccttcatcacggcggcggacgcgttccggggcttcggcaccacgggcagcacggaggtccagaagcgcgagctcgccgcgttcttggggcagacggggcatgagaccacgggcggctggccgaacgcgcccgacggcgccttcacctggggctactgctacaaggaggagaacggcgccaccgccgactactgcgacatgacgggcgagtacgcccagtggccgtgcgtcgccggcaagaagtacttcggccgcgggcccatccagctctcctacaactacaactacgggccggccggggaggacgcgaccatcgcccaggacctgctgagcaacccggagctggtggcgtcggacgccgtccatctccttcaagacggccatctggttctggatgacggcgcagccgcccaagccgtcgtgccacgacgtggccaccgagcagtggaccccctcggccgccgacaaggccgcggggaggcttccgggctacggcgtcatcaccaacatcatcaacggcatcgagtgcggcaaaggctacaacgagaaggtggccaaccggaccttcttctacaccagctactgcgacatccttggcatcagctacggcgacaacttggactgctacaaccagaggcccttcaacagcgcatcccttgctggaaccgctgctcacgctgaagcgtaaataattaaactaaattaagcgatgggggcgataataatatgttgtgatgggactatgggagtcgatcagatgagctgtgcagaatccgtgctatatcggatttgcattgctcatggaataaatcaaatcaaatcaaaataaacggtgttcaacgatcggcacattataagttagtatatcgttaatatgattggagtcatccacgagaagctgctgatccatggcgccctctctctagctcgctcccatggaagaacgaagaagataggtaaaggtcccgagtcccgagcagggagataaggtggagagatccttgggctgccgcggtgcgtgcccgcgcttggtagctcttgggccgtgcggcccagcgcgcggcgcacgggcatcagttgggccgacgactgtgagcgtgggccttcgctttacatataaagctgttggattgtgtggattttggttagaagttgaggacgctggcgtagtaggcagaccaccagctctccatccgtgggctccgcagctgcgtcaggaaggggtcctgctgctgctgattcttcgccgcctcctctctcttcatgctcatcgcagctgacggtgagagcgagacgccgcccacgggcaccatcacgatctccgacgacgacatggagtcggcgggggagccggtgctgtgggacgcggacggcgtggcggtggcgcgcgcgagctcctccatggccacccgctgctccagctccttgagcgacacggccttgcggtagaccttgcacagcaccacgtccacctgcggcacgcgcgcgtcgctgctagcgtcggcagcgtcggggaggcggtactcgttcatgacccagtccgtcttggtgccccgcggcgcgcggccctcgtagtagacgagcgtcttcttgagcccgatgaggcgcttggggtcggcggcgcaccgcacggcgcggtccgaccccgtggccttccagaacccgcgctccgtggtgcggctaggccggccgccggagccgggctgctgcttggccgcccgcccgccgccgtcgcggggcacgaagaagtaccactcgcgctcgccaacgacgcgcgccaggctcggcagctcccaggggtcgtgccggtacaggtgcaccgtggggatgatgtcgaacttgagcttcctcccgcgcgccgcctgcttcaggtagaactccagcagctcctccttattgaactaatcctgtg

SEQ ID NO: 3283 - DNA, 809 bp, Zea mays
  Clone ID: TF_ZmC586250_1
ttttcgccggattatatttcaaaaatcccccccctccgcttccttcgctgctaagtatatcccctgagctccgaatctcctaccgggttgggtctcgtagtcgttggatgagagcttgggacagtggaggagcatgacggtgatggagctcaaggcgctaccgctcggtttcaggttccaccccaccgacgaggagctcgtcaggcactacctcaaggggaagatcacggggcagatcaagaacgaggtcgaggtgatcccggagatcgacgtctgcaagtgcgagccgtgggacctcccagataaagctttgatccgctcggaggatccagagtggttcttctttgcacccaaggaccgcaagtaccccaatggaagcaggtcaaacagggcgacggaggctgggtactggaaggcgacagggaaggacagggtcatcaagtccaagggcgagaagaagaagcagcatatgattggcatgaagaagacccttgtgttccaccgaggacgtgccccgaaaggggagcgcactggttggattatgcacgagtaccgcaccaccgagccagagtttgagtctggcgagcagggtggttatgttctctaccgcctatttcaaaagcaattggagaaaactgagcgctccattccagaggaaatggatagaagtggctactctcccactccatctcgttcaactcctgacaacatggaagcaaacgaggaagctatcacactcataaataaggaatctcctgaatctggtctgcatggatgtccaattgagttgccaggtacaattgatactc

SEQ ID NO: 3284 - DNA, 1257 bp, Zea mays
  Clone ID: TF_ZmC3395_1
ctccccgccggcctccacctccacggcggggaggaggcggtactcgtgcatgacccagtcggtgcgggcgccgccgccgccacggcggcgcgggcagaagacgagcgtccgcttggtgccgacggggcgcttgcagcgcggcgacacgacgacggtctccttcccggacggcctccacctccacggctgcgccgccaacgcgcctccgcccactaatgtgagctcccatggcggtggcgcggcggcggccgactgggtggtctgtcgcattttcaggagggccaggccagcccaccgcgcccgccttggtgacgcgcaagaagaagaagaagagcacgcggcggtggagagcgcgtcgtccacgtcgtcgtgcgtcaccgacgcctccgggaccatcggccaggacgatgacggcgacgaagggatcagtggcagctgcagcgtcgcctcctctaattgagaccgactagaagaaacaagagttggctagcccgcccgtcgaccaaatcacgggcgccgtgtcctaattgccgtagcaccctctcagtctcagtccctagtagcaatcaatagagagaagaagcttgagctccaacaaaccgacaacaacatcataaaaaggctaagcgctttgctgccatgttatgttgttgctggagctcgtcgcgaatccagagtgttaattagcgagaaaatcaatcagttcccttccagcaaaagaccgccatttcctgctgtgccaaggttctcccacaaacgcgttgctcgttcaaatcttcttcaatcttgctttgagaagcaaaacacagtctcacctcgtgccagcaccgcgtcgccgggcggtggaagaagaagtgctccccgctggcgtcgtcggcggctccccccgcaggtggtgcggcggcggggaggaggaggtccgacgggtcgaggcgcgcgaggtcggcgtccgggatgacgcccgccgggagcgggcaggccagcgccttgcggcggaggtagtgcagcagcagctcctcgtcggtggggcggaagcggaagccgatgggcaggcccgcgacgggcgcgccggggccccgctgctgcaggcgccacgcgccgggccgggcctccatcgccgccgccgatcgacgggatcggatcaggattcggttttggatttgtttgggtggcttgcgcgcgatctgcctgggcgatcgatgtcagatggtaggcggcatcggcgacctgttttggcccgggggatctgaggaccgt

SEQ ID NO: 3285 - DNA, 1399 bp, Zea mays
  Clone ID: TF_ZmC545_8
ggccggggccttgactctctatttatcccccgatctccaagaacaacggcactccgctcccccatttttttctcacctcccgtggcagcagccggccaacacccgcaccgcagtccacagcaagaaccaagccacagcgaagaaaagatccaatggtgatggcgccggcggcggcgcagcagcagcggcgccgcgacgcggaggcggagctgaacctgcccccgggcttccggttccacccgacggacgaggagctggtggcgcactacctctgcgcgcgcgccgcgggtcgccgccccccggtgtccatcatcgccgaggtcgacctctaccgcttcgacccctgggacctgcccgagcgcgccctcttcggccgccgcgagtggtacttcttcacgccgcgggaccgcaagtaccccaatggctcccgccccaaccgcgccgccgggtcggggtactggaaggccacgggagcggacaagcccgtggagcacggtggcaggacggtcggcgtcaagaaggcgctcgtgttctaccacggcaagccgccgcgcggggtcaagacggagtggatcatgcacgagtaccgcctcgccgacgccggcgcccgcgcccgcgccaggaagcccggcaccggcacgctcaggttggatgactgggtgctctgccggctgtacaacaagaagaacgagtgggagaagacgcagcagcagcaggagaagaagcagaatcagaagcaaatggagtcggaggcctcgctctcgcactcccactcagacacgcggacgccggagtcggagatcgacgacgacccgttcccggagctggcctcgctgccggcactcgacgacatgatgggcccagcagcagcagcgcctgccggcgccatcttgcccaaggaggaggtggaagacttgggcggcctcggcggcgacgactggctcgcgggcatcaacctcgacgacctgcagatcccgggcgaggccgacttttatggctccatgctcgtgtcgccgatggccgccaagatggagcaggacgccgccggcttcccgttcttctgagaccttctgcgcaacgcaaactgtgtatagttcagatttcttcaggattcggagaaaaaaacagttctgctgatatctggttgtagtggtttagtgcacaagcagcagtatgccggtcagttaagattgaagtccattgtagttcatcaccacttgagctgtgactgtgataagtgacagcattctttcatttctggtctgctaattcttcaatggtcagaatatagtttgtggccttcccagagtggtcacaccactgtggagccttgagatggagtaaattttttcttcaaggtttacggtttacctctttaaaatatcttagtactgtttct

SEQ ID NO: 3286 - DNA, 1784 bp, Zea mays
  Clone ID: TF_ZmC227_1
gggccgacgcacgcgtccacacaacacgctagctctgcatcatccgttctggtgagcgagcgagcgagagacctagctaactgactgactactgtaataccagagatcgaacaacttggtcctgcagctcaagaagagagttttgtgcatttgggggccgggggcaagagagagagagagagccatggcggcggaccagcagccgcagctgcaggaggagatgaacgacgctgccggcggcggcctcaggctgcctccagggttccgcttccacccgagcgacttcgagattgtcagcttctacctcaccaacaaggtgctcaacacgcgcttcacctgcaccgccatcacggaggccgacctaaacaagattgagccatgggacctcccgagcaaggcgaagatgggcgagaaagagtggtacttcttctaccagaaggaccgcaagtacccgacggggctgagggcgaaccgggccaccgaggccggttactggaaggcgacgggcaaggacaaggaggtctacaacgccgcggaaggggtggcggtactggtcggcatgaagaagacgctcgtcttctacaggggcagggctcccaggggtgacaagacaaactgggtcatgcacgagtacaggctcgaaggcagcggcaggctccccgccggcctcgcgtccgcaaccggctcagccgccgccaacgccgcggcggccttgaaagcttctgcttataaggatgagtgggtggtatgtcgtgtgttccacaagaccactgggatcaagaagaccaccactgctgcaccggcgtaccaggtggccatggccggcgctgagatggatcagaatcagaacaacatccccttccccatgccgatgcaattttccatgctgcccgacttctccttggacccggtgcccccctactacccgtaccccaacgctggcgcggggatgccgatgcttcctatggcagcaggtataggtggtggcgccggtgggctccacctcaacggcgccgccctgttcggcaatccgatggccgcgccccagcccatgagcttctaccaccagatgggcacggggactgcttgcgctggcggcttcgatgtttctgcgccggagagtaggccgtcctcgatggtgtcgcagaaggacgaccaggctaatggcgctgagatctcgtcgatgatgtccgtggccggcccagggcctgcgaccaccaccaccatagagatggatggcgtgtggaagtactgaaaacgtggagggtggagggcaaagacatgaattcgcataaattaaatatgcatgtaatatctatatctgcattgcattttgtgaaatatgatgcatgcatggtttgtatattccgtaataaccagtagttggtaagctatgtgtgtgtatggatgtactagctagtacatgcaccgtatcattgcatgtgtggtatatgtctcgtttggtgttagtaatctgcttggttgtgctgatgactgatggttgtaagaagcagattcgagtttggtacaatattatcgtgaacctatatattatatatatgttaattatagtatgttgtttaattatatgaacttgattgccacctggatttacatctgcttggtcgtgctgatgttgtgttgtaatttgtaaaaagcagattgaagttcggtacagaaaaaaaaaaaaaaaaaaaaaaaaaaaaaaaaatgggaataaataatataaaagaacccaagtttacttccccgtgcttgcgaacgaaatagtttttttttagggc

SEQ ID NO: 3287 - DNA, 342 bp, Zea mays
  Clone ID: TF_LIB4738-084-R1-K1-H3
cccgcggaaatttccctatccctcggataaacccaaaaagctgcagcagagtgaccaaaagcaggcctgacgggatcctcggatctctagccaggcagcagcagatggagcacgacgtgcaccaccagcaggacatggagctgccgccggggttccgattccaccccaccgacgaggagctcatcacgcactacctcgccaggaaggccgtcgacgcccgcttcgccccgcgcgccgtcggtgaggccgacctcaacaaccgcgagccatggcacctgccatcccgggcgccgatgggcgaaaaggagtgaaacttcttctgcggcctggaccgcccgcacc

SEQ ID NO: 3288 - DNA, 325 bp, Zea mays
  Clone ID: TF_ZmC124792_1
tttttctcactgactgactactgtaataccagagatccggcaacttggcctggatcctcgactagatgactttccgcatttgggggccgggggcaagagagagagagagagagccattgcggcggaccagcagccgcagctgcaggaggagatgaacgacgcttccggcggcgggcttaagctggcttcagggttccgctttcacccgagcgacttcgagattgtcaggttctaccttaacaacaaggtgcttaacacgcgctttaactggaccggcattacggagggcgaccttaacaagattgagccattggaccttccgagc

SEQ ID NO: 3289 - DNA, 536 bp, Zea mays
  unsure (1)..(536): unsure at all n locations
  Clone ID: TF_LIB4759-009-R1-K1-A10
ccttccgggagcaagtactgngctccttattaactccttgaatggccatctagaaggctactagctagctgcatcaagagcatacatgacatatatacatcggacatagatcgaactcctgatcgtctatcctggcaagtagaaagatcgaccatggtggccaaggtgaagagagacggagaagtgctcgtcgccgccgccaccggagacagcgaagagcaagacgacttggtgctcccggggttccggttccacccgaccgacgaggagctcgtctcgttctacctccgccggaaggtggcgaggaagcctctcagcatggagatcatcaaggagatggacatctacaagcacgacccgtgggacctccctaaggcgagcacggtaggtggagagaaggagtggtacttcttctgcctgagaggaaggaagtaccggaacagcatcaggcccaacagggtcaccggctccggcttctggaaggccactggcatcgaccgcccgatctaccctgccgcggccggcgagtccggcgg

SEQ ID NO: 3290 - DNA, 1516 bp, Zea mays
  Clone ID: TF_ZmC750_1
ccgggactatcactttcctcttgtttttcttgcctgtctccatactcatcgatcgattgctttttggcgtcagttgcttttgaggagctgagctacaatcaggcaagggatatttccgagatcatagctaggttttacgaggaatgcatcccggaggtggacctctgtcagtgccaccaggcttccgcttccatccgactgatgaggagctcctctactactacctgaggaagaaggttgcttatgagcccatagatcttgatgtcataagggagattgatctcaataaacttgagccctgggatctcaaagaaagatgcaaaataggcactgggcctcaaaacgactggtacttcttcagccacaaggacaagaagtacccaacgggaacgagaacgaaccgtgccacgacggcgggattctggaaggcgactggccgagacaaggccatcttccttggcagcgccaggaggatcggcttgaggaagaccctggtgttctacatcggcagggcgccacacggcaagaagactgactggatcatgcacgagtaccgccttgatcaagagaacgttgaaattcaggaagatggatgggtggtatgtagggttttcaagaagaagagctatgagcagagaggccatgacgtggctgagatggtggcactggacgacgaagagctccagcctttcacggttcctgtccccggctggcactagctccctgccaacaacagaccacaagaacaaccctcacctcatgcaatatgacttcccttctttcgacccttccatgcagctcccacagctgatgagcgccgaccagcccgtgccaaccctattccccagccatcctggcgtcgccacggccatgagctcatcaatcgacgttgagtgctcgcagaacctgctgacgatgctgacatccaacggcagcgacgggatgctccacgtccgcgctggtggtgctggagctggtgtcgaccgcttcgctggcacgacagattggtcgatcctagacaagctcctcgcctcgcaccagaacctcgaccagctcttccacggcaaggtcaccgcagcatctgcctccccaatggctccataccatcaacagctcatggaactcggtggctcgtcgtcgtcgtcgtccttgcagaggcttccactgcagtacctcagcggcgagacgaccgatctcctcaggttccccaagtaattattggatcgacctcaagtttagctaccttgttgagcagtgaccatatcaggattttggttgactactgggctgcttaattcggcctacttcgtatggagtttagtgcttttaaatgtatatatggtgcaactgtttggggcatgcaggcatggaatgccatcgatctaccatggttgcttgcttggccaagaggatgtttttgatgtttccattttggcttagggttgctcgttaggttcttttggagaaaaaatgtgaagagatggcccggtcaattaagaacttctatttgtttccc

SEQ ID NO: 3291 - DNA, 313 bp, Zea mays
  Clone ID: TF_LIB3182-009-P2-M1-B4
gccatcatggacgccgacctaaacaagaatgtgccatgggacctgccgatcaaggagaaaaagggcgacaaagagtgctacttgttctaccagaacgaccccaagttcccgacggagctgagggcgaaccgcgccaactaggacgggtactggaaggagacgggcgaggacaacgaggtgtacaacgccgcggaacgggtggcggtactgatcaccatgaagatgaacctcggcttgtacacgggcggggataccacaagtgacaagatcaactgaggcatgctcgaatacaggctgtaaggcagcggcaggc

SEQ ID NO: 3292 - DNA, 491 bp, Zea mays
  Clone ID: TF_LIB4766-005-R1-M1-G2
ggccgcttttttttttttttttttaaggtcaaattgcgttgctagatagatataccgagattatgatataagcagtctcctttcaagttggttgacttcataaggcattaaacagttccctacgttgagttccagctaagtcaaacaacaacaacaaaaaatctcccaaaagggtcacagttccgcccagccacatcatccacggacaacattctgaaccaagcgcaagggctcagttctccaaatcatctccttcatcgtcatcatcaccatccaaatcatcatcatcttcatctccttcaaattcatcgtcaacctcattgttgaagtacttcaaaggattaggccacaaatcttccttgatgatctccgccacctcatcttgcacaccatcagcaagactcttgagctctgtatcaccaaaccagctaaaaaaactttcctctactaatgcccggttactccccttcttgataataccatttccattg

SEQ ID NO: 3293 - DNA, 504 bp, Zea mays
  Clone ID: TF_LIB4315-023-R1-N1-G8
aagcaggattttccaacaaaaggctgaaaagggtttcttacaacaagatataactattacgggaaaaaaaaattaaaagcttggctgttggcgtcaaaacccacttttgcttaaaattaaaaacctttcaacacacaaaactttacacactttgttataaaaaaaacatgtaaccaaatggggtttctgggtatccctgccatcattcctcaccaacttcgtctttttcggcatcatcttcatcaaaggcaccttttttctcctcttcatctccatcatcggctccataaaagtccttttcatcagcgtcattgttgaaataggggaaagggttgggccacaaatcttccttgatgaaatctgcaacctcgttttgcatttaatcctcaacatcctccttggggtgagcatcactaaaccaggtaaagaagctctcttcaggaagggcacgtttggttccattcttttcaagaatcactccattcgccaggcctttgccctttt

SEQ ID NO: 3294 - DNA, 568 bp, Zea mays
  Clone ID: TF_LIB3632-022-Q1-K6-D5
tcgatactgttgtggggaaaataccaggacgctgagggcgttccatactttctggcttactgacatgtaaaacaaaggacggtggtgtctgaggagatacaaggagcgcagactaagcccgtccgaggtatctaggagatatcaactggtctacaatcgaggatcctactggtttcaacctgggatggtggtttgatacaaacccattcttgaagaattttgtcctgtcaaaaacgttccacatggtctgatgaagatgacccaattttggagaaagctattggaactgtaattgagtggtattctgggctataaacctatcacacatgattctaacaaagaaggctacgatggggtaaatgaatacgaaggctatcactaaaaccgaggactgggacagttttttcaactttctcaatcccccgcatgtccctgaggatgatgatgacctcgatgaagacactgctgttgagctgctctgtctaatggcatcatgattgtgacattggtactctcctaagggataagattatccctcagtcgctgggctggtttactggtgatgctt

SEQ ID NO: 3295 - DNA, 829 bp, Zea mays
  Clone ID: TF_ZmC7683_2
caaaaggtgctaaaaaagaagccacggaagggttcaaagaacactaaacctatcacaaaaactgaagattgtgagagcttcttcccgttcgagcgtccacctcaagtccctgatgatgatgaggaaattgatgaggatatagctgaacagttgcagaacgaaatggaacaagattatgatattggatctaccatcagagacaagattatcccacatgctgtctcgtggttcactggagaggctgctcaagatgaggagtttgaagttatggatggtgaggatgacgatgatgaagacaatgatgatgaagacgaagatgacgaggatgatgatgatgatgatgattacgattcaaagaagaccaagggaactgccggaggggaagggcagcagggcgaacgacctgcagagtgcaagcagcagtgaggtgctgcacaatgaatgttggcaggcattgtttgtggagcaattagtttggttctgcttgatgctcaaggtcattgagttggtttgtggaaccttcgagggggcgcttgttggttttatggaattggttggggaatttttctgggacatggcgttatatcattatatgtgggtagtttcttcactttctgtattgggtttcagatattatatgtgttcttatgcttggagtgaagatggttgccactctggtatgtcttattgtgcataccactggcatagtgtgctgtctgtactttcatcaagcgtgccgtgccgctgagaaattttgctctaggggaaaggctagccttttgcctgaaaatgttttgcgaattgcatcttgcataaaaaaaaacccccc

SEQ ID NO: 3296 - DNA, 470 bp, Zea mays
  Clone ID: TF_ZmC13098_5
tttggtgatacagagctcaagagtcttgctgatggtgtgcaagatgaggtggcggagatcatcaaggaagatttgtggcctaatcctttgaagtacttcaacaatgaggttgacgatgaatttgaaggagatgaagatgatgatgatttggatggtgatgatgacgatgaaggcgatgatttggagaactgagcccttgcgcttggttcagaatgttgtccgtggatgatgtggctgggcggaactgtgacccttttgggagattttttgttgttgttgtttgacttagctggaactcaacgtagggaactgtttaatgccttatgaagtcaaccaacttgaaaggagactgcttatatcataatctcggtatatctagcaacgcaatttgacctcagtgtcctgtttgtgattcagtttttgcttcggtcggttgcctaaagatgacgtattgccttcagtttgtgctc

SEQ ID NO: 3297 - DNA, 707 bp, Zea mays
  Clone ID: TF_ZmC518259_1
gctctctccccgcctcctcgccgcccactcccgctctccctagggcttccccctcctctcctcggcggcgcggcggcgaagtccaaccaggccccaccggagctccgaccatgggcggcgagaaggagaacctcgacctctccgacctcaacacctccctccccgccgccgccgccgccctcagcgccgaggaccgcgtcggcctcgtcaatgccctgaaggacaagctgcagagcttggcggggcagcacgcggacgtgctcgagtcgctctcgcccaatgtcaggacgcgtgttgagtttctgaggggcattcagagccaacatgatgagattgagacgaagtttttcgaggaacgggctgcccttgaagccaagtaccagaagctgtatgaaccattgtatgctaagaggtatgacattgtaaatggagttgtggaggttgatggtgttgctaaagaacctaccactgaaaatgctgccgaggggggagattcagatgcaaaaggtgtcccagatttttggctcactgctttgaaaacaaatgacgtgttgactgaggagatccaagagcgtgatgagcctgttttgaaatatctaaaggatatcaagtggtctagaattgatgaccctaagggtttcaagcttgagtttttctttgatacaaaccctttcttcaagaactctgtcctaacaaatcctatcata

SEQ ID NO: 3298 - DNA, 583 bp, Zea mays
  unsure (1)..(583): unsure at all n locations
  Clone ID: TF_LIB4073-015-Q6-K1-B10
caaagttgacattgaatatccgttcacatttgaaggtccntgaaatttataaatgtgtcggttgtaatattgattggcacaaaggtaaaaatttgacagtaaaaaccatcaaacggaagcaaaagcataaggcacgtggagcagtgcgtacagtcaccaaacaagtaccggctgattcattctttaatttcttcaaaccgccagtaattcaagaaaatcaagacgaaagcaaaatcgatctcgaagatcaagcaatcttaagcactgactttgaaatcggtcactttttacgtgcgcgagttattcccaaagctgccctctattatacgggagacatagtcgaagacgatgatgatgatgactatgatgaagaagaggaagaagaagaagaagaaggtgatgaagaagaagacgaagaatcagaatcggaccaagaaagtcggccaactgggaaacagcaacaacgtgttcacggcgttgcaaataaaaagaaaagtggtagtggtgccggcggtgctaatcaaactccagccgaatgcaaacaacaataagaggaaaaccaaacaaatcaatataaaattct

SEQ ID NO: 3299 - DNA, 1153 bp, Zea mays
  Clone ID: TF_ZmC13098_1
attgggtacctcgagacgggccggagcttcccagctccgcctccttttcctgccttcctcctcactagtcgctcccccgcggctcgcgcaggcgggcgacacaacgaggctaaatccctatcgcgaggaggcgtgtgaggccagcggctttgcgatgacagcaccagcggacaaggggaagaaggccaagactgatgccgacggcggcgaggagaacgaacagatcgacggcgtcctcgtcctctccatcgagaagctccaggagatacaggacgagctcgagaaggtaaatgaggaagcaagtgacaaggttatggaggtggagcagaaatacagtgagatccgcagacctgtctatctcaagaggggtgacattatcaagaccatcccggacttttggctcacagcgtttatgagccatcctctattaagtgagcttctgactgaagaggaccagaagatattcaagtacttagactccattgatgtggatgattctgatgttaaggcaggatactccattcatcttaacttctctgagaacccgtactttgaggacacaaagcttgcaaagacctatatctttgctgatgatggaacaaccacaataaaagcttccgaaattaagtggaaggaaggaatgggacctgcaaatggaaatggtattaacaagaaggggagtaagcggccattagtagaggaaagtttttttagctggtttggtgatacagagctcaagagtcttgctgatggtgtgcaagatgaggtggcggagatcataaaggaagatttgtggcctaatcctttgaagtacttcaacaatgaggttgacgatgaatttgaaggagatgaagatgatgatgatttggatggtgatgatgacgatgaaggcgatgatttggagaactgagcccttgcgcttggttcagaatgttgtccgtggatgatgtggctgggcggaactgtgacccttttgggagattttttgttgttgttgtttgacttagctggaactcaacgtagggaactgtttaatgccttatgaagtcaaccaacttgaaaggagactgcttatatcataatctcggtatatctagcaacgcaatttgacctcaaaaaaaaaaaaaaaaatcaaaaaaactcgagctcgtgc

SEQ ID NO: 3300 - DNA, 285 bp, Zea mays
  unsure (1)..(285): unsure at all n locations
  Clone ID: TF_700336790H1
gaaaaagaagaccccaaaggaattccagaatatacgctcactgttttttcanatgttgacttgctcagtgatatggttcaggaacacaatgaacctattctgaagcacttgaaagatattaaagtgaagttctcagatgctggccagcctatgagttttgtcttagaatttcactttgaacccaatgaatattttacaaatgaagtgctgacaaagacatacaggatgaggtcagaaccagatgattctgatcccttttcttttgatggaccagaaattatgggt

SEQ ID NO: 3301 - DNA, 755 bp, Zea mays
  Clone ID: TF_ZmC502799_1
gacgcctgcggtaccggtccggaattcccgggtcgacccacgcgtccggtttcttcctgctgtgaacatcagggctctgggctctgtctcccggtcatctccctcgcgccatggccccgaagcggcagtctgcgatcctgcctcagcccaagaaacccagaccggctgctgccccgaagctggaggacaagtcggcctctcccggcctgccgaagggagaaaaagaacagcaagaagcaattgaacatattgatgaagtacaaaatgaaatagacagacttaatgaacaagccagtgaggaaattttgaaagtagaacaaaaatataacaaactccgccaaccattttttcagaagaggtcagaattgatcgccaaaatcccaaatttttgggtaacaacatttgtcaaccatccacaagtgtctgcactgcttggggaggaggacgaggaggctctgcattatttgaccagagttgaagtgacagaatttgaagacattaaatcaggttacagaatagatttttattttgatgaaaatccttactttgaaaataaagttctctccaaagaatttcatctgaacgagagtggtgacccgtcttcaaagtccaccgaaatcaaatggaaatctggaaaggatttgacgaaacgctcaagtcaaacgcaaaataaggccagcaggaagaggcagcacgaagagccagagagcttctttacctgggttactgaccattctgacgcaggtgctgatgag

SEQ ID NO: 3302 - DNA, 1709 bp, Zea mays
  Clone ID: TF_ZmC23984_1
ggccggccgggaagtctctttctgccccacgacacctttttcccgacaccctaccactccaactctccaccccaaccgccgccatggacgtccctaggtctaacaagcagcctaccagcacaccgcagaacacacccgccaatgctgcacccatctcgtcgcgcgcccagcagccgaacgtcggcaccatcaaggaagaggagcttgaccgcgccgccgccggactgttcgctgcaaaccccgctctcgtctcgatgatgcaggccaagctcggctcccttgttggccgctcaagcggctacatcgagtcactccctggctctgtccgccgccgtgttgctggcctgaagggtgtccagaaggagcactctaagctcgaggccgagttccaggaggaggttctccagctcgagaagaagtacttcgccaagttcacaccgctgtacgagcagcgtgccaagatcgtcaacggctctaccgagcccacagaggagcaggtcaaggttggcgagcagcaagatgaggacgatgaggatgacgaggaggctggcgagaaggagctgaacaaggacgagggcaagggcgtcaagggtattccagagttctggctgagcgccatgaagaaccagatctcgctcgccgagatgatcacagaccgcgacgaggccgcactgaagcacctcactgacgtccgcatggagtacctcgaccgccccggtttccgtctcattttcgagtttgaggagaacgagttcttcaccaacaagaccatcaccaagacatacttctaccaggaggagaacggttacggtggcgacttcatctacgaccacgccgagggcgacaagatcgactggaagacgggcaaggacctgactgtccgcgttgagagcaagaagcagaggaacaagaacacaaagcagacccgcgttgtcaagaagaccgttcccacagagtcgttcttcaacttcttcgaccccccaagccctccccaggacgaggatgacgacgcttcatccgatattgaggagcgcctcgagctcgactaccagctcggtgaggacatcaaggagaagctcattccccgcgctatcgactggttcaccggcgaggctcttcagtacgagaacatcgaggacttcgacgagggcgagtttgaagacgaggatgatgaggatgaggacgggctcagtgacgaccgcgatgaggacgaggagtcagatgacgagaacgacggcacaaaacccaagcaggaggctgctgagtgcaagcagagctaaacgtctctttcgaccgatcttcttcgatgatatctccgggcattgggcttgttcaatctagatggcttctccggctgtgacaggctcgcaacctgacctcttcccattatctttgcacagcacttcatgttttcgacacggcgtatcattgcatcaaaagagctggacgccgattgggggtggttgttctagctatacatgaactatactggttctacctccctcgctctactccactcaaccctaatagtccctgcccatggctcgccctcagacacgtcagacccggacatgcggtctaaacacagtattggcccctgcggtggtactcaacgcgtgagggagctacgagcagcggatgaatcacgactacagcgatggatagtaaaagttttggtatatagagcgaaatgaatgagatacgagcac

SEQ ID NO: 3303 - DNA, 437 bp, Zea mays
  Clone ID: TF_LIB3150-004-Q1-N1-D4
aagccgaccaacccttccgcccttttcttcctttccgacgccgggggggggaattccgaatcgagggcgagacgggcttgatcgaaaagtcgactatggacggagagaacgaaccctacgttatctccgacctcaacgcctccctccccgcagccgctgcagcccttagcgccgaggaccgcgccggcctcgtcaatgctcttaaggataagctgcaaagcctggcgggccagcatgccgatgtgctaaagacgctttcgcccaatgttaggaagcgtgttgagtttttgagagggatccagagccaacacgattaaattgatggcaagttttttgaagaacgggtagcacttgaggctaagtaccataaagctttatgaaacctttatacacaaagagggtattgaaattggtaaagggagaaaatggaggtagat

SEQ ID NO: 3304 - DNA, 2086 bp, Zea mays
  unsure (1)..(2086): unsure at all n locations
  Clone ID: TF_ZmC2218_1
cgatgtaagagaggacgatgacgttgacacagtcttccggaagctcaaagaggaaacagtcatcgactcaaactggggcatagggatttatgttaagtcggtagccctaaaacatggcatcactacccaaggatgctcaataggtaccaacaaacaaaggagaagaaatgcttgtgttaagccaacacccaacagagatggagcaaacagaaaagcacaatccacccactatttatttatctcccttactgaagcacaagccttgatgactgaatggacagtgaatcccgagaaaaactgaaaatttcattgagtgaactactaccagctccaattcatgctggacgctgtttgagtgtacacagccaccatatgtgcaataactgacttctggctgaaagccgagaaaggcgatgacttatgtagattggttntggggggantangcgcacgaggagaggactagttctcttcatctctctcttcctcttctcccgccgcccagcttctctcttctctcggcggcgccaccacggcgatcaagcgcgatacgggcgtaaccgaagaatcgacaatgggcggcgagaaggaaacctttgatacgtccgacctcaacgcctccctccccgcggccgctgcagccctcagcgccgaggaccgcgccggcctcgtcaatgcccttaaggataagctgcagagcctggcgggccagcacgccgatgtgttagagacgctgtcgcccaatgttaggaagcgggttgagtttttgagagagatccagagtcaacacgatgaaattgaggccaagttttttgaagaacgagctgcccttgaggcaaagtaccagaagctttatgaacctttatacacaaagaggtatggaattgtaaatggagaagtggaggtagatggtgtttgtgatgaaccggccagtgagaatactgttgagggaaaagaaccagacgctaaaggagttccagacttttggcttactgccatgaaaacaaacgaggttttgtctgaggagatacaagagcgcgatgaagccgctttgaaatatctaaaagatatcaagtggtctagaatcgaggatcctaagggtttcaagctggattttttctttgatacaaacccattcttcaagaattctgtcctgacaaaaacgtaccacatggttgatgaagatgacccaattttggagaaagctattggaactgaaatcgagtggtatcctgggaaaaacctaacacagaagattctaaaaaagaaacctaaaaaaggttcaaagaatacgaagcctatcactaaaaccgaggactgtgagagtttcttcaactttttcaatcccccgcaggtccctgaagatgatgatgacatcgatgaagacactgctgatgagctgcagagtcaaatggagcatgattatgacattgggaccaccataagggataagattatccctcatgcagtttcctggtttactggtgaggctgtgcaaggtgaggattttggtgagttgggcgatgatgatgaagatgatgatgatgaagacgatgacgaagatgatgaggatgaagaagaggatgatgatgaggaagaggatgatgaggaagaaagcaagccagcaaggaagtcaggatctggtcgcagacataaggcgccacagaaggtgtcgcagggaaatgcggaacaaccagcggagtgcaagcagcagtagaatggcctgttgatgttggttgatgcagtattttccattgagctgcctagaggttatgtgtgcgcaggccagatgttggtgttgatatctcaagtgtggtttttattagtaggcggtgagggtgttgtctggagcactttggtgctgcgttggtggatggatattggtttgcaacttgtctgctagtgtcttggggattcagctacgtgcaatcggatgatattatatggttgtaattatctttgcactcggcctataacgggctctttatttgcactgggtctaaaaaaaaaaaaaaaaaaaaaaaaaaaaaaaaaaaaaaaaaaaaaaaaaacccacgcgtccgcccacgcgtccgcggacgcgtgg

SEQ ID NO: 3305 - DNA, 1628 bp, Zea mays
  Clone ID: TF_ZmC7683_1
tcgagccggccgggaaatggaccctcgccgccctcattcctcactctttttttatcccctcctctgccattccctccctctcccctcaacccagcgcccccctcccgccgccactagggtttctcctccccgcccacccccaaaccatccccgaagcttccagtgcgtcgcgccgcaaccatgagcgacggtaaggactccctcgacctctccgccctcggcgccgccatccccaactcggccgagctcagcgcggaagacaaggctaaccttgtggcgtcgatcaagaacacgctcgagggattggcgtcgcggcataccgacgtgctcgagaacctcgagcccaaggtcaggaagcgcgttgagaagctcagggagatccagggcgaacacgatgaacttgaggcgaagtttttcgaagagagagctgctctagaagctaagtatcagaagttgtatgaaccactttactcaaagcgttatgaaattgtcaatggtgtggtcgagattgagggtatcacaaaagaaagtgcagctgaaaccccagaggagcaaaaaagtggagatgagacctctgctgagcaaaaagaagaaaaaggtgtaccagctttctggcttaatgcaatgaagaatcatgaaattttagctgaggagatccaggagagggatgaggaagctctcaagtacctcaaggacatcaagtggtacaggatcagcgagccgaagggttttaagcttgaatttcactttggtacgaatatgttcttcaagaattcggtgcttacaaaaacatatcacatgatcgatgaggatgaaccaattctggagaaagccattggtactgaaattgaatggtaccctgggaagtgcttgacacaaaaagtgctaaaaaagaagccacggaaggggtcaaagaacacgaaacctatcacaaaaactgaagattgtgagagcttcttcaacttcttcagtccacctcaagtccctgatgacgacgaggaaattgatgaggacacagctgaacagttgcagaaccaaatggagcaagattatgatattggatctaccatcagagacaagattatcccacatgctgtctcatggttcactggagaggctgctcaagatgaggactttgaagttatggacggcgaggacgatgacgatgaagacgatgatgatgaagacgacgaggatgaagatgacgatgattatgatacaaagaagaccaagggaactgctggaggggaagggcagcagggtgaacgacctgcagagtgcaagcaacagtgaggtgtgatgtcattaagttggttttgtggggccgttgggtgggggttcttgttggttttatggaactggcggggggatttttctgggacatgttacatgtgggtctgtattgggtttcagatgttatatatgctcttcatatgcttggagtgaagatggctcatggttgccactctggatgtcttattgtccataccactggcattgtgctctgtactttcaagcgccccgtcccccccgctgagaaattttgttcttaggggaaaggccaccctttcccctgaatgttatgcgaattgcatcttgccccccccccccgggcgttaaggtaccaa

SEQ ID NO: 3306 - DNA, 648 bp, Zea mays
  Clone ID: TF_LIB5116-017-A1-PF1-G8
ccccgcctcctcgccgcccactccctctctacctagggcttccctctcccctgctcggcggcgcggcggcgaagtccaaccaggcccccaccggagctccgaccatgggcggcgagaaggagaacctcgacctctccgacctcagcgccgaggaccgcgtcggcctcgtcaatgccctgaaggacaagctgcagagcttggcggggcagcatgcggacgtgctcgagtcgctctcgcccaatgtcaggaggcgtgttgagtttctgaggggcattcagagccaacatgatgagattgagacgaagtttttcgaggaacgggctgcccttggagccaagtaccagaagctgtatgaaccattgtatgctaagaggtatgacattgtaaatggagttgtggaggttgatggtgttgctaaagaacctaccactgaaaatgctgccgaggggggagattcagatgctaaaggtgtcccagatttttggctcactgctttgaaaacaaatgacgtgttgactgaggagatccaagagcgtgatgagcctgttttgaaatatctaaaggatatcaagtggtctagaattgatgaccctaagggtttcaagcttgagtttttctttgatacaaaccctttcttcaagaactctg

SEQ ID NO: 3307 - DNA, 347 bp, Zea mays
  Clone ID: TF_LIB3088-035-Q1-K1-G12
gggtttggacgttgaagaaggggcattgaaagaaacaacaccagatggtgagggggatcatgagaaaggagtgcctgcattttggcttactgccatgaaaaacattgaagtgttggctgaggagatctcagagcgtgatgaaggtgctcttaagtatctcaaagatatcaagtggagcaggatagaaaacccgaaaggattcaaacttgagcttttctttgacaccaacccttattttatcaattctgacttgacataaacatatcatatgattgatgaggatgaaccaatattggagaaagcaattgggactgaaattcaatgggccccaggaaaatgcctgacac

SEQ ID NO: 3308 - DNA, 1140 bp, Zea mays
  unsure (1)..(1140): unsure at all n locations
  Clone ID: TF_ZmC13098_2
ggtacgctcattgggtacctcgaggccggccgggctcccagctccgcctccctttcctaccttcttccctccgtctcccagctcgcgcaggcaggcgacacagcgacgctaaaaaccctagagcgaggaggcgtgccaggccagcggtttgcgatgacggcaccggcggacaaggggaagaaggccaagaccgatgccgacggcggcgaggagaacgagcaaatcgacggcgcccttgtcttctccatcgagaagctccaggagattcaggacgagctcgagaaggttaatgaggaagcaagtgacaaggttatggaggtggagcagaaatacagtgagattcgcagacctgtctatctcaagaggggtgacattatcaagaccatcccggacttttggctcacagcgtttttgagccatcctctactaagtgagcttctgactgaagaggatcagaagatattcaagtacttggactccattgatgtcgatgattctgatgttaaggcaggatattccatttaccttaacttctctgagaacccgtactttgaagacacaaagcttacaaagacctattcctttgttgatgatggaacaaccacaataaaagcttctcaaattaagtggaaggatggaatgggacctgcaaatggaaatggtattaacaagaagggaaacaagcggccattagtagtggaaagttttttctcctggtttagtgatacagagctcaagagtcttgctgatggtgtgcaagatgaggtggcggagatcatcaaggaagacttgtggcctaatcctttgaagtacttcaacaatgaggttgaagatgaatttgaaggagatgaagaagatgatgacgacgacgacgacgatgataatttggatggtgatgacaatgacgatgatggggaccaggagaactgagccctcgcgtttaggcggggaattatgtgacccgtttgggggattttttttggttgtttgacttagctggaactcaacttagggaactgtttagtgccttatgaagtcaaccaacttgaaaggagactgctatatcataatctcggtatatctatcaacgcagtttgacctgtgattcaaaaaaaaaaaaaaaaaagcggtcgccttcnn

SEQ ID NO: 3309 - DNA, 1122 bp, Zea mays
  unsure (1)..(1122): unsure at all n locations
  Clone ID: TF_ZmC2218_4
ggggcgacccaggccagncgggactacccgctgagtttaagcataaataagcggaggagaagaaactacgctaaaggagttccagacttttggcttactgccatgaaaacaaacgaggttttgtctgaggagatacaagagcgcgatgaagccgctttgaaatatctaaaagatatcaagtggtctagaatcgaggatcctaagggtttcaagctggattttttctttgatacaaacccattcttcaagaattctgtcctgacaaaaacgtaccacatggttgatgaagatgacccaattttggagaaagctattggaactgaaatcgagtggtatcctgggaaaaacctaacacagaagattctaaaaaagaaacctaaaaaaggttcaaagaatacgaagcctatcactaaaaccgaggactgtgagagtttcttcaactttttcaatcccccgcaggtccctgaagatgatgatgacatcgatgaagacactgctgatgagctgcagagccaaatggagcatgattatgacattgggaccaccataagggataagattatccctcacgcagtttcctggtttactggtgaggctgtgcaaggtgaggattttgctgagttgggtgatgatgatgatgatgatgatgatgaggatgatgacgaagaatgagagaagaggatgatgatgaggaagagatgaggaggaagaaagcaagccagcaaggaattgggatccggtcacaaacagaaggagccgcaggaagtgttgcagccttgcagggaaatgccgaacaaccagcggagtgcaagcagcggagtgcaagataaccagtgtttggttgatgcagtattttccattgatctggagcactctgtgctgcgttagtggatggaaatcggtttgcaacttgtctcctagtgatctcagggttttcgctacgtgcaatcggatgatattatatggttgtgtaattatctttgcactcagccgataatggcgctttatttgtcctaggtctatattggctatcttaaattgatttgtagttagcttagagcatatacaatcgaccacccaaatcagggggtctatttttgatttgatgcccactttttttct

SEQ ID NO: 3310 - DNA, 768 bp, Zea mays
  Clone ID: TF_ZmC2218_2
ttgggtacctcgaggccggccgggttcaactttttcaatcccccgcaggtccctgaagatgatgatgacatcgatgaagacactgctgatgagctgcagagtcaaatggagcatgattatgacattgggaccaccataagggataagattatccctcatgcagtttcctggtttactggtgaggctgtgcaaggtgaggattttggtgagttgggcgatgatgatgaagatgatgatgatgaagacgatgacgaagatgatgaggatgaagaagaggatgatgatgaggaagaggatgatgaggaagaaagcaagccagcaagtcaggatctggtcgcagacataaggtgccacagaaggtgtcgcagggaaatgctgaacaaccagcggagtgcaagcagcagtagaatggcctgttgatgttggttgatgcagtattttccattgagctgcctagaggttatgtgtgcgcaggccagatgttggtgttgatatctcaagtgtggtttttattagtaggcggtgagggtgttgtctggagcactttggtgctgcgttggtggatggatattggtttgcaacttgtctgctagtgtcttggggattcagctacgtgcaatcggatgatattatatggttgtaattatctttgcactcggcctataacgggctctttatttgcactgtgtctatgttggctatcttgaattgatttgtagttgcttaggctgttccattgctatgccaaccattatcttgtattcttgt

SEQ ID NO: 3311 - DNA, 724 bp, Zea mays
  unsure (1)..(724): unsure at all n locations
  Clone ID: TF_LIB4172-012-Q1-L1-E5
tggtacgcctgcaggtaccggtccggaattcccgggtcgacccacgcgtccgcctggctgtaggtagcgactacagttagggggcacctagcattcaggccctcatcctcctccttcccagcagggtgtcacgcttctccgaagactggatgactgccatggaggagtcacagtcggatatcagcctcgagctccctctgagccaggagacattttcaggcttatggaaactacttcctccagaagatatcctgccatcacctcactgcatggacgatctgttgctgccccaggatgttgaggagttttttgaaggcccaagtgaagccctccgagtgtcaggagctcctgcagcacaggaccctgtcaccgagacccctgggccagtggcccctgccccagccactccatggcccctgtcatcttttgtcccttctcaaaaaacttaccagggcaactatggcttccacctgggcttcctgcagtctgggacagccaagtctgttatgtgcacgtactctcctcccctcaataagctattctgccagctggcgaagacgtgccctgtgcagntgtgggtcagcgccacaccttcagctgggagccgtgtccgcgccatggncatctacaagaggcacagcacatgacggaggtcgtgagagnctgnccccaccatgagcgctgctccgatggtgatggcctggctcctccccagcatcttatc

SEQ ID NO: 3312 - DNA, 840 bp, Zea mays
  Clone ID: TF_ZmC1197832_1
cgtctcgaggatccccgtttccgtctgggcttcttgcattctgggacagccaagtctgtgacttgcacgtactcccctgccctcaacaagatgttttgccaactggccaagacctgccctgtgcagctgtgggttgattccacacccccgcccggcacccgcgtccgcgccatggccatctacaagcagtcacagcacatgacggaggttgtgaggcgctgcccccaccatgagcgctgctcagatagcgatggtctggcccctcctcagcatcttatccgagtggaaggaaatttgcgtgtggagtatttggatgacagaaacacttttcgacatagtgtggtggtgccctatgagccgcctgaggttggctctgactgtaccaccatccactacaactacatgtgtaacagttcctgcatgggcggcatgaaccggaggcccatcctcaccatcatcacactggaagactccagtggtaatctactgggacggaacagctttgaggtgcgtgtttgtgcctgtcctgggagagaccggcgcacagaggaagagaatctccgcaagaaaggggagcctcaccacgagctgcccccagggagcactaagcgagcactgcccaacaacaccagctcctctccccagccaaagaagaaaccactggatggagaatatttcacccttcagatccgtgggcgtgagcgcttcgagatgttccgagagctgaatgaggccttggaactcaaggatgcccaggctgggaaggagccaggggggagcagggctcactccagccacctgaagtccaaaaagggtcagtctagggtaccgagctcgaat

SEQ ID NO: 3313 - DNA, 682 bp, Zea mays
  Clone ID: TF_LIB4745-011-Q1-K1-A10
cctgccgggaacaggccaattgacttcgttcgcaacagcgggacaaagggaagcaacagcgagggaaaaccccattcctcgtctctgctcctctaatcaccatcgcccccctctctctccgatcactgcatctcttctccgcctggtcggcggtcggacggcgcaatggacattaaggtgtgtggggtatgtggcagtggtagcaactctgctcttattgtgaagtgtgttcggtgcaatgattatgaacaccgttattgtatgaaggtggtggcacgggtatctccacaggaatggtattgtgccaaatgccaagagcataccaacagaggcccgaaacctagtcaaggtgggcaaacggagctccaaaagccatgtcatggtcgtgatatgacgagcgagagggaaacttcgaagttgcacctcagtcaaagcagcgtagtgcatcaaataataagtcccaaatctctgaacagatttgaaaatgctaaagtgaagttcatctcttctgaagaagtggcattattgagtagagagaggccaccatctgttacatcaagatttactttgtcgcagccaagcaaggcatcatctcctccaactacaaaacacttgtccaatatgaattgtgtatccccaagcagagtgataaaaatgtgcaagccctgaaaccatgtgctga

SEQ ID NO: 3314 - DNA, 1836 bp, Zea mays
  Clone ID: TF_ZmC36928_1
ttttctcgaacgcgcaagagacatgtgcatcttttcattaagaaggaagagaaaaaggatccaaaatggatcagtacaggaagacccccattacggtggtcgaaaacaaagaaacaaaaatacatccataaataaaaggaaccagaaactactatgacctaaagacctgggattggggctgttaagagatctaagtttgtagcccctcctaacacccacaggtccctttcctcgtcagttctcttgatggcttcattaaggcagggagcaaggccgtcaaaaacacagacgtttcagtgtttccacaatatccagaggctgagactgataagcgagtttagtccttttctggcaattccatgcaactgatcactacatcttttccaccagagcatggtattctcttcatagacatgaggagtgaaattctctttaaacaatcagctacatgggcatcttgcttcttttcctcgtcttctactatcttgcacgtgtagcatgcccaatcatccgtaatcgtcccagtccatggtggtgatagacaatgagggtgaacatgccgagaacaaccagaacaatgaagcaacaggctctgctcctcctctgtgttgcaaatttgacacatgtggaactcctcatcagattctgttgattcatgatctgactcagatggagaataatcatcggtgtcgtcatcgctcacatctaccactttcgctactttcctaactcgccctttaaatgatacatccagtgcacgtttacgctgaatctctgtgactgtttcttcaccttgctgaaaagaatcaggttttggaggtaaagggtagttttcttctaccaacttaagaagaagctcccgagggccagaaacaaagtcttccatttcaactccatattttgtgacagcttcttcagttctagcttctccagtgctctgaaggccaatcaccacacatttgttctctgccaaggcctctttagctaacctcacaacagcaggtacctttgcagacatgcacatgtgcctgaagaaacgctgatggctggcccaatacaatcgccatatttgatttgaattgccatcagcaaataattcacttgctgataaaagttcaaggcgcagttcagcccagaattcagctgctcttctgtacatgttctgctttacaagaatgaggttaaactttgtcagcagcttgaaccagtaatttcttgcaaacacccagctcacgaggagatggtcaatggtttccatttcctggtcacaaagggggcactgatcagggtgatcaagccccctcctttgaagtctgtcagctgtccaacacctctgcagcgctacaagccataggaaaaatttgcatttggggggggggggaccaggagtgccaaaccctgtcacaatgctcaaagtatgttgacccaataaataaactctcgtaggctactttggcagagtatttgccattatgggcaaacctaaaaatgtgcgtcaacaaacgcagatgtctggccctatacaatcgccatatttgatttgaattgccatcagcaaataattcacttgctcataaaagttcaaggcgcagtccagcccaaaattcagatgctcttctgtacatgttcatcattcattcctcaagtggagcctccactatataaaaatcagcccctttgtaacttaatgtacggcatacatacatacccctagctttcatgtccatggcaacaagttcaagtgctaccacaccacctctctcaagagcacctaacaatcgtgggaaagttgcatattatgttccttcaccaccaagtgcagtacgaaccatagag

SEQ ID NO: 3315 - DNA, 1980 bp, Zea mays
  Clone ID: TF_ZmC4701_1
tgggtacctcgaggccggccgggatatcctttctccaaactaatttgtctgtcttgattactgctgcagcaacggtcgtccactcaaacaagtcaactttagacacatctgctaggcccgatgtaaatgctgtacagagttccaatcagacggtgaaaaaccatgacacaaaaccagtggcagttcaagccgcgacaggtaaccctgttatgggtcatcgtgctacaccaggcgtggcatttgctccaccaaaacctactttcatcaatcacaatgagatagcaaagaatgttctacaatttcttcaccaacctgcaaaccatcctagctggactccaccatcaactgagtacatgcattctcgtttgtgctgtcaaatatgcaaagttgatatcattggtacagacaatttacttgtttgtgatgcttgcgagaggggagtacacttgaaatgccttcatcagtatggcaataagggcgtccccaaagctgagtggcattgttctgcatgcctgactcagagtaagggaaaacccttgccaccaaaatatggcaaggttacaaggactgtagttgcatcaaagactgctccacctggtggtggagcacagctttctttgcaggaatcagcagaaaacatggctgcaaaggaaaatcaccaaaagttggctgcaaatggaaatcttatgaagccattctccattcatggtggcagcacagtacccgacagtaatgtattggcactgagtgctgtcatggctggttcacaatcacaattagtttctaccttgagaccatcaatagtcgttaaagctgaaacaccctctaatggaaaggaaggaactgggcaaccatgcaatactgcaatacaacctaatgtgcgatcatcttctcttaacaacagattgagaagtgattcctgtttgaaccctgctgattcagcaaatgaaatcatgcatggtaagcatgctgcagaaatttctggtgttgaagcaaaggtcaagtctgaagcaaactctgaggttgttgtgagtacagatgaggaattggttcatagcagtggaacatcaatcgaaactgaacgagccaaggttgtcgctattgaagaaaacagggcacaatcaacctttgagacagataaaatgaaagttggggaaacaactatcaacacaggaacaacagatcaatgcatcaatactgaagaaaagctccccagtttagcaacttctgaggcacacacaatcactgacgtgaagatgactagcaatacaggaataccagtacagcaacacaacattgctactattgaagagaagacccagattgatgcagtgtctgatccacatccacatgcaatccaagatattcaagatatggaaatgggcaccaacaatggaccacccatagatcaaacaagcagtcttgttgaagaaaacccccctggacaatcctcttcaattgctgatgcgtgtgtcactgctaatactggaataccaacagatcaaacacagcatccaaatgagtcaactgaaaatgcagtaaagaaatctcccaacagagaactatataaagaaaaaccgggctgcaacataacctcagatattacccaaaaagtaacttcaaatggcatcatgtgccctgaggacaaaactttatgtgttcatgaagataaagcagtgggttgtgacacagaagcaaaagaagaaaactaatttagtagcaggttgcatccaattttcattttccaggtgtgtttgtaatcaaactagttattagaagtcttatgtctgaaaatcttgcctattttgatttatgctgatagtgattcttttaaagtacattatttgaaactgatgtttgtagttattctttacttattatagatatgtcaatcacattagcttatttgaactcatggtaataagtatgcttaagtgacctttaaggcctgtattttattgcagcacatgcttttccccc

SEQ ID NO: 3316 - DNA, 2880 bp, Zea mays
  Clone ID: TF_ZmC299_1
cccgcccgcccagcggcaaacccaaaattcccaggctccgctcgacctgcctactcccccaccatcccaaaccccactccagcctccgccgtcatcccctcctcccgccaatccgccacctgtcggacgcccgcccgtccacgaaaccctagcccccagaccatcccactcgcaaccgccatgccggacctcccctgcgacggcgatggcgtctgtatggtctgccgcgtcgcatccccgccggaggtcgacctcctcacctgctccacctgcaccacgccctggcactctccgtgcctctccaagccccccgccctcgccgacgccgccagctggagctgccccgactgctcccccgactccgctgccgtcgccgctccctcaggccccgccaacaccctggtccccgccatccgcgccatcgaggctgaccacacactctgcgaccaggagaaggcgcgccgccgcgaggcaatcctcaccggcgacgcccccgaaggagcggacgacgatgacgacgaagcgtccgacgatgcccttgagatcgtcggcaagaacttcagctgcgttttctgcatgaagctccctgaacgacccgtcacgacaccctgtggccataacttctgcttgaaatgcttccagaagtggattcaaaatcagaagaggacgtgtgggaaatgtcgggcgcagatcccggccaaaatggctgagcagccaagaatcaactccgcactagtcgaagttatcaggatggctaagatttcaaagaatcctaactctgctggctcagcagttccatatcaacggaccaggaagagtggtgatatgcatgatgacggcaacggcagcccctgctgtgagcagcggccgcagggtgactcggagcagtgtgaatgccacgggagctgatgacagtccagcgaggaggaccagaagccgtggcagagcatgctgaaggtagtgggtgctgggcgccctcttttttgggtgtggaacctttgctgtgcgcagtgttgcagccatttcttttggtttgggggagaccgacctgctacaggtattccccatgcttctttcttccaggatgcaattcctatttaatttcaaggtagctgctgcactcgatctgcgagatgcaattttgttaactggcagccaggtgttggcttacgccatgattttggcacaacaggttcctagagagaaacaagatagctgatgttcttgcaaaaaaaaaagcaagacgggcaactaccccaaatccatgccttttctctaggggcttcattctccaacctgtaatatctagccatgtgttttgaaacttggattgttcggggcaacatgaccccccatctttgtagcatttgtatgatgtgataattgttgatatatgcttcgtgtcctccaattgctggacctttgtctcactatattgtcttaaaaggtcgcacaaagagaagcggtcctcatatgctcctgaatctggtgtgaggtacgacggggtttacaggattgagaagtgctggaggaagattggtattcagggtaagttcaaggtctgcaggtatctctttgtacgctgtgacaatgaaccagctccttggaccagtgacgatcacggtgaccgtccaagaccattgccaaagataaaggagctgcaaggtgcaactgatataacagagaggaaagggcgcccttcatgggattatgatgataaagatggctggaaatgggtggtgcctccgccagtcagcaggaagcctgttctatctggggatcctgagaccgacaagcaaatccgtagagcaacaaagcgtgttcatttgtctgttgctgaaaggctgcttaaagaatttgcttgttcgatatgccgggcggtgattaaagaaccacttacgactccatgtgcccacaacttttgcaagacttgtttgcttggggcatatgatagccagtcttctataagggaaagaagccgtggtggtcggactctaagggcacagaagattgtgaagacgtgcccttcctgcccaactgacatctgtgacttcttagagaatccccagatcaaccgagaaatgatggagctgattgagactttgcaacgcaaggctgttgaagaagccaagatgacttcagatgatgctgaggaatgtggtgatggtgattcggaggaaaatgatggtgatttggtgaagggagaggatgttagtggtttgaatgagggagagcaagacagtgcagacgctgatgctaatgttgaaggttctgtgaagattgtggttgaaatcaaggaggaaggaaaagatgataaaaggtcaaagatgggcgcgactgaagtggtggatgtgttagttgatgaagatgctgtgaagcagacgaaaaagcgcaaggttgatgctgaggctggcaccaacggtggcaagaggatgaagagcagtagtaccgtggaagaggttgctgtgtgcgtcactcctgtgaaacggagcaggaagagtggtgatatggatgatgagcgcaacggcagtcctgctgtgagcagcggccgcagggtgactcgcagcagtgtggatgacactggatctgctgatagtccggcgaggaggactagaagccgtgccagagctgatgctggttgctgaaggggtagaggaagcggggaggcggcagaaccgcagaagccagccgtgtcttttttgggtggttgtacgtacatatactgggagccttgccttatattttggttgaggggtgcaagtcagatactgtttgctgtgcacacctgtttcttttggtttgggagaccgattgctgcttcctggatgctaagcgttcatccaagacccttaaaacattcaattcaaatcggacgcgggg

SEQ ID NO: 3317 - DNA, 471 bp, Zea mays
  Clone ID: TF_LIB3632-035-Q1-N6-H10
aggatcaaaataatttaattaaatcaacaaataaaaggcatatggtaaaagaacaggaatcgaccatgccgccccgccccagcaacaatggaaacaaggggggggggggttgggttaagttgaccaagacaacacaaggactgacctaccaacaacggcatgacatgccacactggctagttacatagaacaaaccacagcaaacactggccacctttgctctcgccagggcaagggctgattcgccacaaaagcagcacatctccccgggaggggggcactcaattttcaccccgtctgccttaatgattcagccttgggctaaaaatttgaggaaggggcatatacattggaaaggctctttgaaccattttctttcaaacaggctgagcaaacaaagggatctagttttttggcctgtgcaatggccatagccatgcaagagggatggaaccaggccttgcaagcttc

SEQ ID NO: 3318 - DNA, 453 bp, Zea mays
  Clone ID: TF_LIB3069-027-Q1-K1-H9
aaaaagtccaggagtttcagcacaagcggttttatggatctgacatgtccttaaaaggacgagttagtgaacttggaaaaaaggaagacgtgagtgaagatgggggtgatgagtatcctccaccagattcagatcatgaatcaacagaatctgatgaggacttctatatgtgtcagatttgcaacactgaagaggagaaaaactcattgttttgttgctgtatttgtgcttcacgggttcaccctggttgcctcactccaccttcgactgacatcgtgaatgatgattggtcatgttatggttgcaaggagaaagttaaaagctacttaaaagaaagagatgcttacttgactgaactctcaaagaggtatgatgctgcattggacagaaagtcaaaaattcttgacataatcccgtccttggatttacctagtaatcctttagatgatatca

SEQ ID NO: 3319 - DNA, 550 bp, Zea mays
  Clone ID: TF_LIB3960-010-Q1-N6-B6
ggcgcctcccatccccgcccctaaccccaccgatgactgggtggacggctcgtggacggtggactgttcctgcggcgtcacgttcgacgacggcgaggagatggtcagctgcgacgagtgcagcgtgtgggtgcacacgcggtgcgcacgctatgtccgcggcgttcacacatccttctcgtgccacaaatgccggaggtccaagcgtgtgccttcctccgccgacgaggccgaggttgctgagctcctcgccgagctgccaacccaccgcccgcctccgctgtaccgccgctgggccgaggtcccgctcccagcccgcgtccacgtccacgggcttcctggcgggggcgacggcgctcttttccgcggcgccccggccttttccgccgccctgtggcgctgcaccggctacgtccccaagagatttggcttccgctactgcgagttcccctcctgggccgacgataatgatggggctgatgctctttttgcgctggccagagagaagcccagggagatgacggatgatgttttgataggtactgaaccg

SEQ ID NO: 3320 - DNA, 2992 bp, Zea mays
  Clone ID: TF_ZmC10069_1
cggaccggcgaccaggcgcgtgggcacgggagcaagcgcccgcggcgggccgaggaggaggaacaggaggaagaggaaatggaaccgctggtgggggaggaggaggaggtggcggcgctggagggggaggactattgcttcgtctgcaaggacggcggtgacctccgcgtctgcgatttcaggggctgccagaaagcttaccatcctgcttgcgtggggaaagatagcggcttcctcaattcagatgaagaattcatctgtgaatggcatacttgctttatttgtaaagggcgttcacgttattattgcttttgctgtccgtggcaagccttttgtcaaaattgcgtgaaacaagcagaattcgtcccagtcttgaggaagacaaagggattctgcaccaactgtttaaggatggcaatcatgattgagaagaatgttgatgttgactccgatggggagagggttgatttcaatgacagggcaacttatgaatttttattcaaggaggaactacagttccagtactccaaagtgtactccagaaataaacaagagatgttttgctgctcttgttcgccataacattgatttaatctacttgaagaaatctttggttgtggatctactaagggagccggatacatttggcagcaaagttattggctgtttggtgagaataaagattgatctcaacgattataattcctacatgcataaaaaggtgcaccaacatagaaagttgtatcagcttggacgcctaacaggcatggctatgtgggctggggttcaaaagagctcatggagttcctttcctctataggcaaagatacattgaattccctagatcaacatggtgctactgaagttgtgaaggtgtacattcaacaaaaaggtctcttagcaagagataagaaaaaacttgtcatatgtgatgacaagctcaagattttgtttaggagatcaaaagtgaggtacaacaggatatatagcttgttaggtaagcatattgctgtgaatatgacatcagaggatgaaacttttgctaactctgatgataacaatgaaacatttgtgagaaagaaagctcgtattgggaactacagttccagtactccaaagtgtactccagaaataaacaagagatgttttgctgctcttgttcgccataacattgatttaatctacttgaagaaatctttggttgtggatctactaagggagccggatacatttggcagcaaagttattggctgatctttccttggaaagtttatcggaagaaaaacctgaagttaataaggcccacaccgatggtaggtacagctgtaatacacaatcaaaatcggagcactacagctgctattcctgcgctaccaaagtatttgcatcgccatgctgccactgaagccaataatgctggtgatatttcatctgttcaggagctggatgttggatgaattaaagctagcacggatgttgatacaactggaacagatgtccagcacgggagcattgaagctactaaagccaggggatctggaggagaaagcaagaagtttacgtagggagatagtgaatcattggatcagtaaagaactccagaggctagaaagattaattgacagggcgagtgagaaaggttggcgcaaggaaaagtttgaataccttgataagaaacaactcttgcgcaagccatctgaacaacaacgtttacttgaagaggtgcctcaagttattccagagacagaagataataaagatactgaatttcaagttacaggacaagacaaacctattcaaaagagtactgtcgctttacaaggtaccaatggagagagcattgtttctttgaaaaaaggctcagaagaaaaatgtaaacatttgcttctatagtatgtgttaaaaaaaaatccatgcaaggcgaacattgtgatgtttttattgtaggtacatatgtgacaagggcttcttttttgaagagccacacagggaaaaaatccaaaggtactgatggggagagagatctttccttggaaagtttatcggaagaaaaacctgaagttaataaggcccacaccgatggtggtacagctgtaatacacaatcaaaatcggagcactacagctgctattgctgcgctaccaaagtatttgcatcgccatgctgccactgaagccaataatgctggtgatatttcatctgttcaggagctggatggtgaaggtgttaaagctagcacggatgttgatacaactggaacagatgtccagcacgggagcattgaagctactaaagccaacgctgctggtgatgcacctggagcattttttcaaaagcagtgtgctaaagctgctgatgttattaccattgacgacgatgacgaggacaacagtcatcgttgttataaagaagaacaaacagcagtagttgatcttgaagctgattatgctggggataaccatcccgtgcagcttgaggcaaatagtcgaggccataaacacgtgaaggtgaaggagcgcatttggtattacattgatcctcagggtgatgagcaagggccatttacaatgcagcatctgagcatctggtggagcaatggcttcttccccggcgacttcagggtctggagaacaggccaaactagtaatgacgccatcttgctcgtggacgcactgcagatgactaggtaggctagttaggagcctcgtagaagactagatgtatttatgtatcgcggaaaaagcgggggggcttcgaggcagatatatgtgttctgctggggtgtacatccttctgtgttatatgatatgatgatgacatcctatccccaccatcacctcacccaccaatcaaaaacatcttgccaaacaaaacaatggttgtttgatggcaaagaggatttgttgggatgaaatatttgtggactattcagtatccctgtgctgtgacaatgctactgaaaatctggttctttggcatgttaggctgtttt

SEQ ID NO: 3321 - DNA, 1864 bp, Zea mays
  Clone ID: TF_ZmC1921_1
aggaacgtgagcggtgagcaaccctaccccaggcccagcttgcgctctctctctctctctggacgacgacgcctacgccagggccccaggtcgctgccgccctacgccaggtccccttcgccggcgacgagcaccagatgattagctcattgagcaacatacagcaacagatagctacaaatcgtggcatatgactccaaaatggagtgcatgctcttcaaatagctacagagaactacctttacatgaaaatggagagtgcaaatcaaccttaacagagtcagtcccttcacctacaagctgttttggcttacacactgcaaacacaatgtgctccttatcttcacaaaagaaggatggcaatgtttataaaagaaggaagatggataaggattcaaattctcctataacatttgaagaggctaaagaaatggcaacccaaagttgcacaatttctgatgaccactcatcattactgctacccattatctcctcagagtcagaggcattgcttttaaattcaacagcaggcgtggcaggtcctatcctagattgtgaggagcctgctgatgttccattggagccaaattctggtacagatgatagatgcttcatttcaaacatgtctccaacttccatgactccggacaaaaagaatgctgctgaatgttcctcatcgaatattggccctacagaatcaattaccgagcatatttcaccaagggatctttgcattgccatactgatgaaagatggactaataaatgaatcaagaacaagaatggcacataaagaggaattcactgacaatgatgctaaccctttgttggcatgcaataattgtggctgcttggaacattcattgaagatgctgatatgcgattcttgtgaagcaggatttcatttgtcttgctgcattccttgtattaaggagctacctactgatgaatggtattgtgctccatgcttgtgtaagaaacccaagagtctttatggcaaactctcagagggcaggataaatccttccaggaatactaacacaaggcctcatgggatgagtcacatagagtacatgctgaaggatgctgaaccatatgtaactggggttcgacttggtagagattttcaggcagaggtgccagaatggtctggtccatcatccagcagcgatgtttactttgacgagccctgtgcaattgattctgcagaactaactacatttaatttgtgcaaaatgagtaatcaaagtcattcttccattggtaattggatccaatgccgtgagaccttgaatccaggagattctgacaagcaagttgtctgtggaaaatggagaagggcacccttatatgttgtacagtcagataattgggattgtttttgttgtcttctttgggatccagtccatgctgattgtgctgttccacaggagttgaagactagtgaagttctaaagcagctgaagtttgtaaacatgctaaagaatcagctggtggaccaaaaccagaagcctgcttaaataaatgccagtaccagagtgggcgattccttaagagaaggatacccattatgatggtatgaatgagttgccgtatgtggcgttctcttgtagtaactagccgtctgtgaacatgtgagaactatgttgttctagcctgttaaacgaaatgatctgtactgtcttctatagggtcttggtacacaagagttgtacaacatagatctgtctgtgcagtccagggagcagcgtgtcgctactgctgtgatcgccgccaaacgatcctgtgatcctgcgccaagttttgtttcttggtaacttctggtattgcgcgtgccactgcatggcgtggatgacgttttctgt

SEQ ID NO: 3322 - DNA, 1914 bp, Zea mays
  Clone ID: TF_ZmC3525_1
gatgaaaattgcagcccacaagctgaatatgaactgcaggattccaaaaggagtaggtattcatctaatgatctgaggtcacatgtggctctccacaaaagaacatctggtggaaccaagaatcgaagaacaagtgtatcccttgccaggattaagaaattcgggagcaaatcagtatgctattctggcagtgacaaagacaatgctgtgctagcccatgaagtgaatgctaggagatacagtggaagactcagctcaaattctccatgctgtgtttgtgggatctcagacctggagccttgcaatcgattaatagagtgcagcaagtgctatatcaaagtgcaccaagcctgctatggtgtactaaaagttcctaggggtcaatggttttgcagaccgtgcaagaataataccatggatacagtctgtgtgctgtgtggttatggaggtggagctatgacaagggcactgaaaaccaagaatattttgaaaagtttgctccaaggtttgatgaatttagaaaggtcagaatattatgttgattccttaggaaatgcaagcagtgagtgtacaagcttgcaaaatccagtagacagtgcacatggggataacattatgaatgcgaagaacatcaccagcaattcctggacctctggaaaatactattcgagtttacttggaccacaaccaatgcagtgggttcacatggtctgtgggctgtggacacctggcacaaaatgcccaaatgacaccacaatgagcgcttttgatgtttcaggtgcttcacctgccaagagaaatactgcatgttcaatatgtgacagaactgggggctcatttgtcaagtgccgagctgtaaattgtttggtattctttcatgcttggtgtgcacatcagaggggtttgctgcaaagtgagcctgaaggcgagcacaatgaaaatattggcttttatgggcgatgcgtgtctcacgccattgttttttctagtcacgttaatcctaagaaagaatactttagaaacaacaattggacatgtgcacgtacagagggttttaaaggccgaaagggagaaggcttttctgatagtagccataaaaaatatgaagagtacagtggcgagttcggtgtttcccaagaacagataaatgcttggttacgcataaatggttcaaagccctgcggacgaggacagaaggagtacatccattacaagcagttaaaagggtggaagcatttggttgtttacaaatctggcatacatggacttggtctctacacatcagtctttattccacgcggctctatggttgtagaatatgtgggtgaaattgttgggcaacgggttgctgacagaagagagatcgaataccagtccgggaaacggcaacaatataagagtgcatgttatttctttaagattgacagggagcatattattgatgccacccgcaaaggtgggattgcaagattcgtcaatcattcatgccagccaaactgcgttgcgaaaataatctcagtcaggaatgagaagaaggtaatgttctttgcagaacggcacataaacccaggggaggaaattacgtacgattaccacttcaaccgggaagatgaaggccagaggatcctttgcttttgtagatcaagatactgcaggcggtacctcaattagtttccggtgggcgtaacatgtctatatataacttatatatctatatgtatatcttatatatttacaaattacaattgcgattcatgcctgctgtatatgtaggaacttgcatctagaactgcctgtttatcttttgtgaagtcaaatgagttatcagctgttcatgtgcccgaaaaaaaaataaagtcacgtgcccttttttttttttttgggctttttttctcctaaatcttaatccattct

SEQ ID NO: 3323 - DNA, 629 bp, Zea mays
  Clone ID: TF_ZmC62111_1
ctggttggaagagagagaggatcagatgatgatgagctcaatgaagctgtggtggccaggtctgaaccgaaaaacctagttcaaccaaatgcatcggtacccttgacctcacaaggctttaaccaattattggatcaacccgggccttctgatccttctgttgtatacaaggacagtatctgcaaccgatgtgggaaagtagcaggagctggtagcgttctcaaatgttacaggtgcatgctaccttgccacatttcatgcattgaggctactggttcacccatttcaactggaaggtggtgttgtaaaaactgcagcgctggcactaaggaaccagttgaaggagacatggtcttagcccatggcaatccaaattgcttgcatgaaagttgtgtcgtctgcgacagacttgcggcctgcaggtctccaaaatgtgataactcaagagcattggttatttccagcgtggacccagagattgatacatgttactcatgcaagatatgtggaggcaccgaagaggatgagaagaggttcttgatatgcggcaacgtcctctgccgatacatgtactaccacattgggtgcctcaagtccatgcagatctctaccagtgtagagaggggcag

SEQ ID NO: 3324 - DNA, 2255 bp, Zea mays
  unsure (1)..(2255): unsure at all n locations
  Clone ID: TF_ZmC89463_1
gctcgtgggggggcctcctcacaaaaagactgcaccaaagaagctgtctcccaaaaagaagcagaagatacaaaagaaacaatcacgcaagattgagaccaggaggaatcagatagttctgaaatgcaaatagaaatttggcaaaaggggtaagcgtggccggcccaggaagaacccaacggatctgtcaaagaatgaaccatcaaagatccatgaaagtgaaccatcaaatgtttccaaaaatgaaccagtgaaacgtatatcaaaacgattacatgataaatacatgaaaagtaactcaaatgtatccgagaatgcagctagctctagcaagaggaagaggactgtttcacagtattcatactggttgaatggcctccgatggtcacaaaatccacatgatgaacgagcaagaagtttcaggaaagaaagagtagtttttccatcagaagatgctgaaatttctgaagtcagcccagtatgctgcttgtgtgaaaaatgctataatgaagaggatatctatattgcctgtgaaaaatgtgaagactggttccatggggatatatattctgttaacattgagaatgtgaacaatctcattggtttcaagtgccatagatgccgccggataagtctacctgtctgcccgtatgcagagactgtaacagttgtcaaaggccagtcagatgaggatcattgcatcaagtttgtagatcaatgtgttggcaagtttgtggaggatgaggatcccaattgtcccaaagatcttggtgctccgggtagtctgcaagagcttcatgatcatgaaattgagcaggggctcaatgttcatattactgagatagaattcagttacgataactgtctagaggagctgaatgatcatggctgttcgaaagagtttgatgctcatagcactgagaaagatctagaggatgataaaagtttgaaaaaggtagacatccataatgagttgagggcgcttgacgatcttggctctgagaaagaacctggtgatcattgtaatccgaaaagatctcacagtcacatcanatctgaacctcgaggccggccgggccgggtgatcaagagatgaaggacaataattgtctaaatgaactagatggagacaacaattggaaagcactcgacagctataacagttggaaactgctcgacagccataacagtcaagaggagcttgactgtactacaaatagcaagttttctcctaaagaaataccatgtcctatggaacttgacggttttagtagcctgaagcttgtcagtcataacatcttggaagaacttgataatcataactgtctaaaagagaacggtaatgaaaatagttctaaagagctggacaacaatggaagtccaaaagattcaggtgactgtctagcagaacacttcaacagcagtaggatatctggcaatgaggcactggtccttacacctgaaactgattcggtaaatgaatctcttggtttgcaatccaaggatgatcctgggaagtctgttcctactgagcatgagattgatcttcaggtggtggtgactttatagtgtactttggacagtcagaaaccttccagcctcagcatgagtcccattagttccactggtcatttcttgatgctgttctggttgataattttgttgaccttgcctcattgccgtaatctacaataaggaaaaaaagctattctttatttcctttgggaaatattctgatctgactagccaagcgatagaataattaactcttgaggttaagttatattattcttaatagggctgacatagggaatagttagggtttcatttcatttcctttccaagcttcacattgcctgtcagaatatggagtcatgtcgcccacgattatgcattgatttggatccctctaagtacaagtgactggtatttggctgccctgcagtaatatatgatgttcaagggagatagcagccacagccgccgccaagcatgaggaggcattatattccattccccatggtttctttttgtgggccccttagatgttgcacaagatggatgtgccaaaacctgatgattcattctttcaagtttgctcctaacagtcagtcgcaatctttatctgtaaaaaatgctccaagggaactcgtctggacagggttaattggattttgtataggtttgggttatcagtcttcctagttacagagttcactctagcatggaattggtttgaacaatgcaaaaataat

SEQ ID NO: 3325 - DNA, 564 bp, Zea mays
  Clone ID: TF_ZmC1247420_1
ggaaggcattccctgtgatatgctcttggacagcgtctacacactgcaagctgaagtgctctttgagctttgttctccatgtggccacatttgaaacaccaatgtatggggcacggaaatgacattcccgccataatccttctttccaactcaccatcagtggcattaggatccaataattgtgcaatgcacttagggtggtaaaaatatccacaagatgcttgattgcattgaaagaccttagcatttggcccatgggatggttcaagctctccacatctaaaacattggtgttgcttatttttgcagtttgcacatagataagtaccaattctctttacttctgctgaagtgtaatgaagactttcacatttagattctctgccatctttctttgtggggtggaaagacctcttgcatggaccgtcacagctaagcaaatgtcctccatcatcacatagcgcacatatttgatcggtaacgtcatcatcactgctgccatcaccatcatcactgctaccatcacaatcatcaccactgtcatctttgttaccataattgtta

SEQ ID NO: 3326 - DNA, 819 bp, Zea mays
  unsure (1)..(819): unsure at all n locations
  Clone ID: TF_LIB4766-109-A1-K1-G9
gccggccggggttcaaaaaaaaannaaaaaaaaaaaaaaaaaaaaaaaaaaatccctcctcctccgttaattctccgctctccatttattcctttccagttccgccgctccattcccagctccccccaccaagggcaatccctctccgccatccaatacaatcacgcctgcgcacacgcaaccccagctcaagccccaagtccaaaccctaacccggcggcggaagatatggccgacacggggcgcgacgccttccctgacgaggcggagcccgcgttcaccctcgacgagtacatggaggacatcgaggccgtggagctggaggcggatttggtgctgggcggggacgagggcaaggagtgcacctacgccggcggatacctcaagcgccaggccgtcttctcctgcctcacctgcgtgccggatggagtcgccggggtctgtaccgcctgcagcctcgcctgccacgacgggcatgagattgttgaactttggacaaagcggaagtttcgttgtgattgtggcaactcaaagtttggtggtcacctttgcaaactctgccctgagaaagattctgagaattcagcaaatacttataaccataacttcaaaggttcctattgcacatgtgggcggccttatcctgacccagaagctaaggagcaagttgaaatgatacaatgctctatatgtgaggactggtttcatggggatcatattggtcttaactctattgaagagataccaagagatgaggaaggggagccactatatgaggaattgatatgccacaaatgctcatctgggttgcatttcttg

SEQ ID NO: 3327 - DNA, 621 bp, Zea mays
  unsure (1)..(621): unsure at all n locations
  Clone ID: TF_LIB3912-027-Q6-K6-F9
ttctcctngaanatacggtaccgggatcggtctgagccgccgaggcccgcgcaggcgcttccttatatatcgtttcttggcgtggctaaggtggtggtgaccatccggtgaatatgaacattgtgtgtgaagtatgtggagatattggttacagacaacttctgctatgttgcggagactgtaagcgttatgctgtgcaccagtactgtttggacaaagttgttttcgatgcaacgttgctagaatggttctgttatgaatgcctacaaaggcgtggtgaagttacttgcgtcgcatctctagaacaggtgtcaagtgaaagcccactaagtcatgctcattttggtcctctagtacatcagcgtactactaagagggtggagtcagtaacagggccatattcacccagtgatgactgtgaggaattattttcctaccctggcatagaaagcatcccaagtgttcaagaaataagtgtagatcccattaagacttcaagtatttctgaacatgataccatagaagcagctgcaagcagtgaaagattcacggagtgtcaaaaggctagctcctgtcgcgaggngataactgtgaagatggctatggcgccctcatcatatg

SEQ ID NO: 3328 - DNA, 849 bp, Zea mays
  Clone ID: TF_ZmC2557_18
aaaagattggcgacgaagcaaggaacgcaccccgaatcccaactcctgtgtccgccatcgcctcgtggcggtcgctcctgctcctgctgctgctgctgctcccccagccgcccccgcccggagcacgccgccggcgccgacgtcggcgcgtcgcatggatatggcccccgcgtctgtctacttcaacccgcgctcggtcgaggaaatcttcaaggacttctccggccgccgcgcggggctcgtccgcgccctcacctccgatgtggacgatttctgcagattgtgcgacccagataaggagaatttgtgtctctacggccttcccaacgggagctgggaggtgtcgccgccggcggaggaggttcctccggagttgcccgagccggcgctcggcatcaactttgcgcgcgacggcatgcagcgccgcgactggctcacactcgtcgccgtccactctgactcgtggctcatctccgtcgcattcttctacggtgcccgcctcaacggcaacgaccggaagcgcttgttcagcatgatgagtgatcttccttccgtcttagaagcattcgcggacaggaaacacggcagagataggtctggggttgatagcagcggcaagtccagacactcatcaaagagaggaaaagatggccatgccaagagtttcagggcagcagctcctgccgccaaggagtatgacgaagacgatgacgaggaagacgaggaggagcacacggagaccttttgcggaagctgcggcggcctttacaacgcgagcgagttctggatcggctgcgacatctgcgagcggtggttccacggcaagtgcgtgcggatcacccctgcgaa

SEQ ID NO: 3329 - DNA, 740 bp, Zea mays
  unsure (1)..(740): unsure at all n locations
  Clone ID: TF_LIB4980-054-R1-K1-A2
tcgaggccggccgggccgggatggtctgccgcgtcacctccccgccggaggtcgacctcctccattgctccacctgcgccacgccctggcactccccgtgcctctccaaggctcccgccctggccgacgccgccagctggagctgccccgactgctccctggactccgccaccgtcgccgctccctcggcccctgctaacaccctcgttgccgccatccgcgccatcgagtccgacaacaccctctccgaccaggagaaggcgcgccgccgccaggccctcctcgccggcgacgcccccgacgtcgcggacgacgacgacgcggtcgacgataccttcgaaatcgtcggcaaaaacttcagctgcgttttctgcatgaagctccctgaacgacccgtcaccacaccatgtgggcataacttctgcttgaaatgcttccagaagtggattcaaaacaagaagagaacctgtgggaaatgtcgggcaccgatccctgccaaaatggccgagcagccaagaatcaactctgcgctagttgaagttatcaggatggctaagatttcaaagaatcataactctgctggctcagctgttccataccactatatgcgaaatgatgataggcctgataaggcatttacaactgacagagctaagaaggctggaaaagcaaacgcatcgagtggccagatctttgtgaccattgcacctgatcatttggncctatacttgcagaaatga

SEQ ID NO: 3330 - DNA, 1463 bp, Zea mays
  Clone ID: TF_ZmC3769_1
tggaggtcttgtctcaacaaggtttgtgcataaaatgtggtgaaggtggtcagttgttggaatgcaatggctgttttttagccgcccatagcagctgttttggttcatcggcgacatttgaaggaaccaattttttctactgcccggtatgcttgtataagaaagccactgaagcatataaaaaggcaaagataacatattgtgaaactaggaagaaccttgttgctttccttggcacagcacaagccaccaatcaacctgacaaacaactaaatggggcgcagccaggagctgccaacagagatgaagagcctcatgatgagcaacattctaaagggtgtggcgcatcaaaaggggcccatgaaaatgaagtatacaatcttgctcatcaggatgaagagcatcatcagcagaggaagaagcagaaaataaatgctataggtaagagttatcctaaggaggtactcactgagaaggttcttttccagaactctgatcctgcatccattaataaacattcagtgctccagaataacaataaaacaccagttaaggatccagagaaaaagcagcaagcgggagacgaagaagctcgcaaagaagctggtaatgaaaactcatctcatgaaacaggagcttcatctccgagaagatgtgatcctccttcgaatcaggacgttgaggctgaccaggacgatagccttacaacttctaatcaatctggtggttctgatgaaatagaagctacatcttctaatgactctgccaagcaatcatcacccccttggcgtggtatgggacacaacaaaaaaggattgcacgaaaaggagccagctgtatcaagtaaatctagaaaaggtattgggaaacaggatcaacatatgcatacttcacgaaggaaaaaaaaattgcacacctgcaaaagcgctattccaatcctgttgcgccacctggaagacgcaaaaaactctgttggacagaaaaagaagtagctattttgagggatgggatggcaaaattctctccacataataatggtaaagtcccactaacccagatactgcaatatggccgtcgtgtgtttcacaagacgcgtctgccatgtgatttgagggtcaagtggaggaacatggagaggaagaagtgggcaggcttactgatgctggcaatcttacacagtgccacacacacacacacacacaactgttgtgtgtcatactgaattactaaccacaccttcatttgtttgtgtccatctgcagatctgatgccgtcgacatggaacactgatgtggtactagaacatagcggaacactgatatggtactaatagcgaatggaggagggtttcttctaaaatagtattttgatgcacagggtgggcatccttttgtgactggttgtgtcaacctagacctactatgcccgtgagagagattgctaaagagtcaactttcttttgg

SEQ ID NO: 3331 - DNA, 1819 bp, Zea mays
  Clone ID: TF_ZmC8733_1
caggccggccgggccggggattccctctctaccggatcccccccctccctcctcagcttccattccctctcctccgttaattctccgctctccatttattcctttccagttccgccgctccattcccagctccccccaccaagggcaatccctctccgccatccaatacaatcacgcctgcgcacacgcaaccccagctcaagccccaagtccaaaccctaacccggcggcggaagatatggccgacacggggcgcgacgccttccctgacgaggcggagcccgcgttcaccctcgacgagtacatggaggacatcgaggccgtggagctggaggcggatttggtgctgggcggggacgagggcaaggagtgcacctacgccggcggatacctcaagcgccaggccgtcttctcctgcctcacctgcgtgccggatggagtcgccggggtctgtaccgcctgcagcctcgcctgccacgacgggcatgagattgttgaactttggacaaagcggaagtttcgttgtgattgtggcaactcaaagtttggtggtcacctttgcaaactctgccctgagaaagattctgagaattcagcaaatacttataaccataacttcaaaggttcctattgcacatgtgggcggccttatcctgacccagaagctaaggagcaagttgaaatgatacaatgctctatatgtgaggactggtttcatggggatcatattggtcttaactctattgaagagataccaagagatgaggaaggggagccactatatgaggaattgatatgccacaaatgctcatctgtctgccatttcttgaaattgtatccagatacaatttgggcttctggtaagccgaatctggcagtggaaactgatgcaagtgactcgaatgtgatgaaaaaaccttcagggcatgctgaccctgagaaacatgaaaatggtgctcttgttgataatacggttggcgagaagacctctgttgagaatgattctacaaaagctattgcagttcctgaggaggccaatttgggtagcagttctggcaacaactgcaagttaggagtggatgtgaatacaatgccagctattacagataaaagtgagccttttttcatgtctaaaggttggagggagacactatgcaggtgtgaaacatgcttcaacttctatgcacaacgaggtattgcatatcttattgacaaggaggattctattgaggaatacgagaagattgccaagcagaagagggagatgaaactggagcagcagcaaggagctgagacaaattttctgaattcacttaatcatgttcagaagatagagatgataagtggcatcaatgacatgaagaatgagtttcagtcctttctggagtccttcgatgcatcaaaaccggtaacatctgatgatatacattcattcttcgagaatcttgctaagaagaagaaacagaggttatcttagcttttgtgaccgcatcggaccctacccgaggcaaccgttctgctggacagaggtcctagtttgttgggctagtaaatgtaatgttatcttaggtggtacttactaatcgggccagtaatgttgaattctagctggaacgcggtaatgtttgatgcaccgaagtcgcttgcagtaggttccgatggcccaagccaccaaaaacctgtttgctccatgaacctcaatcctgttaggtgataatataatatacattgtgttgccaccgtgcttttttcttaaaaaaaacagtaaaaaaaagagttccaaaaataaaaaaaaaaataaaaaaattatatataattt

SEQ ID NO: 3332 - DNA, 733 bp, Zea mays
  Clone ID: TF_ZmC8733_5
ctgcgcgctaacctagaaccacaaagggtgttggtcgattaagacagctggaggcggatttggtgctgggcggggacgagggcaaggagtgcacctacgccggcggatacctcaagcgccaggccgtcttctcctgcctcacctgcgtgccggatggagtcgccggggtctgtaccgcctgcagcctcgcctgccacgacgggcatgagattgttgaactttggacaaagcggaagtttcgttgtgattgtggcaactcaaagtttggtggtcacctttgcaaactctgccctgagaaagattatgagaattcagcaaatacttataaccataacttcaaaggttcctattgcacatgtgggcggccttatcctgacccagaagctaaggagcaagttgaaatgatacaatgctctatatgtgaggactggtttcatggggatcatattggtcttaactctattgaagagataccaagagatgaggaaggggagccactctatgaggaattgatatgccacaaatgctcatctgtctgccatttcttgaaattgtatccagatacaatttgggcttctggtaagccaaatctggcagtggaaactgatgcaagtgactcgaatgtgatgaaaaaaccttcaggcatgctgaccctgagaaacatgaaaatggtgctcttgtggataatacgggtggcgagaagacccttggtgggaaaggattctacaaaagc

SEQ ID NO: 3333 - DNA, 812 bp, Zea mays
  unsure (1)..(812): unsure at all n locations
  Clone ID: TF_LIB4743-111-Q1-K1-G10
ccggccgactcctgttcgttcgttaagccctctgaccggccgaaaccccggtggcctcctggaggttccgggattgagttcgatctgagctgctgctgcctgtggaggcattcccttgtcgtttcttgcagtgtcctggtggtggtgaccggtggatatgaacactgtgtgtgaagtttgtggtgatattgcttacagacaacttctgctttgttgcagagactgcaagcgttgtgctgtgcaccaatactgtttggacaaagttgtctacgaggcatcattaataaaatggttctgttatgaatgcctactaaggcgtggtgaagttactcgcatcagttctctagagaagttgtcaagtgaaagaccactaagtcaggtccattctcgttctccagtacagtagctaattaccaatagtgtagagtcagtaagggatgcagggccttggagagatcggaaaaatgaatcaattgcgactaaatatccatctctcaacataacatatccttcaattaagaagcacactaaaaagaagccgattgtgaaaccaatggttaactgcacaaatacaaaagtgcgaatggctaaagttaccacccatacaagtgccgaagcgtcacgttcttgtgaaaccattgggacagaatcatctaagagcaaccatgtgaagaaccagcaggtggaccatgcaaaccctgtcgcattgaacactgagcagtcttgccctttgattgtgaatagcttgagtacattgngagataatcaccagtatcacctcttatacacaacagaagggttggcttgcaaat

SEQ ID NO: 3334 - DNA, 4297 bp, Zea mays
  unsure (1)..(4297): unsure at all n locations
  Clone ID: TF_ZmC133_37
gaggtctggccgggaccgacgcctgtcgccactggcacgcattcctgctctcctctcctcttctccctcgtcggtgcggcgtggcgcggctcggcgttcggtgagaaaccactcggggatgaggatctgctgctagagtgagaggagctacggtcagtatcctctgccttcgtcggcggcggaagtggaggggaggaagcgatggaggcgagcgccgggctggtggccggctcccacaaccgcaacgagctcgtcgtcatccgccgcgacggcgatcccgggccgaagccgccgcgggagcagaacgggcaggtgtgccagatttgcggcgacgacgtcggccttgcccccggcggggaccccttcgtggcgtgcaacgagtgcgccttccccgtctgccgggactgctacgaatacgagcgccgggagggcacgcagaactgcccccagtgcaagactcgatacaagcgcctcaagggctgccagcgtgtgaccggtgacgaggaggaggacggcgtcgatgacctggacaacgagttcaactgggacggccatgactcgcagtctgtggccgagtccatgctctacggccacatgagctacggccgtggaggtgaccctaatggcgcgccacaagctttccagctcaaccccaatgttccactcctcaccaacgggcagatggtggatgacatcccaccggagcagcacgcgctggtgccttctttcatgggtggtgggggaaagaggatacatccccttccttatgcggatcccagcttacctgtgcaacccaggtctatggacccatccaaggatcttgctgcatatgggtatggtagtgttgcttggaaggaacggatggagaattggaagcagagacaagagaggatgcaccagacggggaatgatggtggtggtgatgatggtgacgatgctgatctaccactaatggatgaagcaagacaacaactgtccaggaaaattccacttccatcaagccagattaatccatataggatgattatcattattcggcttgtggttttggggttcttcttccactaccgagtgatgcatccggtgaatgatgcatttgctttgtggctcatatctgttatctgtgaaatctggtttgccatgtcttggattcttgatcaattcccaaagtggttccctattgagagagagacttacctagaccggctgtcactgaggttcgacaaggaaggccagccatctcaacttgctccaattgatttctttgtcagtacggttgatcccttaaaggaacctcctttggtcacaacaaatactgttctatctatcctttcggtggattatcctgttgataaggtttcttgctatgtttctgatgatggtgctgcaatgctaacgtttgaagcattatctgaaacatctgaatttgcaaagaaatgggttcctttctgcaaacggtacaatattgaacctcgcgctccagagtggtacttccaacagaagatagactacttgaaagacaaggtggcagcaaactttgttagggagaggagagcaatgaagagagagtatgaggaattcaaggtgagaatcaatgccttagttgccaaagcccagaaagttcctgaagaaggatggacaatgcaagatggaaccccctggcctggaaacaatgttcgtgatcatcctggaatgattcaggtcttccttggccaaagcggaggccttgactgtgagggaaatgaactgccacgattggtttatgtttctagagagaaacgaccaggctataaccatcataagaaagctggtgctatgaatgcattggtccgagtctctgctgtactaacaaatgctccatatttgttaaacttggattgtgatcactacatcaacaacagcaaggctataaaggaagcaatgtgttttatgatggaccctttactaggaaagaaggtttgctatgtacagttccctcaaagatttgatgggattgatcgccatgaccgatatgctaaccggaatgttgtcttttttgatatcaacatgaaaggtttggatggtattcagggtccaatttatgttggtactggatgtgtatttagaaggcaggcattatatggttatgatgcccccaaaacaaagaagccaccatcaaggacttgcaactgctggcccaagtggtgcttttgctgttgctgctttggcaataggaagcaaaagaagaagactaccaaacccaaaacagagaagaaaaagttattatttttcaagaaagaagagaaccaatcccctgcatatgctcttggtgaaattgacgaagctgctccaggagctgagaatgaaaaggccggtattgtaaatcaacaaaaattagaaaagaaatttggccaatcttctgtttttgttacatccacacttctcgagaatggtggaaccttgaagagtgcaagtcctgcttctcttttgaaagaagctatacatgtcattagttgtggttatgaagacaagacagactggggaaaagagattggctggatctatggatcagttacagaagatattctaactggtttcaagatgcattgtcatggttggcggtcaatttactgcatacctaaacgggttgcattcaaaggttctgcacctctgaatctttcagatcgtcttcaccaggtgcttcggtgggctcttgggtctattgagatcttcttcagcaatcattgccctctttggtatgggtatggtggcggtctgaaatttttggaaagattttcctacatcaactccatcgtgtatccttggacatctattcccctcttggcttactgtacattgcctgccatctgtttattgacagggaaatttatcactccagagctgaataatgttgccagcctgtggttcatgtcactttttatctgcatttttgctacgagcatcctagaaatgagatggagtggtgttggaattgatgactggtggaggaatgagcagttctgggtcattggaggtgtgtcctcacacctctttgctgtgttccagggacttctcaaggtcatagctggtgttgatacaagcttcaccgtgacatcaaagggtggagatgatgaggagttctcagagctatatacattcaaatggactaccttattgatacctcctaccaccttgcttctattgaacttcattggtgtggtcgctggcgtttcaaatgcgatcaataacggatatgagtcatggggccccctctttgggaagctattctttgcattttgggtgattgtccatctttatccctttctcaaaggtttggttggaaggcaaaacaggacaccaacgattgtcatcgtctggtccattctgctggcttcaatcttctcgctcctttgggttcggattgatcctttccttgcgaaggatgatggtccgcttcttgaggagtgtggtttggattgcaactaggatgtcagtgcatcagctcccccaatctgcatatgcttgaagaagtatattttctggtgtttgtccccatattcagtgtctgtagataagagacatgaaatgtcccaagtttcttttgatccatggtgaacctacttaatatctgagagatatactgggggaaaatggaggctgcggcaatccttgtgcagttgggccgtggaatacagcatatgcaagtgtttgattgtgcagcattctttattacttggtcgcaatatagatgggctgagccgaacagcaaggtattttgattctgcactgctcccgtgtacaaacttggttctcaataaggcaggcaggaatgcatctgccagtggaacagagcaacctgcacattatttatgtatgcctgttcattggagggcttgttcattacatgttcgtctatactagaaaaaacagaatattagcattaatctatagttaattaaagtatgtaaatgcgcctgttttttgttgtgtactgtaatcatctgagttggttttgtgaaattttcgtagaaagaatgaatgtgagatacagaaaatgtaatgccgtggtatatgcgtatggaacgatgtagtatcttttatggttccataatagtgtatttaacaaccccagcaaggggtttcttgggtttctttttttaatcctatttataatgatataatgataggggagcaaagaggccttaggctgtctccagcaacgtcctctaaatttcgtcccctaaaggaatattccctgtactttacagcacactctnaaagattctgtcctctttaaaaaaaaaaaaaaaaagcggcc

SEQ ID NO: 3335 - DNA, 851 bp, Zea mays
  Clone ID: TF_ZmC1236834_1
cgcgcactcgcgtcggaatgcgtgctgcgtgaagagaggcgagagcgagacgggctgcggggaggaggcggatagcggcggcgtcggcatggaggcgaaccgggggatggtggctggctcccgcggcggggtcgtaacgatccggcacgacggcgacggagccgcggctaagcagttgaagaatgtgaatgaacaaatatgtcaaatctgcggtgacacactcgggctctcagcaacaggcgatatctttgttgcgtgcaacgaatgtgccttcccggtgtgtcgtccgtgctatgagtacgagcgtaaggaggggaatcagtgctgccctcaatgcaagactagatacaagaggcacaaaggaagccctcgggttcggggagatgaggaggaggatggagttgatgatttggacaatgaattcaactatacacaaggcaatgtccaagggcctcagtggcagctgcagggacaaggggaagatgttgacatctcttcgtcttctcgacatgaaccccatcacagaattccacgtctgacaactgggcagcagatgtctggagatatccctgatgcatctcctgatcgcaattctattcgcagcccaacaccaagttatgttgatccaagcattccaggtgtgctatcgtgttatgtatatttgtgttggtaatcagttcccttgcagattcactagaatgcaatcatttgttccatgatatcagtacctgtgaggattgtggacccctcgaaggatttgaattcttatggagttggaagtgttgactggaaagaaagagtcgagagctggaaagttagacaggacaaaaatatgatacaggtgcgccggc

SEQ ID NO: 3336 - DNA, 989 bp, Zea mays
  Clone ID: TF_ZmC313479_1
attgggtacctcgaggccggccggggaagggcccaaagcccagtcggaccacgccactcccaaaccctaagctgagcctgtgacgctttcatccaatggtgcaagagcaagacgcacccaacgcacttgcctccgacgccgatcaccccgccccgccgccccgcctcctttctaagcaccgcccgcgtcgccgcgccgctgcccctcgcccgcccctgccaccacctgcgccaccactgcccgcgcgtcgcctgcccgatctcagccagtgccactgctgcggcttccgcttccgaacgccccagccgggggccaggcccaagcgccgcccgctctgtccactcagttccctatggcgcgtcgtcctcctctgcgccgaatgcctctccctggtccgctgtggcgctgtatgctcttactgcctctccctcgacaacctgccgcccgaggattccgccgtcgtctgtcgccgctgcaaccgctatgtccatcgatcctgtatccctgccgaacaccgcacggccgtgatccagccggtcgatgtggaggatttcctctgcgtcgattgccgtcccaccgtgagatcgaagaacgggggcttcaatttggggctgaatctggatgcttgcatctgggatcgtacatccgttgccagggagaacgctctgaggaaggctgtggaggtgaagcccgcttctaagcgggggaacgacgctgttggcggcagtgggttggtcggaaggggcagtgatgttccagttctgccggacgaagagttagctttgcagctgcacctggcaatgaatggatcacagaggatttcacgttcaggtggtgcctctgccgatccagccaaggggaagaatgatggggttgctagtaggatttgcaacacaaatcaggatatttcgcgtaacaaatatgatggctcagcttgatgaagaagaaccaggttgcaacagggtattaaagggcccttaggaattctg

SEQ ID NO: 3337 - DNA, 951 bp, Zea mays
  Clone ID: TF_ZmC2027_16
gcggcgctcgaggcggccgtttcgggagtaggtgcggagaggaagaggaagcgaagcagcagcagcaccaccactgcgcggcattgcagcgagcaagcgggagggatctggggcatggtggcggtcgctgccgctgccgctcggatctagagggccgcacgggctgattgccctccgccggcctcgtcggtgtcggtggagtgtgaatcggtgtgtgtaggaggagcgcggagatggcggccaacaaggggatggtggcagggtctcacaaccgcaacgagttcgtcatgatccgccacgacggcgacgcgcctgtcccggctaagcccacgaagagtgcgaatgggcaggtctgccagatttgtggcgacactgttggcgtttcagccactggtgatgtctttgttgcctgcaatgagtgtgccttccctgtctgccgcccttgctatgagtacgagcgcaaggaagggaaccaatgctgccctcagtgcaagactagatacaagagacagaaaggtagccctcgagttcatggtgatgatgaggaggaagatgttgatgacctggacaatgaattcaactataagcaaggcaatgggaagggcccagagtggcagcttcaaggagatgacgctgatctgtcttcatctgctcgccatgaccccttcctcaagggtctcatgggcaggcagaaccgcacgccaacaatcgtcatcgtttggtccatcctccttgcgtctatcttctccttgctgtgggtgaagatcgatcctttcatctccccgacacagaaaactgctgccctggggcaatgtggcgtcaactgctgatcgagaccgtgactcttatttgaagaggctcaatcaagatctgccccctcgtgtaaatccctgaggaggctagatgggaattctttttgttgtaggtgaggatggatttgcataagttatg

SEQ ID NO: 3338 - DNA, 613 bp, Zea mays
  Clone ID: TF_5006147
tttgatgtagtaaggtccacaaagatttacactgtgtgcgccttcgtggatgagtcaaatttcttctagagggggtcccagacctccttggaagacatggcactgatgacatcttgaaggacttcctcgatcatcgacgagagaaaggccactcaacagttgttgatcttgaacatactagctagcatactccggattagggacatctgcagcactgtgacagggcgatccagcagcttcatgcagaaggcgcagctgaaacttctgccgaagatattgaggacgtcgtcctctgcgctgtcgtcgacatcatcgtcgggggcagaagcagcagatcggcctgccagaatattttggcggcggcgtgccttctctgcatcggagagggtggtgtcggcctcgatcgcgcggacggcggcgacgagctcgcctcctgccgcaggggccgcgggggctacaggatcgccggagcagtcggggcagctccagatcgcagcttcagacagcgcgggtggattcgagaggcatggggagtgccacggggtggcgcaggtggagcaccgtagcaggtctacctcggacggtgcggccacaccgcagaccatgcagacgc

SEQ ID NO: 3339 - DNA, 1319 bp, Zea mays
  Clone ID: TF_ZmC531693_1
cggaagccgccgccgccgcctctcttatcgcaacagttcatatttgcgaacgtggcccctgctttgcgttctccaaaccgtaccagcagcgtgccctgatcgccgccgcttggagtcctgatctggtcctcgttcgtcgggacttaggaaatccaagtaacggatagttcccaccggcagaccgagccgcgcctccattcttgtacgaaaccatggctcgcaaaaaggcaaccgtggagcagctccggacgctgaacaaggttcgtgaattcaagcgaaggagaaacatgcacaaggcagcaggagcaggaccgggcaacaagggagaaaatgtttgtgcaatttgtgacgatggtggtaacctaacttgctgcgaaggttgttgtcagaggtctttccaccttgataacgaacataattgcatcaagacacttgggctgactatacaagaggcaaagaacataatcgagaagggagattttatatgcaagaactgccagtacaagcaacatcagtgtttcatttgtggatcgttagggtcttctgatgacactgacacagcgtcacagcaggtattccaatgtgagcatgacgattgtgcacgcttttaccacccaaaatgtgttgctcaaatgctatatccagatagccaagaactgttcgagctccacgtggctgccggagagagcttcacttgtcctatgcatgaatgtattgtgtgcaaggaagtagataataagaaagataagagtatgcagtttgcagtatgcagacgctgcccaactgtttaccaccggaagtgcttgccaagagatatcattttcaaaccgaagaaaggtcgcaggggtcccatgcgaagggcgtggaagaacatgcttcccgatcgaattctgatattctgcatgaagcatgagatcgtaagagaactacaaactcctgcaaggaatcatatcgtttttcctgaatccaatgtgctgaaaacgtttcaagctctttatgctcaaagagaggcgcctgaccactcgtcatcgaagcaaacccactcgtcccctccaccggctgcaagagaccagaatcagtgctactgttctagccctttatgctcatttgctccaagttccgtgttcatgcgtccgcatccaggctcctctggttggctcgatgactgactaactaattaactatacggcccatctgtcccctgtagagagaaaccccctgttacaagtccttttgcaaataattggatgtagacaagctagtgttagccaaacgacaaaatcctattttttttaatataacctgatttttttattgcg

SEQ ID NO: 3340 - DNA, 524 bp, Zea mays
  Clone ID: TF_LIB4171-042-Q1-K1-E2
gccctctctcgagtttttttttttttttttttttttttttttttttttttttttttttttttttttttttttttttttaaaccctgaccaacatgagctggtgggggcacccgagggaatcaacagggttctttccaaagggaaagcaagtttacaagctaaacagttaggcatatatctgcaaacataaatgattgggcgcttacttcactccaaaatcacaaaagggcttggggctaggctcttgcccttttggggctgcaatcggggcatttggagggcttgaggggctcaactcgggcaggcgggattttgacacacttcccatggaaccaccggtcgcatttttcacaacaaatccaaaattcgcccttgccgtcttttgttccacaggacccacaaaagggggtaacaccctcttcctttttttaaaactcttaaccggtctaataattttcatccttagggggccccatttttggcgccttcaaaagaaactcgggtcttggtggcattttcaaact

SEQ ID NO: 3341 - DNA, 1139 bp, Zea mays
  Clone ID: TF_ZmC24647_1
gcacgagcctgtttcctgtctcctaccctcttgcggtcttgccagcgccccctcctcccttcgtctccgccgccgcggactcctcgccggaaccctaaatggaccccggcgccggcgcacactactccgcccgtaccgcggaggaagtcttccgcgatttccgcggccgccgcgcgggcatgatcaaggccctcaccaacgatgtggagaagttctaccagctgtgcgaccccgaaaaggaaaacttgtgcctttatggctaccccaacgaaacatgggaagtaactttgccagcagaggaagttcctccagagatccctgaaccagctttgggtataaactttgctagggatggcatgaacgagaaggattggttggcgttagttgctgtccacagcgatgcctggttactagctgttgcattctactttgcagcccggtttgggtttgacaaagaggccaggcggcgactcttcaacatgataaataacttgcccacaatatttgaagtagcgactggggttgccaagaaacaaaacaaggagaaggaacccaatagtaccagcaaaagcaacaaaccaagttcgaaaatgacaacaagacccgagtctcatttgaaggcgacaaaagtggcaccccctaaggatgaagatgatgagagcggtgaagagtatgaagaagaggaagagcgtgataacaccttatgtggatcctgtggaacaaatgacggcaaggacgaattctggatctgttgtgatagttgcgagcggtggtaccatgggaagtgtgtcaagatcactcctgcacgtgctgagcacatcaagcactacaaatgcccagattgcaacaacaagagggcaggagcctagcgtcaagccctggtgtgaccctggagtgaagtaagcgtcaaatcattgatgtctgcagatatatgcctacttgtctagcttgtagacttgcttttcatttcgcatgaacgctattgattcactcggttgccctctgcagctcatattgctcgggcttaattgtgtttaatgttttataagcggtgccagtgtgttgcatcggagcgtatattttattatccggtaatcgtacccaaaaaaacaaaaaaaaaaaaaaaaaaaactcgagag

SEQ ID NO: 3342 - DNA, 618 bp, Zea mays
  Clone ID: TF_ZmC62616_2
gtgaaagagcatttcatttattgtgttgcaatccacgtgtcaagaaaataccagatgaagagtggtattgtttggcatgtaaaagaaagaaacctaagagacaacgtggaaagtttgcaaatcccaaagttgaatcatccaagggcattcaaagaccccgccgaggtcttggtcctattcgagatatgttactggattctgaatcatatgaaagtggggttcggattggtactaagtttcaagcagaagttccaaaatggtctggtcctatttctagtagagaagatgagtttgctgagcccactgaacttgatcgtagtaaaacgacaatgctgagtttcgaggataagaaaaccagtatcggtaactggatccagtgccgggaagttctagacacaggagttgtttgtggcaaatggcggagggcaccattgtttgttgttcaatcaagtgactgggactgttcgtgctcagttgtttgggatcctatccatgctgattgtgctgttccacaggaattggagaccgttaaagttcacgagcaactgaagtacataaataagctgaagaatcgtctaggtgacagcaatcagaaacgctgaaaaaacgtactcttgc

SEQ ID NO: 3343 - DNA, 757 bp, Zea mays
  Clone ID: TF_ZmC211414_1
cttcgcgcagcgcattggatggttcaacgtgaaaacggaaatacgctccatcaagaatacgctaattctgcaccatattgtgttccttttgattttgttcacaagaattccaggatgttctacaatccgttcaacggaaatatttcatcgcaaccagagccttctccaccttacatctctgggggcattttggctgatgaaatgggcttggggaaaactgtcgagcttttagcgtgcatttttgctcatcgtagaccaatttcattagacttttctgtcttccagaacaaaaccgaaatggatcaaattaagaggcagaaagtagaaagggttgagtgcatctgtggtgctgcgagtgaaagttctgcatacacgggtctatgggtccaatgtgacatttgtgatgcttggcaacatgctgattgtgttggttactcacccaagaggaatatactttttgctgataccactgaagatgtagtatcaacaaacaaaaaaagcaccatgaagtctggatttagaaggaaaaagaaacccaggtgttctattgttgagacagaagacaaatacatttgtgcactgtgcttggagcttattgaagcaactcaaactaatatactcagccatgctacattgatagtatgtcccgcaccaatattggcacaatggcactctgaaattacccgacacacaaggccaggatctctgaaagtttgcatttatgaaggtgcaaggaacttggatccttctaccatcc

SEQ ID NO: 3344 - DNA, 871 bp, Zea mays
  unsure (1)..(871): unsure at all n locations
  Clone ID: TF_21216428
attatcttggcataagctgcccaatccacctatagaaacgttacaaaggcttcctctgcccctattccttctccggcaacatacaggctaccataactctccacggcatggagaaaccacaaagaggntataataaatactatgatctttccctgctaacattagcatcaccattattcgtcatatgtaagcttaatcgaaaaggtacagtaaacatggcaaggcggcattgaccttgcgcaaggggaaactctgacctgcttgtccaggcttcttccatccatggccgtcctcccgggaggagggcgatgctataggcctaaatcggcctaggtcnnnnngaattgcagcagcttgggcacttgtactgctttatgctctccgcctttgcaggtgtgatcttcacgcacttgccatggtaccacttctcgcacacgtcgcacccgatccagaactcatcagcgctgtatattccaccacatgtcccgcacaaggtttcgctgtggttgctgtcatcttcatcgtagccctcatcaggctccctggcgttattttctaatcgtggctcgcttgtttgctggagagacagatcaagttcaacatcataacatgacaatagaagatgtggtnnnnncagcgatgggttcttgttacctttaccgacagtttatttctaccaccattgtcagtaccggatctatccctctcttttgattgcttcacaccactggagacgacttcnnnnncagttggcagatcattcatcatgccgaacaaacgcttccgatcactgcggttgagccgcgcggcgtagtagaatgcgacggagacgagccacgagtcagagtgtacggcgacgagcgcgcctcgt

SEQ ID NO: 3345 - DNA, 601 bp, Zea mays
  unsure (1)..(601): unsure at all n locations
  Clone ID: TF_LIB3689-230-Q1-N6-A12
gtatcaaataaaatatattaacataaacctcacgggttattatcttggcataagctgcccaattcacctttagaaacgttacaaaggcttcctctgcccctattccttctccggcaacatacaggctaccataactctccatggcatggagaaaccacaaaaaggttataataaatactaggtgtgatcttcccgcccacattagcatcaccatcatatgtaagcttaatcgaaaagatacagtaaacatggcaaggtggtattggccttgcgccaaggagtagctctgacctcctgtttgttcagtcttccatccatggccgtcctccagtgaggagggcggtgctacaggcctacagcggcctaggtctttttgaattgcagcagctcgggcacttgtactgctttatgctctccgccttcgcgggagtgatcttcacgcacttgccatggtaccacttctcgcacacatcacacccgatccagaactcgtctgcgctgtatattccaccacatgtcccgcacaaggttgcaagacattgacttgggtgccattgngcgaggcgcccttggtagcttcaggagtgtagctgttaggtcc

SEQ ID NO: 3346 - DNA, 3005 bp, Zea mays
  Clone ID: TF_ZmC17187_1
gcactggcacccctccccgtcccatgccccctctcgcggctcgtgtcgtctcgtcgctcggctccaggccgcatcgcgatcagtcatctctttccctcccagccttcctcctgcgtctcgctctcgccggaggtcaggcgcaccgccgccgggcgatggacgcctcctaccgccgcgccggcaccgggagcggctccgctccccgctccgtcgaggacatctacaaggactaccgctcccgccgctccgccatcctccgcgccctcacccacgacgttgaggagttctacgcgctgtgcgatccagagaaggagaacctgtgcctgtacggctacgcgaacgaagcgtgggaggtagcgctgccggcggaggaggtgcccacggagcttccggagccggcgctcgggatcaacttcgcgcgcgacgggatgaaccgtggcgactggctcgcgctcgtcgccgtacactctgactcgtggctcgtctccgtcgcattctactacgccgcgcggctcaaccgcagtgatcggaagcgtttgttcggcatgatgaatgatctgccaactgtttttgaagtcgtctccagtggtgtgaagcaatcaaaagagagggatagatccggtactgacaatggtggtagaaataaactgtcggtaaagcaaacaagcgagccacgattagaaaataacgccagggagcctgatgagggctacgatgaagatgacagcaaccacagcgaaaccttgtgcgggacatgtggtggaatatacagcgctgatgagttctggatcgggtgcgacgtgtgcgagaagtggtaccatggcaagtgcgtgaagatcacacctgcaaaggcggagagcataaagcagtacaagtgcccaagctgctgcaattcaaaaagacctaggccgatttaggcctatagcatcgccctcctcccgggaggacggccatggatggaagaagactggacaagcaggtcagagtttcctcttgcgcaaggtcaatgccgccttgcgatgtttactgtaccttttcgattaagcttacatatgacgaacgatgatgatgctaatgttagcagggaaagatcacacattaatttataatctttttgtggtttctccatgccgtggagagttatggtagtctgtatgttgccggagaaggaataggggcagaggaagcctttgtaatctttctataggtggaatgtgcagcttatgcgaagataataataatccgtgatgttcatgttaatatattttatttaataaaagaaaaataagcctctcgcgtggggcagcaaagcgaccctcacccgccagcaccccaggcattcacaaccacccggccccatgttatacgtcatcaaccccctgctacctggtggaccatgtcctgtacctggtcacggagtatgggcggcaacccaaaatcgttacggcccccataacgttcggctgtggacggactgaaacaggatcgttactgggcacggctgcacccaagagtatacttggccagcgcagggaaactatatgggtcccccgtttgctagcaagtcagggagttgctgctgccaattccttctccatgtgcttcgcacaagatggccatggtagaatcaattttggggacactggaagctcagatcagcaggaaaccccgttaaacatgtataaacaaaatccatactacaacataagcatcactggtgctacggtggggagtaaatccattcacaccaagttcaacgctattgttgactctggcacctctttcacagctctgtctgatccgatgtacactcaaatcactagcagcttcaactcacaagtccaggataagccaagccagcttgactcttctctgccctttgaattttgctactctataagtccaaaggcttctaccaatcctccgaacataagcttcacggcggaaggtggaagcgtgtttcctgtcaatgatccaataattaccattacggactctgtatctaatccgatggcatattgcttggctgttatgaagagcgaaggtgttaacttaataggggagaattttatgtctgggctgaaggtcgtgtttgatcgagagaggaaggtcttgggctggaaaaactttgattgttacagcgtgggcaactcaagaagcaaccttccagtgaacccaaatccttctggtgttccccctaaacctgccttgggacctaacagctacactcctgaagctaccaagggcgcctcgcccaatggcacccaagtcaatgtcttgcagccttctgcaagtttttcgccgaagctgcgttgcaacagaaacgtcctcgtcgccgctgctctgctgttcctcgtgatcctttgatcacctcaactccccatgacaatcttttcagaaaccaaatcgacagatatgatagattttagttaaacttggtttacgttgtatgtattgagttacgtatagtgtgatagtatcacattcttttggcctgtgtccacagttccagtaggagttaggatagaacacgggatgagtccatagccctttttttttgcacgttcataatgtacctggtggatgtactgtgtacatattagatatgacttcaggatgtattgattttatagaataattgaataacgatgctcgcatttccagatacacgtactcttttcatatggcataacacactagcattaagtcttatgagagaccttgccaaagaattagtgcttggaggggaagaatgacctagaactgaagatggatgagctgatgtgaaaaatgaggggaagaatgacctagaactgaagatggaggagctcaggtgaaaaatgaacttgttcattgtgtgttttctgacctttttttggaattgtattaaaatatactgtaatgaattggtgtaagaatatgttggaagtagcaaagaacctgatgccttttgcaaaaaaaatgtctttaaaaaaaaataaacaaaaaaaaactcgagagggggc

SEQ ID NO: 3347 - DNA, 1433 bp, Zea mays
  Clone ID: TF_ZmC17187_2
aaaaaaaaacctcgtcgctcggctcccgaccgcattgcgatcagtccgggctttccctcccagccttcctcctgcgtctcgctctcgccggaggtcaggcgcaccgccgccgggcgatggacgcctcctaccgccgcgccggcaccgggagcggctccgctccccgctccgtcgaggacatctacaaggactaccgctcccgccgctccgccatcctccgcgccctcacccacgacgttgaggagttctacgcgctgtgcgatccagagaaggagaacctgtgcctgtacggctacgcgaacgaagcgtgggaggtagcgctgccggcggaggaggtgcccacggagcttccggagccggcgctcgggatcaacttcgcattctactacgccgcgcggctcaaccgcagtgatcggaagcgtttgttcggcatgatgaatgatctgccaactgtttttgaagtcgtctccagtggtgtgaagcaatcaaaagagagggatagatccggtactgacaatggtggtagaaataaactgtcggtaaagcaaacaagcgagccacgattagaaaataacgccagggagcctgatgagggctacgatgaagatgacagcaaccacagcgaaaccttgtgcgggacatgtggtggaatatacagcgctgatgagttctggatcgggtgcgacgtgtgcgagaagtggtaccatggcaagtgcgtgaagatcacacctgcaaaggcggagagcataaagcagtacaagtgcccaagctgctgcaattcaaaaagacctaggccgatttaggcctatagcatcgccctcctcccgggaggacggccatggatggaagaagactggacaagcaggtcagagtttcctcttgcgcaaggtcaatgccgccttgcgatgtttactgtaccttttcgattaagcttacatatgacgaacgatgatgatgctaatgttagcagggaaagatcacacattaatttataatctttttgtggtttctccatgccgtggagagttatggtagtctgtatgttgccggagaaggaataggggcagaggaagcctttgtaatctttctataggtggaatgggcagcttatgccaagataataacaatccgtgatgttcatgttaatatattttatttgatacagggctgatggtttgcgtgagcaaccatgtgtgattacgtaagctaccgccgacccattttgtggaataacatacagatgcacttcgacaactagtcgtttctctagtttagaaacctaaaccctcaatggatccccaacatgtgcatttcttggtagaggtatattatggagggttcaaagtcttcctctgtcttttttagaccatgtcttgtgagaagatgtgttcttcaatttgattctgatatatagggacaagaatagagtcagt

SEQ ID NO: 3348 - DNA, 1341 bp, Zea mays
  Clone ID: TF_ZmC2557_29
attgggacctcgaggccggccctgccgtgcccggttgtgtaaatagaagataggcgacgaacacgaagcaagcaaggcagccgaatcccaactcctgtgtgtgcctgccaacgcctcgtcgcccgccgccgccgctgcttcgcccctctccgccagccgctcccgctcggagcacgccgccgccggcgtgggcgcgcaccgacggccgtcgtgtcgcatggatatggcccccgcggccgtctcctccaacccgcgctcggtcgaggaaatcttcaaagacttctccggccggcgcgcggggctcgtccgcgccctcacctccgatgtggacgatttctgcagcttctgcgacccagataaggagaacttgtgtctctacggccttcccaacggtagctgggaggtctcgccgccggcggacgaggttcctccggagttgcccgagccggcgctcggcatcaactttgcgcgcgatggcatgcagcgccgcgactggctctcactcgtcgcggtccactctgactcgtggctcatctcagtcgccttcttctacggcgcccgcctcaacgccaacgaccggaagcgcttattcagcatgatcagtgatcttccttctgtctttgaagcatttgcggacaggaaacacgtcagggataggtctggcgttgatagcagcggcaagtccaggcactcatcaaagagaggaaacgatggccatgcgaagaactccagggcagcagctcctgctgccaaagagtacgacgacgacgatgacgaggaggacgaggaacacacggaaaccttttgtggaagctgcggcggcctctacaacgcgaacgagttctggatcggctgcgacatctgcgagcggtggttccacgggaagtgcgtgcggatcacccctgccaaagcggaccacataaagcactacaagtgcccggactgcagctcgaagaaaataaggcagtaggtcccagtgtgcaccgccggccatcgctgacctgtctgatcccaaaccatactccattgcttgcctgccttgccccaaggtcgcagctagcagatgcgaattccttcatttgtggggggttgttgtgtgatggatagcctggtaggaagaggcaaaggactgatatataatgactcgtttattgttcatctttttgcctgcttcgtcggtcgtcgcagtcgttgtggctgcatgaactgatgagtggtttgttcgtgctagttgtaggctgtttcactgatttgcgtgcgtatgtggactggtcctgtcaaatttgtaggcctgaaaccgtacttccatttacgtggctacgcgagctgatttgccaaaaa

SEQ ID NO: 3349 - DNA, 1444 bp, Zea mays
  Clone ID: TF_ZmC2557_30
ggcagccgaatcccaactcctgtgtgtgcctgccaacgcctcgtcggccgccgccgccgctgcttcgcccctctccgccagccgctcccgctcggagcacgccgccgccgacgtgggcgcgcaccgacggccgtcgtgtcgcatggatatggcccccgcggccgtctcctccaacccgcgctcggtcgaggaaatcttcaaagacttctccggtcggcgcgcggggctcgtccgcgccctcacctccgatgtggacgatttctgcagcttctgcgacccagataaggagaacttgtgtctctacggccttcccaacggtagctgggaggtctcgccgccggcggacgaggttcctccggagttgcccgagccggcgctcggcatcaactttgcgcgcgacggcatgcagcgccgcgactggctctcactcgtcgcggtccactctgactcgtggctcatctcagtcgccttcttctacggcgcccgcctcaacgccaacgaccggaagcgcttattcagcatgatcagtgatcttccttctgtctttgaagcatttgcggacaggaaacacgtcagggataggtctggcgttgatagcagcggcaagtccaggcactcatcaaagagaggaaacgatggccatgcgaagaactccagggcagcagctcctgctgccaaagagtacgacgacgacgatgacgaggaggacgaggaacacacggaaaccttttgtggaagctgcggcggcctctacaacgcgaacgagttctggatcggctgcgacatctgcgagcggtggttccacggcaagtgcgtgcggatcacccctgccaaagcggaccacataaagcactacaagtgcccggactgcagctcgaagaaaataaggcagtaggtcccagtgtgcaccgccggccatcgctgacctgtctgatcccaaaccatactccattgcttgcctgccttgccccaaggtcgcagctagcagatgcgcattccttcatttgtggggggttgttgtgtgatggatagcctggtaggaagaggcaaaggactgatatataatgactcgtttattgttcatctttttgcctgcttcgtcggtcgtcgcagtcgttgtggctgcatgaactgatgagtggtttgttcgtgctagttgtaggctgtttcactgatttgcgtgcgtatgtggactgtcctttcaaatttgtaggcctgaaaccgtacttccatttacgtggctacgcgagctgatttgccggtctgcctctcccatctgtatcctggacatggcagtatggtcacgaagtccagatggcgatatgcctgactgccggtaacggagggcagctgtggtgtagtatatctcagtcacatgggaggcgttagataatttttgaccaaatgttataaaataagacactattaaatagtttttttatat

SEQ ID NO: 3350 - DNA, 826 bp, Zea mays
  unsure (1)..(826): unsure at all n locations
  Clone ID: TF_LIB4757-014-Q1-K1-A10
attgggtccctcgggccggccggaaaaaaattattgtaaacggcgtttactacatgagctgtcaatttcactcttgaaaggtcaaaagatgtcaaacagacaaagtgatgacttgtgcagcatttgttcagatggtgggcaactactcctttgtgatacctgtccaagagcttttcatagagaatgtgttggcttatcttctgccacaaagggaacttggtgttgccgatattgtgagaatagacaacagagggaaagttgtttggcatataacaacaatgcaatagctgctgggagagttgaaggagttgatgccttggaacaaatattcacgcggtcgatacgtattgctacaacacttgagactggatttggtggttgcgcactgtgcaagtaagtgtccttccatggcatgttgcttgtatatccaccctggccttcttttcttttgtactgataataaattacatgtactttcaatcttacctaaaacatttcgtatgctggcagagaaaatttggcaaacttctcatcaagtaatgatatttgttgaataagctggttaatgaatcggaagctcaatgttcgagcgctaaatctctttacccatttcgaactctctgattacttttgcatcaatgttagtttcattaatcttactttaagctttatttgccctagttaattctgtgttagcattagtcgtggttgtttatggggtgtttggcgctaagtattgaccagtttgtgggaagtcatatcattgntaccttctatcanaaaagttacatattgnttttcgtttaatgcaacttgccaagtacta

SEQ ID NO: 3351 - DNA, 435 bp, Zea mays
  Clone ID: TF_jC-zmXLIB3526P054bg08a1
ggagaagatgatccttttgttttacaacagtagaacagcaatttataaagcatcatttcaacggcaggcatttaccaagaataaacataattcttttcagcttactcatcatttgtaatgaatagcagagaaaaatcattagctacttagtttattttcccaaataaaatgtccaaataaatctaatgacatcaggataacaaacctggcaagacaagcaggcttgatggtaactagcaggacaattgtcacagcatatcagttcaccaccatcgccacatgatccacaggtatcatcgttttggtctgcttgaagggacattggatcctttgcatgctctttcctcaccttctgctctatagaccatgcttgaagctgacaaagactgtaagatttgcctgtatccaaaaaaagattcaaagatgggacttctt

SEQ ID NO: 3352 - DNA, 553 bp, Zea mays
  Clone ID: TF_LIB3354-003-P1-K1-A4
gtcagagtcatcctcagattctgaatttgttgtatcaggtaaggaattggaagaattgagggagcctgagcctccaaaggctgcaccaaatctgcatgtgtccttgagaaggatttgtattacaaggcatggagaaggcaagggaaaggagaaacaggaacatgaggaggctgggaagccaatatgcgggatctgtctctcggaggagctgagagctactgtacaaggtgtcctcaattgttgctcacactatttttgcttcgcatgcatcatggaatggtctagggttgagtcgagatgcccattgtgcaagcagcggttcactacaatcaccaagtcatcaaaggtagatcttggtcttggagtgagaaaagctgtagtcaaggtcgaagagcgtgatcaggtttatcagcccactgaagaagaaataaggcgttggctagacccatatgaaaatgttgtttgtatagagtgcaatcaaggtggcgatgataatctcatgctactatgtgacatttgtgattcctcagcacatacttattgtgttggcttg

SEQ ID NO: 3353 - DNA, 658 bp, Zea mays
  unsure (1)..(658): unsure at all n locations
  Clone ID: TF_LIB3279-224-Q6-K6-A4
ctggtataaaggaaggttccatcagcagagatggaataaaatgcatgtgttgtaatgaattattcactgtggagaattttgaggttcatgctgggagcagtacaccattaccttcgtctcatatgtttttaaaggatggaaggtccctatcacagtgtttagttgaattcatgggtggaaacaagcccagagatccactgcatgtgcgcttgaaggggagtagttctgatctggaaagtgattcgatatgctctgtgtgccatgatggtggggatttattactttgtgacaattgcccatcatcttatcatcatgattgtgtcggcttggaggtagaggccattccagaaggaagctggtattgtccatcctgcagatgcggtatttgtaacttgagtgattatgatcctgataccagccaattcactgagaagaccatagtgtactgtgatcagtgtgaacgggaatatcatgtcggttgcactagaaatagtgaccatcagcttatctgccgaccagaaggttgttggttntgcagcaggggatgctcaaatgtatttcaacatttgcaagaagtcattgggaaacaagttccaactccaatcgaaggcttatcttgcactatcttgaaattttgtagagcgaacggcggtgacca

SEQ ID NO: 3354 - DNA, 1299 bp, Zea mays
  Clone ID: TF_ZmC21748_1
ccggccaaaaaaaaaaaaaaaaaaaaaaaaaaaaaaaaaaaaaaaaaaaaaaaattctcgcaggcctccacgcgaccccggccgggccccgcggttttgcacttctcgccttctctaatctctttgcctccctccaccaccagtccaccaccactgctacccaaccctcgcttccccaaaccctagccaagggacacggtggccggcgatggacggcgacggaggaggcgctggtgcgctgcaccaccacacgcgctcacccgaggacgtcttccgcgatttccgcgcgcgccgagccggcatcgtcaaggcgctcaccacggatgtggagaagttctatcagcagtgcgatccagagaaagagaacttgtgcctttatggtttgccaaatgagacttgggaggtcactcttccagctgaggaagtacctcctgagcttccagaaccagcactggggataaactttgcccgtgatggaatggtcgaaaaagactggttgtctctagttgcagttcatagtgatgcatggctcctgtctgttgcattctattttggagctcgttttggatttgacaaagatgccaggagaaggctcttcaccatgattaacaacctgcccactgtttatgaagttgtgacgggggttgctaagaagcaatcgaaagcccccaacggcagcagcaaaagcagcaaacctaactctaaaccatcaaaactgaccaattctaacagtaagcccgcgaagccagcccacccaaaagaagaggaggacagcggccgggaggacgcagaggaggaccaggcgtacctgtgtgggtcctgtggggagagctatgcgaacggggagttctggatctgctgcgatgtgtgcgagaagtggttccatggcaagtgtgtccgcatcacccctgccaaggcggagcacatcaagcagtacaagtgtcccagctgcagcaccaagcggagccgagaatgacggcaccctgggaacaggacctgctcccagttaacggaagcattttagaatcattaggagctatgaagcggtgtcattagaaccgcttcacctgtttagcgtaccggtgcgcgtgccggctgttgtatcttctctcgacgtgtgttgtaaactgggcagggacatggtagctagtggtgatgtgttgtgttagcaggctgactgctgtcatcgtagtgacggatgaactgctggcgtttggaaactcgtgttcggtaattaagtgctgcttagtgtgataatggcttaaaaaaaacggtttaaaaaacaccccccccccagcc

SEQ ID NO: 3355 - DNA, 1181 bp, Zea mays
  Clone ID: TF_ZmC21748_4
ccccgcgtccgccccgcgtccgccccgcgtccgccccgcgtccgctcgcttccccaaaccctagccaaggacacggtggccggcgatggacggcgacggaggaggcgctggtgcgctgcaccaccacacgcgctcacccgaggacgtcttccgcgatttccgcgcgcgccgagccggcatcgtcaaggcgctcaccacggatgtggagaagttctatcagcagtgcgatccagagaaagagacttgtgcctttatggtttgccaaatgagacttgggaggtcactcttccagctgaggaagtacctcctgagcttccagaaccagcactggggataaactttgcccgtgatggaatggtcgaaaaagactggttgtctctagttgcagttcatagtgatgcatggctcctgtctgttgcattctattttggagctcgttttggatttgacaaagatgccaggagaaggctcttcaccatgattaacaacctgcccactgtttatgaagttgtgacgggggttgctaagaagcaatcgaaagcccccaacggcagcagcaaaagcagcaaacctaactctaaacccacccaaaagaagaggaggacagcggccgggaggacgcagaggaggaccaggcgtacctgtgtgggtcctgtggggagagctatgcgaacggggagttctggatctgctgcgatgtgtgcgagaagtggttccatggcaagtgtgtccgcatcacccctgccaaggcggagcacatcaagcagtacaagtgtcccagctgcagcaccaagcggagccgagaatgacggcaccctgggaacaggacctgctcccagttaacggaagcattttagaatcattaggagctatgaagcggtgtcattagaaccgcttcacctgtttagcgtaccggtgcgcgtgccggctgttgtatcttctctcgacgtgtgttgtaaactgggcagggacatggtagctagtggtgatgtgttgtgttagcaggctgactgctgtcatcgtagtgacggatgaactgctggcgtttgaaaaaaaaaaaaaaataacggcctgctgcttagtgtgataatttcctccggttaaaaaatgaagaaaaaatatttacttattatatgaacagaggtaggattatgactgcctgacattatgttttgtacaaa

SEQ ID NO: 3356 - DNA, 1457 bp, Zea mays
  Clone ID: TF_ZmC1977_1
cccggcttgggttgcccaccgagatcacccccctcaaaccctagcccctcttctcctcctctgaccatctcctcctcctcgcgcttcgccttcccaatctcgctgccgtttcttgggcctgggactcgcgctctgctatctgtgtccgcgtatggcctgcgacggcgccgccagaggccgccctcccaagcgccccgcttcgggaggcctggcccagcccaacgtcgtcacctacaagagacgccgccgcggcaccggcgccaacgccggccacagcgccgtcacgtctggccccgaccccgctgaaatggtactgtcccagctgcgttgagccagacgtagctttgaagcataaaaaccatggcaggtcacatgaaggctgtgatgtatgcgagtggctcgtggtgaagccagaagagcctgctgaagatgttagcgagcctgaactggcggtcaaaacgcaggagagctcagtgtcaagcatgggcgaagacagcgaaccagacctctcaacgactgctctagcgaacttgtgcaagaactgtggcacatgcgaagacgaggacaggaagttcatggtatgcgggcatggtttatgttctttcaagttctaccatgtcctgtgcctgaaagagagacagattgcaagcgagaagcagaagaatctaaagtgctggtactgcccgtcttgcctgtgcagacggtgcttcaaggacaaggatgatgagaaaatagtactgtgcgatggctgcgacgaggcttatcacatctactgcatggacccgccgtgcgagtctgtcccgagaggtaaatggttctgcacgcggtgtagcgcgcggaggtcagtgcaagggatgcagaggtatgagaagtcgatcctggagaaagtcaagcgtgctcctggtgccaatgggccgaaggtgcaggcatctgctggtccagaaaaataggcagcagtgtggatgatgtttcacaggccatactagggtagaagaaagggaaggatacttttgttcctctgagggagggggtatacattgctctggtagctttgaagaatcgatggatgggttgtgtatacgtggggggaaggaagatgccccgttggctgctgatgttgattcactgtgctgccatttcgtttttggaattcttgagtgtcgctcggcttgttgttgtgctgttatgttgtgtctgatggtaagtggcatcgcttatcgatgatatgtacatgcctgtaactcgttttcttttatttgttggacattgtgtgtgtgtgtgtgtgtgtttgaattgtgatgacctagagaacgctggtgtcaatcaatgcagcgtaccttgtttgcgcctaaatttggtagacaaaagaggagattaccttcgtagcatgtgtaccctgcatgtggaaggcaaacctatcaataattccttgtatgaatttgacatagattattacc

SEQ ID NO: 3357 - DNA, 409 bp, Zea mays
  unsure (1)..(409): unsure at all n locations
  Clone ID: TF_LIB4760-024-R1-K1-C1
ggacaccacgtcatcggccccattctcctccgtcctctccctctcgacttggcgacaggctctctctcctacccgagaggacagaccgcaccgccacgcacccggcaccccctctcctctctgccgtcatgggacgtgccgcgccgtcttcatcgccgagctcgccgcagctcgggcgcaagcgcacggcggcgcccacaccggagcccccgacaccgcagcgccactgctccatggtcgacgtcatgcgccgctcgcgcgccgtcgccgcgccgccccctgtcgcacgcgcgcgggtgtacacctactacgagacccttctctgtgagacctgcggcctcggtgaccgcgacgaccagatgctcctntgcgaccggtgcgaccgcggctgccataccttttgcctccg

SEQ ID NO: 3358 - DNA, 1181 bp, Zea mays
  unsure (1)..(1181): unsure at all n locations
  Clone ID: TF_ZmC24647_2
gggccggcctttttcctgtctcctcccacccttgcctccgagtcacctcctcccttggtctccgccgtcgctgcctccttgccggaaccctaaatggaccccggcgccggcgcacactactccgtccgtaccgcggaggaggttttccgcgacttccgcggccgccgcgcgggcatgatcaaggccctcaccaacgatgtggagaagttctaccagctgtgtgaccccgaaaaggaaaacttgtgcctttatggctaccccaacgaaacatgggaagtaactttgccagcagaggaagttcctccagagatccctgaaccagctttgggtataaactttgctagggatggcatgaatgagaaggattggttagcgctagttgctgtccacagcgattcctggttactagcagttgcattctactttgcagcccggtttgggtttgacaaagaggccagacggcggctcttcaacatgataaataacttgcccacgatatttgaagtagtgactggggttgcaaataaacaaaacaaggagaagggccccaatagtaccagcaaaagcaacaaaacaagttcaaaaatgacatcaagacccgagtctcattccaaggcgacaaaagtggcagtgccccctaaggatgacgatgatgagagcggtgaagaatatgaagaggaagagcgtgataacaccttatgtggatcaggtggaacaaatgacggcaaggacgaattctggatctgttgtgatagttgtgagcggtggtaccatgggaagtgtgtcaagatcactcctgcacgtgctgagcacatcaagcactacaaatgcccagattgcaacaacaagagggcaagagcctagcgtcaagccctggtgtgaccctggagtgaagtaagcgtcaaatcattgatgtctgcagatatatgcctacttgtctagcttgtagacttgcttttcatttcgcatgaacgctattgattcactcggttgccctctgcagctcatattgctcgggcttaattgtgtttaatgttttataagcggttgttgttgtagtaccaggcagtcttgcagacatgtgatagacgtttttggactcggcttaaaaaaaaaaaaaaaaaaaaaaaaaaaaaaaaaaaaaaaaaaannaaaaaaaaaaaaaaaaaaaggggcgggcc

SEQ ID NO: 3359 - DNA, 1704 bp, Zea mays
  Clone ID: TF_ZmC4031_2
gtcccttcaagcagaccaaaacgatgatacctgtgcatcatgtggcgatggtggtgaactgatatgctgtgacaattgtcctgctagttaccatcaagcctgcttgtcttgccaggatattccagatggcaactggtactgctctagctgcctttgcgacatttgtggtgaagtaatcgattcaaaggagcttgtaacttcccttcctgctttagattgctcacagtgcgaacgccaataccatgtaaaatgtgtatctgccaaagttccgtgcaatgaggatggatctggtacctggttttgtggaagaaaatgtcacgagatctatatgaccttccgttctcgtgttggagtgcctgatcacatggacgatgatctgtgtttcaccgttcttcgtaacaacggtgataagaaggttcgcacggcagaggagattgctctcatggctgaatgcaacatgaaactcatgatcgccacgagtatcatggaagagtgtttcctgcctattctagatcccaggacagggatagacattattccctccatattgtataactggaggtctgatttacatttcaattacaaggggttctatacagtagtcttggaaagtgatgatagcatggtatctgttgcctccataaggttgcatggtgcaattttagcagagatgcctctggtagcaacttctaaagagaatcgtcagcaggggatgtgcaggcgcctcatggattacattgaggagatgctgaaatccctgaaggtggagatgctgctcctatcagcaatcccgcacctggcggagacatggacatcgacatttgggttcagagagatagatgagtcggacaagaagaggctgagtaaggtgaggctggccgcagttccggggaccgtcctactgaagaaggacctgctgtgtgaatgttcaggcgcggacgccggtgagccgccgagccctaagcccttccaagtttactcgcgcgtgccgggcgcccgcaccggtttggatgcagtgtgccaataaagatgacgcagtggatcgaatgcgccgcggtcagtcgtcgtcgtcggtgacagggggcagctggtggtcgtcacggggcctcgtctccggttgctgaagccgaggccgagcacatcagcacgcgccggtttgtgtggtggaaatggaaagcctcgttgctctggtaggagctctgaagatcgctgtcgtctgcttgtagtctgtaaatagcttctccgtcggcgagaagcccagggtccacggccattgtagaaccgaacctgtatgataaaactagaccgtgttggcgccccaccagcgtttagtagtttccgttgccctttgaactcaaagtttcaggctagtccattgtgttcgtttcagaagcctgcggttttcagggggaggggaggtgccagaaagggaggacataacgcacgtgcagaccgagtattatgtggtggtgtcgtagacacgcacgagttgacgaagctataggagcagctcgtgatgagcaatggttggtgcagatgatgatgtcaatgagctcctcccgcagggaccggacctgtggacacggatggagctgaacttgtttgaaggatgcgtagtactaataatatatgcagtcaagccagcctgaacttatttgaatgaggtgtagtactaataatatatgcagccaagccagcctgaca

SEQ ID NO: 3360 - DNA, 1426 bp, Zea mays
  unsure (1)..(1426): unsure at all n locations
  Clone ID: TF_ZmC28160_1
ctgtcatctagatgtgtgacttgtcaagactggtaccatggctcctgcgtggaaaacctgtctgctactacacaaacgacaattgaatggatgtgttcattttgctcactcttacagagtgaggaccaattgaagaaccaactatctgtaaagatgtctaaaggaaactgtcctgcacttgccgcccctcgtccgctcatctcttctgcaaagggtttatacactgggattgaggaaattaatttgctaaaagaaattgttgataaggctcgtaacttgaatgcctacttgatgcaaattctggatgattcagactgttatcatggagaagatcttactgtcatattcaaatctcttttagttgctctcaaggcgacatcagcttctggcttgtatgatgacaatgtcagttgcagaattgagtctgttttgagcagatatttgtggaagaaacaaatacataaactattgtatggtggtaaaaagtcatcgattcaagaagtactgtgccttgatgaagagggttcacatttagagatatgtgatcaagatttcttcaagttggagattagtaaaataaaggaaaccagcctgcagtggctggctaaagcagaggaggttgcatgtgattctggtgagcttgcactggatcttgtgtatggacttatagctgaaggggaaaatctctctgtagactttgagaaggaactaaagttactgagggatcgcagtgtcctctactgcatctgctgtaagcccgacgataacagggccatgattgcatgcgaccagtgtgatgagtggtaccattttgattgcatcaacctgcttggaccccctccagaaagcttcttctgccctgcttgccatccaaacaatggtgaagaatctgtatcacttgcacgctcagaggatgatgaggatagatcaagcactggagccggagctcacacgccgccggacagagtggtggagcgagacttaataaagcttcttagctgccatagcggtagctcatggagcgagagcagaagggctcctcatcgaacagctagaaggcgtagtagtttcgtcggattgttatgatgtgcaggaaccttcttagcaccgtgaattgattctttttagttaggttagaagcaggaacgatccatcatctgctgttgtaatttgtagctgttgacaggaggtagatgtagcaaggcagagctgtaagaacccattattattgatcttgtagcagtctgaggttttggaaattgtatcatatactaccgccgttcttgaatatttgtcgcctattgtttcaaaaaacgacaaataaaaaaattaaaaaagaatggagagtatttttatgctgctgctatgcacggctcataaaaaaaannnnnancnannagnanaataaatttttttaacatcatat

SEQ ID NO: 3361 - DNA, 705 bp, Zea mays
  Clone ID: TF_jC-zmshLIB3587P047b02b1
attacaaggcatggagaaggcaagggaaaggagaaacaggaacaggaggaggctgggaagccaatatgcgggatctgtctctcggaggagctgagagctactgtacaagcggttcactacaatcaccaagtcatcaaaggtagatcttggtcttggagtgagaaaagctgtagtcaaggtcgaagagcgtgatcaggtttatcagcccactgaagaagaaataaggcgttggctagacccatatgaaaatgttgtttgtatagagtgcaatcaaggtggcgatgataatctcatgctactatgtgacatttgtgattcctcagcacatacttattgtgttggcttgggtagagaagtgcccgaaggaaactggtactgtggaggatgtagactcggtgacgagggaccatcatatactggaattcagcgtacagtagcttatgaaagacaaaattacagaagtcatgtcggtagttctgtaagttttggcatggctgtaccaggcggtacatttgaaaggccgtcatcaatcaatcctcgccattcttttcaagggattgatctaaatctatctccaagagagtttcccggagaatcacatcctgctgaatcacaagtttcaactgatagcgtatcaactcccactggaagagctggaaaaactatttcaggaaggcgtgaattacaacggtacattcagagttt

SEQ ID NO: 3362 - DNA, 2587 bp, Zea mays
  unsure (1)..(2587): unsure at all n locations
  Clone ID: TF_ZmC877_1
gnttacgaggnatgagntgtggntgatgacgatgacgacgacttcattgtcgacgatgaggtcattgtgaatcggcaccccaanaagaaggccaggatagggagtgggagggagacagtggtggaccctcaagtatctattgaggaagagacatggccagaccttgagtcagactcatcggactttgagtttgcgacgtccgatgaagaacctaacaatgttgaaacacctgtagctgagcagactacagtcagaaaaggaggaagaagaggatatctgagtcagagtcatcctcagattctgaatttgttgtatcaggtaaggaattggaagaattgagggagcctgagcctccaaaggctgcaccaaatctgcatgtgtccttgagaaggatttgtattacaaggcatggagaaggcaagggaaaggagaaacaggaacaggaggaggctgggaagccaatatgcgggatctgcctctcgcccacgcgtccgcccacgcgtccgggaggagctgaaagctactgtacaaggtgtcctcaattgttgctcacactatttttgcttcgcatgcatcatggaatggtctagggttgagtcgagatgcccattgtgcaagcagcggttcactacaatcaccaagtcatcgaaggtagatcttggtcttggagtgagaagagctgtaatcaaggtcgaagagcgtgatcaggtttatcagcccactgaagaagaaataaggcgttggctagacccatatgaaaatgttgtttgtatagagtgcaatcaaggtggcgatgataatctcatgctactatgtgacatttgtgattcctcagcacatacttattgtgttggcttgggtagagaagtgcccgaaggaaactggtactgtggaggatgtagactcggtgacgagggaccatcatatactggaattcagcgtacagtagcttatgaaagacaaaattacagaagtcatgtcgatagtagttctgtaagttttggcatggctgcaccaggcggtacatttgaaaggccgtcatcaatcaatcctcgccattcttttcaagggattgatctaaatctatctccaagagagtttcccggagaatcacatcctgctgaatcacaagtttcaactgatagcgtatcaactcccactggaagagctggaagaactatttcaggaaggcgtgaaatacaacggtacattcagagtttgttcagaccaagtctacctagtagaccagacacgtaccacaatattgcgcagaacagtggtggtgtatcaagaaatgaaccgaaccgctggaacttcccttcttcatcagaagcaaacacatcacagaatctgcctgatggcattcagaaccatcacagtgaccttccatttgttcaagctcacagcaattttgctccatttatgtccctagatggggatgatttccagcaaattgagggtgtcaagagcaacctcaggaacatgcagtagagcccttacggcgttactagaagctcgattctaccctgtgaagcttaccaagggggcaacatgtgccgttttaatggcttgtggaactgaacataacaaaagcttgtgcctgttgcattctcccagaaattgatgtggttcggctcatttgcggagatgtgatgtggtcaacgatataagatacatgctctctttgtttaagtttaggcattttttgttgtcgtcattcttattcattcagtcattaagcacaacctcagattacacagcgaagaaggcatttctgaatgtcttgatagcttcaaatttatacattgtaatattgtggtaacaccaatttcattaggctgaccattcttttcctcgcgagatgctcttttgcctactaggaatgctgataactgagcttcccagcctcttctataatcatataccgcgcggtggcaaactagcctcgttcgggtactggctttctgctctattagcatactggtctagtggatcaaccgagaaaagctatcaacaatcttagtactaacaatctatggtctgaagactcgtcttctttaagtgttttgttgtatagcgcagctgctttttgtacagatgaatgtttgttccatattgcttaagtttgttgtttaagtttaggcattttttgttgtggtcattcttattcattcagtcattaagcacaacctcagattacacagcgaaggcatttctgaatgtcttgatagcttcaaatttatacattgtaatattgtggtaacaccaatttcattaggctgaccattcttttcctcgcgagatgctcttttgcctactaggaatgctgataactgagcttcccagccttttctataatcatataccgcgcggtggcaaactagcctcgttcgggtactggctttctgttctattagcatactggtctagtggatcaaccgagaaaagctatcaacaattttagtactaacaatctatggttctgaagactcgtcttctttaagtgttttgttgtatagcgcagctgctttttgtacagatgaatgtttgttccatattgcttaagtttgtatccagtatccccttc

SEQ ID NO: 3363 - DNA, 753 bp, Zea mays
  Clone ID: TF_ZmC311_1
agcttaccacacttactgcatggatccaccgcgcagttctgtcccgagaggtaaatggttctgcacgccgtgtagtgcatggaggtcggcgaacgggatgcagaggtatgagaagtcgatcctgcagagcgtcaagcgtgttcctgatgccaaagggcccaaggtgcaggcagcagctgctgctccaggaaaataagcagcggcgctgtggatgcgagggtacaaaaagaaatgaaaggattcttgttcctctgaaggtgtatgcattactctgacagactgaatcgagtaatcggaggatgggctgtgtatacgtggggagaagacctgttggcttgtgaagacggagatggtggcatccgagtggacacgcacttttgtctctgtggatggagctgctgatgttggttccctgtcctgttatttccttcctggaattcttctgactaccccaagcgagtaggttgttgttgttgttgttctgttatgttgtgtctgccctttacctgatgctaagtggtaacactgacacccgcccatgttgacattgatatgtacatgtccgttacctgttttctttttgttggacaatccatatatacttttctgcatggcatgtggtcgatgtctgtataagtttattacatatctgattgaacccataaggcagaaagcttgggtgatatctaaacaatgatgcatctccatgttttttcttctttctttcaagtgtcatatttatgttgttggaga

SEQ ID NO: 3364 - DNA, 983 bp, Zea mays
  Clone ID: TF_ZmC350427_1
gttctagatcgcgagcggcctcccttttttttttttttttttttttgacagcagaagcgtgcggcattctacaaggtttttctttctaaaaacatacaatgcctccaactattcgtgtagtacatttatttttgttcaattaagtaagcgcgtgtaatccacacaccatggaaagaccaccacacagcgtacagaaagatcaccttcgcctggaccctctgcccctgcgttcggtgcctctagcatgcttcgtctcggtctcgggctccggcacggcgcacctggggcacatccagtcgtcgtcggggacggcgtccaggggagggtcgcagcagtcgatgtgcatgccgatcccgcagccggcctcgccggcctcgtcgccgcagatcagcatcacgtctccccggtccctgcggccgcacgccgagcagctcaggtcctccggatcgtcgtcttccgacggttccgacttctccgccgttgccatctctacctgcttcttcgtgagtttctccagggacttgctggccacgcagttcgtctcgaagagaacgtgccggtccaggggctggcccggcttgcacacgtactcgaccaggtaatcggcgctgacacagggaatgccgtggctgatgaattcctggacccacgcgtctgttcgtgatatgctctctgataccacggcgaagtcgactccagagtctaggaaccgggtgtatggcggcgatgttgctaaaacggcgccatcgccggcctttactgcacgctttactgtgtccagagttggtaatatgaactgtccgtaggcaacgatctgcattccgtagaaggcgccatggcccatctgctgccttatgtttcgccatttcctgggagcgtcgaaactgattgttcgtccatcgttgaagcctgtgccgaaccattcaaacggttcttcgtccacgaacttgccggcctcaatgcacgcggtcaagtactctctc

SEQ ID NO: 3365 - DNA, 1235 bp, Zea mays
  Clone ID: TF_ZmC21748_2
cggacgcgtggctcgaggccggccgggaggcctacggtctcgcggtattgcgcttctcgtcttctctaatcctcttctgctccctccactaccagtccaccaccaccactgctaccatcggttccccaaaccctagccaagggacacggtggccagcgatggacggcgacagagaaggcgctgcggcggtgcaccaccacgcgcgctcccccgaggacgtcttccgcgatttccgcgcgcgccgcgccggcatcgtcaaggcactcaccacggatgtggagaagttctatcagcagtgcgatccagagaaagagaacttgtgcctttatggtttgccaaatgagacttgggaggttactcttccagctgaggaagtacctcctgagcttccagaaccagcactgggcataaactttgcccgtgatggaatggttgaaaaagactggttgtctctagttgcagttcatagtgatgcgtggctcctgtctgttgcattctactttggagctcgctttggatttgataaagatgcaaggagaaggctcttcaccatgattaataacctgcccactgtttatgaagttgtgaccggggttgctaagaagcaatcaaaagcccccaacggcagcagcaaaagcagcaaatctaactctaaaccatcaaaacagatcaattctaacagtaagcctgtgaagccagcccacccaaacgaagaggaggatagcggccgtgaggacgcagaggaggaccaggcgtacctgtgtgggtcctgtggggaaagctatgcgaatggggagttctggatctgctgcgatatctgcgagaagtggttccatggcaagtgtgtccgcatcacccctgcaaaggcagagcacatcaagcagtacaagtgtcccagctgcagcaccaagcggagccgggaatgacaggcgccctggggcaggactcgctcccacttgacgaagcatttagaatcattaggagcagtgaaagtgtgaaactgtgtcattagaatcacttcctctgtttagtggaccagtgcgtgtgctggctgttgtatttttctcgtcgtgtgttgtacactggtagtaatggacatggtagctagtggtgacgtgttgtgttagcaagcaggctgactgttgtcatcgtagagtcggatgaactgctggagtttggaaacacatgttcagtaattcagtgatgtttagcgtgtatgataattttcttcggct

SEQ ID NO: 3366 - DNA, 477 bp, Zea mays
  unsure (1)..(477): unsure at all n locations
  Clone ID: TF_LIB3591-115-Q1-K6-A4F2B
cnaaacccagaaaagggggggcgattttttataaataaacacccctacccatatcttatatactaccgaacaccgaagatatccaattttcttataaaggttcaaattacactaaaaccacaagaattagcctgcctgcctgctaaatacaatatctatttaccatgtcgggtacaacacaatgactagaaaatacaacaaccggcctgcaccccggttctgctgcttgacggaaagaagttgcaggggaagccgttttcccccctttcaccaattcctaacgattctaaaacatgtcaaccgggaccctcccgtggtcattctcggctccttttgctgctggaaccagggcacttgtactggttgatgcgctctgccttcggaggggtgatcccaacgcacttgccatggaaccccttctcgcagacgtggcaacaaaaccaaaactcaccgttcgcgtaagtttttccccaagcc

SEQ ID NO: 3367 - DNA, 1422 bp, Zea mays
  Clone ID: TF_ZmC1446_1
ttgggtacctcgaggccggccgggaccgggtctcagaaggatggaagcatgatggagcacccacacaggtcgccgagaaaatcctccccccaaacgccgacgaaattctccgcgagcaaaatataaagtttataaacccactcctccccttcccctgttccctctaccaccaccaccggcaccgcgggacagtctgctctcgtcccgccgcagcccgtccccgacccggaaccctagcgactgccattgcccacgcgccgctcgcccgatgaacggcgggggctctgggctggcgcccaacgccgcgcacaccgcggacgaggtcttccgcgactacaaaggccgccgcgccggcatgatcaaggccctcaccactgatgtggagaggttcttcaaactctgtgaccctgcgaaaaggagaacttgtgcctttatggctatcccgatgagacgtgggaggtgaccttgccagctgaggaagttccccctgagatccctgaaccagcattaggaatcaactttgctagggatggcatgaatgagaaagactggctggcgctagttgcagtccacagtgattcctggttactgtctgttgcattctactttggtgcacgctttggatttgacagagaaactaggaggcgactctttagcctgataaacaacatgcccacgatatttgaggtagtgacaggagcagccaagaagcaggcgaaggagaagacacctaatagtagcagcaagagcaacaggcctagttcaaaagtgcagtcaagagcagagtctcgttcaaaggctaaggtcccccaagacgaagaagagagcggtgatgacgatgaggatgaggaggcagacgagcacaacaataccttgtgtggaacttgcggaactaacgacagcaaggaccagttctggatctgttgtgataactgcgagaagtggtaccatgggaagtgtgtcaagatcacgccagctcgagctgagcatatcaagcagtacaagtgcccagactgcaccaacaagcgggccagggcatgagcggcaaacatcggcatcgggcgacctttgataggaaggaagaaaccacctcctggcttcaagatccctagatatggcgtaggtccctagtttacgaagtctgcattttcatgtgttcattaatatatctgctgattagctgttcgacctagcagtgtctaaaacgtgccgtgtgtcttctgtgctgagtgttgacatggggcctcctccctccagcctgtaaacgctgtcactgaaggtacctctcaactgaccatccttcattgttggtgtcgtgcagtgagtagtggccgtactctttgttcccagttcctagcatttgaattgctcaaatgcgtaccttgctgagtaaggccgttggaaaatgactaaacaaaataa

SEQ ID NO: 3368 - DNA, 1341 bp, Zea mays
  Clone ID: TF_ZmC1446_2
tgggaccctcgaggccggccgggataagtttcaaacccactcctccccttcccctgttccctctaccaccaccaccggcaccgcgggacagtctgctctcgtcccgctgcagcccgtccccgacccggaaccctagcgactgccattgcccacgcgccgctcgcccgatgaacggcgggggctctgggctggcgcccaacgccgcgcacaccgcggacgaggtcttccgcgactacaaaggccgccgcgccggcatgatcaaggccctcaccactgatgtggagaggttcttcaaactctgtgaccctggtgagtgcgctcgatctctttggttcctcgccccaggatgtggagtgatagccgaggaggcttccgtggtttttctgcttgggcttcgttgcttcgaaaaggagaacttgtgcctttatggctatcccgatgagacgtgggaggtgaccttgccagctgaggaagttccccctgagatccctgaaccagcattaggaatcaactttgctagggatggcatgaatgagaaagactggctggcgctagttgcagtccacagtgattcctggttactgtctgttgcattctactttggtgcacgctttggatttgacagagaaactaggaggcgactctttagcctgataaacaacatgcccacgatatttgaggtagtgacaggagcagccaagaagcaggcgaaggagaagacacctaatagtagcagcaagagcaacaggcctagttcaaaagtgcagtcaagagcagagtctcgttcaaaggctaaggtcccccaagacgaagaagagagcggtgatgacgatgaggatgaggaggcagacgagcacaacaataccttgtgtggaacttgcggaactaacgacagcaaggaccagttctggatctgttgtgataactgcgagaagtggtaccatgggaagtgtgtcaagatcacgccagctcgagctgagcatatcaagcagtacaagtgcccagactgcaccaacaagcgggccagggcatgagcggcaaacatcggcatcgggcgacctttgataggaaggaagaaaccacctcctggcttcaagatccctagatatggcgtaggtccctagtttacgaagtctgcattttcatgtgttcattaatatatctgctgattagctgttcgacctagcagtgtctaaaacgtgccgtgtgtcttctgtgctgagtgttgacatggggcctcctccctccagcctgtaaacgctgtcactgaaggtacctctcaactgaccatccttcattgttggtgtcgtgcagtgagtagtggccgtactctttgttccc

SEQ ID NO: 3369 - DNA, 682 bp, Zea mays
  unsure (1)..(682): unsure at all n locations
  Clone ID: TF_ZmC831741_1
ctgttccgccgctcgccacaaaacccctctcccctcacgctccccacccacctcctccccctcgaggcaatgccgagcgcccttaacctagtctgagttcgagctcaatccccattccgtcatggatcggccgccgcatctcgtcatcgacctcaacgaggccccgccgccgccgtcgagcgacaccccgccggcgcaggccccgtcgccgccgcaggagttggctccgcccgtccaagctcctcctcctcctcctcctccgccgccgccgccgcagtttcctcctctcctgccgccgcagctgcccctgggtgcgcccaaccaacaggtgcggctccagcaggaggccctcgacgtggtgcttcgggtccaccgccccctcgaactgaggaatacaccttttgggcccatagggaacgtgcccgccggcttgctccctggtctggggctgccgctgctccctctgcagccgccggcgcctcaccctggggaggcggcggttgnggcaacccgccggccccctgctcgncctgcggncgccaggagattctggggggaaccttggtctgcgacgcgtgtgacagggggttccatcccaactgcgtccgcgtctggccggctctcttccccccgcccccgccacccaacgagggactggatctgccctgcgtgggaaaggcgt

SEQ ID NO: 3370 - DNA, 407 bp, Zea mays
  Clone ID: TF_LIB3059-004-Q1-K1-G10
aattcccgggtcgacccactcgtccgcccactcgtccgggggacactatcctgggttatagagcggttcaggttaattggaaagatctggactattgcaatgtttgtgatatggatgaggagtatgaagacaacttattcttgcaatgtgacaagtgtcgtatgatggttcatgctagatgttatggtgaacttaaacaattggatggaggactttggctttgcaacttgtgtcgaccaggtgcacctcgtgtgtctccaaaatgctgtctatgtccagtcacaggtggtgcaatgaatcctacaacagatggccgttgggctcatctcgcatgtgctatatggatccctgaaacatgcttaaaggatgtaaagagaatggaacctattgatggactgagcataatc

SEQ ID NO: 3371 - DNA, 1244 bp, Zea mays
  Clone ID: TF_ZmC1446_3
gcacgagccgcgagcaaaatataaacccactcctgcccttcctccaactcctccgttccccgttccctcctctaccactggccccggcaccgcgggagcgccgaccgcctgctcgtctcgccgcagcccgtccctgagccggaaccctagcggccgccattgcccacgcgctgcgcgcccgatggacggcgggggctccgggccggcgcccaacgccgcgcacaccgcggaagaggtcttccgcgactacaaagcccgccgcgccggcatgatcaaggcactcaccaccgatgtggagaggttcttcaagctctgtgaccccgaaaaggagaacttgtgcctctatggctatcccgatgagacatgggaggttaccttgccagctgaggaagtgcccccagagatccctgaaccagcattaggaatcaactttgctagggatggcatgatgagaaggactggctggcgctagttgcagtccacagtgattcctggttactatctgtcgcattctactttggtgcacggtttggatttgacagagaagctaggaggcggctctttagcctgataaacaacatgcccacgatatttgaggtggtgacgggagcagtcaagaagcagcaggcaaaggagaagacacctaacagtagcagcaagagcaacaagcctagttcaaaagtgcagtcaagagcagagtctcgatcgaaggctaaggtccccaaagacgaagaagagagcggtgacgacgacggggacgaggaggcggaggagcacgacaacaccctgtgtggaacctgcgggaccaacgacggcaaggaccagttctggatctgctgcgataactgcgagaagtggtaccacgggaagtgtgtcaagatcacgcccgcacgggccgagcatatcaagcagtacaagtgcccagactgcaccaacaagagggtcagggcgtgagcaaccgaatccgatgcgaccttgctaggaaggaaaggaagaaacgacctccttggcgccaagatatggcgtgtagttccctagtctgtaagcctgcatttttcatttatggttgttttatctgttgattagctgttcgacctagcattgtctaatgcgtggcatgtctcatgtgctgagtgttgacattggcatgggccccgccctctagtctgtaaacgttgtcactgaaggtacctctcggctgaccatttctccaaaaaaaaaaaaaaaggccggccggcgccgtt

SEQ ID NO: 3372 - DNA, 2151 bp, Zea mays
  Clone ID: TF_ZmC4031_1
aaaaacagaaagcaaacattgcttctttaaataattgcgtaagtatggacaatttaactgtcaatcctattgatcctgtagttctcaatgagggagagcagacaggtacagcaatcactgagcaggttcctgttcctttgaatctagtgcttgagaataaaaatgacaaggaccaaggtgagcaaagcagtgaaacttcagaacaacttatgtccaaagaaccacaaaaaagggacatcaaaaggcaaaagagaacatggtctcatacatgcaagtttgatgatgatgaccttctgatgacagctgtaatatataagctgacagcacgttacaggaactcttttcatcggaagctcagaaataaattcggtttcaggcgtcttccaacataccgctgggagaatgaagataaaggtgacaggaagaagtttcctggagaagcaaggacggtgttgaacaagttacttgaaatgggcattgttgctagagtggatattcttcaatgtcatggtccaggaggcaaaaatgtgttgaaggatgggaacataactgcgagtggcattcaatgccagtgctgtggtaccacattcacaatgtccaagtttaagtgtcatgcaggtctcaggcaagaagtcccatctctgaatcttttcttggatacaggcaaatcttacagtctttgtcagcttcaagcatggtctatagagcagaaggtgaggaaagagcatgcaaaggatacaatgtcccttcaagcagaccaaaacgatgatacctgtggatcatgtggcgatggtggtgaactgatatgctgtgacaattgtcctgctagttaccatcaagcctgcttgtcttgccaggatattccagatggcaactggtactgctctagctgcctttgcgacatttgtggtgaagtaatcgattcaaaggagcttgtaacttcccttcctgctttagaatgctcacagtgcgaacgccaataccatgtaaaaagagtatctgccaaagttccgtgcaatgaggatggatctggtacctggttttgtggaagaaaatgccacgagatctatatgaccttccgttctcgtgttggagtgcctgatcacatggacgatgatctgtgtttcaccgttcttcgtaacaacggtgataagaaggttcgcacggcagaggagattgctctcatggctgaatgcaacatgaaactcatgatcgccacgagtatcatggaagagtgtttcctgcctattctagatcccaggacagggatagacattattccctccatattgtataactggaggtctgatttacatttcaattacaaggggttctatacaatagtcttggaaagtgatgatagcatggtatctgttgcctccataaggttgcatggtgcaattgtagcagagatgcctctggtagcaacttctaaagagaatcgtcagcaggggatgtgcaggcgcctcatggattacattgaggagatgctgaaatccctgaaggtggagatgctgctcctatcagcaatcccgcacctggcggagacatggacatcgacatttgggttcagagagatagatgagtcggacaagaagaggctgagtaaggtgaggctggccgcagttccggggaccgtcctactgaagaaggacctgctgtgtgaatgttcaggcgcggacgccggtgagccgccgagccctaagcccttccaagtttactcgcgcgtgccgagaggccgcaccggtttggatgcagtgtgccaataaagatgacgcagcggatcgaatgcgccgcggtcagtcgtcgccgtggtcgtcgtcggtgacaggggcagctggtggtcgtcacggggcctcgtctccggttgctgaagccgaggccgagcatcagcacgcgccggtttgtgtggtggaaatggaaagcctcgttgctctggtaggagctctgaagatcgctgtcgtctgcttgtagtctgtaaatagcttctccgtcggcgagaagcccagggtccacggatgccgctggccagtggacgcggccattgtggaaccgaacctgtatgataaaactagaccgtgttggcgccccaccagcgtttagtttccgttgccctttgaactcccaagtttcaggctagtccattgtgtt

SEQ ID NO: 3373 - DNA, 2228 bp, Zea mays
  Clone ID: TF_ZmC37301_1
cccgggcgcgcctttttttttttttttactatcacaaaaagacattgattggccagcaaataacaccagcaaccaaatataagtgaataacaaattgtcgagaaactcgtcggaaaactaaacatacaaaacactccagacacggcgctacctgcttctcttacatccaaggtgatctaaaacctcattccctaccctaacagaatctagtcgaaagccaatggggcttccaacaccaaaaaacgatgtctgttacacgctaggctagcgaaacatggcgcaacagatggaagttgcgctcagtatctcgtccagtcagcaaaggctgagaggctctgctccagcggatgtcaaacctcagggggggaggactctacctgccataatcatggcgcaatgtattgagcgagaacaggtcctaagctgcatattatggggaaaaggtttcatcgcttcccgcccttcgatcttgaagcaatcaagcggatggcctgcttccccagctccacgttctcagacctgccattatctaaccgaatacacagtgtgccacccatgacattagacaccatcccttgatgccatttgccatcagaagttagatggacctcaatcctctttccgatcgcatccttgcccaacttgcgtagaatccagtttgcgtccatcacttcatctcgtgctctgctgatgcctcttggctggagttataccgtccaaaccatctgccttctccatcgaaggcctcttcctctttgatctctggcctttagcaacatttaactgctcctcttgctgagaaacccaggaggtcggctcctctggttgagaggcctgggtgtttagctgctcataatgtggacgcttaaacttgagtttgagcaatgatggcttcaagttatcaggagagtcagcagttccctggttctcgtccacctgactagaatgagattgtttctgtgcaaatggccggtttctagtaccagtttcatttccattctccattccagaaattagagcattgctccttttcccagttgcatgcttttttgaggtaccaagatcacccaaaaggctatttctttgttgtaccccagtctctctaactaacttcattacacttctctcttttacctcgcttcttgaacctttcagctggcttgtgacatctattttccgtccatgtattgatcctaaatcttgctctctttgataattggacagctccgacttaggagagccactcctagttttatgccgtgaaccaagatggataaccaacttggtagcttttccagtgtcagtcttggaagtattttcttcaccatctttgtaatgcaaactcgaaaccttactgcctttaatcttgactttgggtatcatatcagcattgtttgtcacagctttcatggatggagattttaaattcttttctgaacttcgagttgaagatgaaatataggcattatcatcattcttaaaagggctcatatcatgattgtcatctatagtttgatctcccaaacagctatttgatgatttaacagcatgccttctctccagaaatatttcatcatggccatcaactgttttattagcctgaccacttttctttttggaaggcttcttatttgatccagagctcttaaaaacaatcttctcttgctcaggtgtatctggtggaggtttactactgttacttttcaatgaaaactttagagtatttctactctcatttttcaatgcatatgcaccgagtttctcatcatcagagttttgataaggtggtgagacatcttcaagagaaggcagtgcagcagcagcccgtaaagtagccataagctcatgatcggcaacatccctcctcttccaaagctcccggattgcatcctcagtgtctctgatctgggagcattcaccacggcatgctgcacatgtgtactgaaggttttgatcagcttggaattgttggtacttttcctcactgatgccatcacactcaatatgcacccacttttcacaaacatcgcagcaaaccataggtatcacttcagagtctctataaaccttcaagcagattggacagtagtttcctttcacaaacaatcgtccacacgcatcacagcatgtgtaccccaaaaaccaccttgtgctgtgtccactaccaggcacaccagatccacagctgtggcaccttgtatgttttggacataaatatggtccatgag

SEQ ID NO: 3374 - DNA, 2326 bp, Zea mays
  Clone ID: TF_ZmC1977_2
ctcgctggtttcccccgctcctccaatttggacagccgcttcggcttcgcttcatcctcccccctcccaccccaactcctcgtcccgctccggcgtgcgtttcctttcccggcttgggttgcccaccgagatcacccccctcaaaccctagcccctcttctcctcctctgaccatctcctcctcctcgcgcttcgccttcccaatctcgctgccgtttcttgggcctgggactcgcgctctgctatctgtgtccgcgtatggcctgcgacggcgccgccagaggccgccctcccaagcgccccgcttcgggaggcctggcccagcccaacgtcgtcacctacaagagacgccgccgcggcaccggcgccaacgccggccacagcgccgtcacgtctggccccgaccccgctgaaatgagcgcggtggtgcacgccatcgattcccagcaaggtgggcgccaaacgctgggcaggcactggagaaactggagggacacgctggagggcgtcctacaatccactgctgggaagcagggctccggagggattcagagctgcatccgagctgcgctcagatttagtggttgccctcccacagaacatgggaacttagctcacgacggaggagcaggcagagatgaccctgttggagctgtacattctgaagagaatagtggtgccttggttcagttagaagacggaacagctgcacctttggaagccaacaaaacgatgtgccataatgctctctttgacattctgatctccgagaagtttgcgatgctgtgtgatctgctagctgcaacattccatgtcagtaagcctgacgatgtgattggtttgcaaataattgatgccaagatgagaaatggggattatgcacagaaccatgcgctgcttgaccatgatatcaagcagatatggaagaagtttgaacacgttggccaagaaatggctggtctggcaagcagtctcttactgatttcacaagcttctaaccaaaagcaggcttctggtgtttcagaaattgatgtggctgaacacaagatagaagaaacaagcctggttggtgttgcccgcaaagccctaagggagttgactccccagtgcgattctggctattctacgataccaaaacgaactgggaggtctggatcggatggaatttgcaaggattgtggcagaaaggcagacagcaaaggaagaattatctgtgacagatgtgaagctgcgtaccatgtttcgtgtctgaagcttgccatcgatgaagaggccccagcaaaatggtactgtcccagctgcgttgagccagacgtagctttgaagcataaaaaccatggcaggtcacatgaaggctgtgatgtatgcgagtggctcgtggtgaagccagaagagcctgctgaagatgttagcgagcctgaactggcggtcaaaacgcaggagagctcagtgtcaagcatgggcgaagacagcgaaccagacctctcaacgactgctctagcgaacttgtgcaagaactgtggcacatgcgaagacgaggacaggaagttcatggtatgcgggcatggtttatgttctttcaagttctaccatgtcctgtgcctgaaagagagacagattgcaagcgagaagcagaagaatctaaagtgctggtactgcccgtcttgcctgtgcagacggtgcttcaaggacaaggatgatgagaaaatagtactgtgcgatggctgcgacgaggcttatcacatctactgcatggacccgccgtgcgagtctgtcccgagaggtaaatggttctgcacgcggtgtagcgcgcggaggtcagtgcaagggatgcagaggtatgagaagtcgatcctggagaaagtcaagcgtgctcctggtgccaatgggccgaaggtgcaggcatctgctggtccagaaaaataggcagcagtgtggatgatgtttcacaggccatactagggtagaagaaagggaaggatacttttgttcctctgagggagggggtatacattgctctggtagctttgaagaatcgatggatgggttgtgtatacgtggggggaaggaagatgccccgttggctgctgatgttgattcactgtgctgccatttcgtttttggaattcttgagtgtcgctcggcttgttgttgtgctgttatgttgtgtctgatggtaagtggcatcgcttatcgatgatatgtacatgcctgtaactcgttttcttttatttgttggacattgtgtgtgtgtgtgtgtgtgtttgaattgtgatgacctagagaacgctggtgtcaatcaatgcagcgtaccttgtttgcgcct

SEQ ID NO: 3375 - DNA, 1200 bp, Zea mays
  Clone ID: TF_ZmC17187_3
gcccgaagatcttgtcatcttccccttttgcccggcagcactcgtcctagtgtactatcatctcgtcgctcggctcccgaccgcatcgcgatcagtcatctcctgcgtctcgttctcgccggagatcagacgcgccaccgccgggcgatggatgcctcctaccgccgcgccggtgccggaagcggttctgctccccgctccgtcgaggacatctacaaggactaccgcgcccgccgctccgccgtcctccgcgccctcacccacgacgtcgaggagttctacgcgctgtgcgatccagagaaggagaacctgtgcctatacgggtacgcaaacgaagcgtgggaggtggcgctgccggcggaggaggtgcccacggagctgccggagcctgcgctcgggatcaacttcgcgcgcgacgggatgaaccgtcgcgactggctcgcgctcgtcgccgtccactccgactcgtggctcatatccgtcgcattctactacgccgcgcggctcaaccgaagtgatcggaagcgtttgtttggcatgatgaatgacctgccaactgtttttgaagtcgtctccggtggtgtgaagcaatctaaggaaagggacagatccggtactgacaacagtggtagaaataaactgtcagcaaagcaaacaagcgagccacggttagaaaataatgccagggagcctgacgagggctacgatgaagacgacggctaccacagcgaaaccttgtgcgggacatgtggtggaatatacagcgcagacgagttctggatcgggtgtgatgtgtgcgagaagtggtaccatggcaagtgcgtgaagataactcctgccaaggcagagagcataaagcagtacaaatgcccgagctgcagcttcaaagagggcgaggcagtagcaaaacccatgaacgcaggaagcctccgaatgtgggatgtatggtgcagaagaggcgcattgcaaagtttgcaggcaggagaaggccaagagacctccatttacaagattagaactatattgctatcttccctgtgccttatgcttactttttttacatatgataagctgatgtgaggaaagataagacatttggcaaccagaggcacttagttaaatgcccctagatatacatgggggtaaaagaagaggaactcatgttttgtcaaatatatggaactttttttcccctcttac

SEQ ID NO: 3376 - DNA, 615 bp, Zea mays
  unsure (1)..(615): unsure at all n locations
  Clone ID: TF_LIB3689-236-Q1-K6-B3
ctgtagtctgagtcgaagttccaaggaggctttgctaaggaacatatcatcaggcaagaagggtgggagtgccggcaaagtaacaaacaagttgggataacagactacacaaattggtctttaatgttctgcttgatggcacagaagtagcttactatgttgatgggcagagaaaggttgatgggtatatcaaggatcatagaatctactgtaatcactgcaacagagtggttagcccatcagcatttgaagctcatgcaggtatgataacatattcacatcaaacggagtatcattgcatgagctggcgatgaaaatatcaaaggatatggaactgtcagaacgcgagacagatgatctgtgcagagaatgtggtcaggggggagacattttcccgtgcaaaatctgtccaaggtcatttcatccagcttgcgttggactgtctaaagtccccgcagaatggtattgtgatagttgtcgcaatcttgtgcaaaaagaaaaggctttagcanagaacaaaaatgctaaagctgctgggaggcaagctggagttgattccattgaacagantatgaagagagctatacgaattgtccccatctctgatgatcttgg

SEQ ID NO: 3377 - DNA, 835 bp, Zea mays
  unsure (1)..(835): unsure at all n locations
  Clone ID: TF_ZmC229769_1
gccccaagaagtatctagaccgacttgagaagaaggtcgtgaagcaataagtttgtatgtctaaaataattcaggccacaaagcataataacagcctcaacaaaaacctgaggcagttttcaaagacggcttgctctctcaaattggagattttcctagaatttaagaacatcccttgcagtttggataccagtaaggtgtatcgagttaagtatcttctcaagcaggtgcaagtgcaacaaagcaaaaagacagataaacgaaacaaatatcctacagcatgttatcatatagcacgcatctcaaaaggcgaatgctgtttgaagatccttgtattttcatcagttcgtgagaggactgcagcaaatgttgttaactgcccttgcccgagccttctgatcctgaggcaggcctctgctctttaaacaacaaactcactttacacggcaaaaggaccgtgtagcaacacgctaatctgtacgagtctccagctgctcatctatcctgagctgctccgcggcagatagcagcaggtccacaccatcaaaattccaactttgtagtccagcatcctccttccggtggagcttcagcgtcctcctctcgtactgtctcatcccctcttatgccctctccacgctgcacgatgagcaataccactgccccttgggtattgaagtatgcgagggtgttatgcagtagatatggtaagcctcgtcgcaactatcgcacagaatgctcaggtcgtcgtctttgtcacacagacaanctcggcaaaggcaagacgggcagtaccagcacgggctgcccatctctacactggtagagatctgca

SEQ ID NO: 3378 - DNA, 3583 bp, Zea mays
  Clone ID: TF_ZmC26156_3
aattcggcacgaggctcatgctggttctgaagtaaataagccatacagaaacatacttgtggatgggctagacattgaccttttgcactgtctcattaatgcatggaatatgcagtctgatgctgaaagacaagatttctttcccgttagcattgagggagatgaccccaatgatgacacctgtggtatttgtggagatggaggcaatttgatctgttgtgatggatgcccctcgacatttcacatgagttgtctaggactggaggcacttcccactgattattggtgttgttccaactgctcatgtaaattttgccatgaacattctagtgatgatgctgaagacactgctgatgttgattcttcattgcatacttgttcccagtgcgaagagcagtgtactgatccctgtttatacttactctgtagtttttttgaatttcgaaatcttttgacactttttattccattttcattattatcttactatattattttgatgttcaatcatgtctttgagtattttatacgataatgtctgcagatcatggagcctgctctcctgatattgattccatagctactaatctttctagtcagacaggcaatttattctgccaacaaagctgcagactggtaacgcttgtcagattattgttcttttttccttgaccttgtttctggatatgctaccttgtggttttcatgatcataatttaaatggtgacacttgctgattcacagtcctgtttgaggcagatatcggtcccttttttaacggctcatgtttgttttgggactaaaatgtttttgtggtttttttatgtttaacaccttaatcaatcatgagatgttaggtttgaggaatatgcttgtccatcatcctcgtattccccaaaagctagttttgattgccaaatggactgagttgatccattatcaacgcatttgtcatggttagtttgtaagtactaccacgaaaaattctgacatctcaccaaatttgaggaatagattcatgatgcaccaccgcatcttggatgaagtgattcctcaaaccaaacacctcctaaatatctgcaccatcccgctctgttagcttcctttcttgatcatatgcatatatgtttttccttctaatagcaatattgcaagtgctgatcccctaggtttggggtggtttttatttacatggatttcattactacaagtgattacatatagtaaggtactatatgagtgtggtattttgtcatggggcggcaacccagggcatggaggcttagattggataagattgagttagttacttgggattagattagataatattgagttagttacttgggatccaagtcttcctatctatataaggatgaactgtacctccttaagaagaaaaaggaatgaagaagaattagtcctagatctctccaatagtctagtccctcccatgctgactctgcccggctaccttcccggcgctgactaggattcataacatatggtatcatgagtcaggtatcctttccatgacttctgctgcggacgatgtacgcacatggcgtgaggagctcgctcgtgccagggcagatctggagcaggcccgatctgctatcctccagctagtgatctactcacggcaaaggtggagtctgactgccgatcagcggcgacaacgcgactgcaggaggctgtgcatgggttcctggcgtgacgtccagtgtggcagcggcttgccgtcttcaggctacgacacgtggcttcctggcgcggcgtcaagcacagcaagcagcggcttgccctcttcaggttgcggcacttggcttcctgacgtggcgtcaagcacgacaagcggcaacacggttgcaggctacggtccgccgttccctggtgcagcgacttgcatcggtattgcgcgttgaacaacacgcggcacgtggggcgacaaggccttcagcagggttggccgatccttagccatgtggacagcaagaacaagtctggttgggtggtgctgtctccactggaactcgcggtagctcaggccgtaagactggtgagctgccacgtcttggcctttgcagcctggaagaggttgttcccatgggatccagggtggcatatgttaggttctttattttatttgttaataaattaaagcggagatgtaaaaggcttatagttagggttgcactttcacatgcatatcaagttagacagcaaggttgtttccatgcaccgagaacgagctgtcttcaaagggtgggggaatgtcatgtggtggcagcccagggcatggaggcccatagggataggctcagggttaggattagtgaataaagattagataagattgacttagatacttgggattagattagataaaataagattgagttagttacttgagagccgagtcttcgtatctatacaaggatgggctgtacctccttaagaagaaaaaggaatgaagaagaattagtcccagatctctccaatagtctggtctctctcaagccgactccgcctgactaccttccggcgctgtttatcacccctatgaactaggattcaaaacatatttgaactattatttagtgacttgagaaccttgtcattttaatccagctattaaaagctctactcttcttttggattgagtcgctatatttttatttctgaaactagacagttggtatttagtcataagaaatgtgtaatgcaaaaacaccatggaagttgtgtatttttgaaaatgctgtattaaacactattttttaccatcaaatcaaacacacatcctgtctagatcctttctatctatttgtggttttatttatcttctagtttattaatgtatgtataccctccctacaagccgcaactgacccaagaacttccaaacttcaaatggtatagttgcataatctgaaattactagttctgtgatgcagctgtttgaggaattgcagaatcttctcgcagtcaagaaggatcttgaaccagaatactcatgcagagttgttcaacgcatccatgaagaggtaccagaagaagtccttgctttggacaaaagagttgagtgtaactccaagattgctgttgcactctcattaatggacgagtgcttccttccgattgttgaccagagaactggcatcaacttgatacgcaatgttgtgtataactgtgggtatgcagctatctttctacaagcaaaaaaaaatccatacagtttcaagtatcctttgtacaacatgcaagctgttggtactatggccttttaattcattccacactattctctctcccccgccctctgtgtattggcggggccatcgggatgagctgatcagacaatattactgaagttattgctcattgttgtcatctttgtgcaaggcataatggagaagtgcatagctcttcatagattgacctgcgtgtattaaacgggtttcctcataaatttaactgccttttagtattgtggagatagtaaagattttagccctgttgattttggatattgaatcattatttgttattctaataatatatcaatcttcatcgttttccc

SEQ ID NO: 3379 - DNA, 812 bp, Zea mays
  unsure (1)..(812): unsure at all n locations
  Clone ID: TF_ZmC147944_1
cattgggtacctcgagatgggccgggagccatggtctctctccgctccgacgcgcccgacccaccaccacatccctcatggctgccctcgccgacatcgactcctcggcacttccgccgtccgagtcatccaaaggcaagggcaagatggacgaggaggaggaggacgaggcggagggcgcggagaagatgtgcggcatctgctatctcgacggccggcgggccatccgcggcgagctcgactgctgcgcccatttcttttgctttgtctgcatcatggcttggggccgcgtcgagtcccgctgtcccttctgcagggcccgcttccacaccatccgccgcccgcccgtcgccggccggttccccgacgagcgaatcgtctcgatccaagagcgcaaccaggtacaccatcctcagggcaacgggagcagcatagtgggcggagatccttacgtgaacaccatatgcaccgtttgcagcagctccagcgatgacgagctgctgctactctgcgagctctgcgactcagctgcacacacttactgtgtcgggctggggaccaccgtgccagagggggactggttctgcaaagactgcgggacgatcagagatgatcaattgagatggcaggctgagaatcagggtgaatttgagatcagcatggatgttcctggagctgagccagttccagccccctcgatttctggtgttgtggatgaggaccatgatctggaaaggcatatgcgcgnagtggtggcgnttcgacggatgacccggttcctccatttatgaaattgtgggtgatgatttgct

SEQ ID NO: 3380 - DNA, 727 bp, Zea mays
  Clone ID: TF_LIB4726-021-R1-K1-B8
ctaatcagggcgctcaccaccgatgttgagaagttctacgtgatgtgcgacccagagaaggataatttatgtttatatggacttcccaatgagacatgggaagtaaacttgcctgctgaggaggttcctcctgaactcccagcatatatgaggttgtcacaggaacggccaagaaagagtccaaagaaaaaactcctaaaagcagcaacaagactaacaaatctggctcaaagccttcacgccaggtagaacccaactcaagggtcccaaagatgccacctccaaaggacgaggagagtgaaggggaggaaggtgaaccacaggaagaccatgagagtgcgctgtgcggcgcatgtggcctaggttatgacgacttctggatctgttgcgacttatgcgagacatggttccacggcaagtgtgtcaagatcaccccaaataaagcggagcacatcaagcagtataagtgcccctcgtgcacaggaagcaagagggccaaggcttgattctatctatctacgatatagatatgaattgcggacaatgctccaagaaccgaggagcctttgacgggagttgtaagatgaatcttccgggtagggcagctaatagatttgaatacttcgtgtggatactttcggcattggtgctcgagatgcctctaaatatagtgtcagtactgatcaactgttaactgttggagtttggggggccctcaggcatctat

SEQ ID NO: 3381 - DNA, 2630 bp, Zea mays
  Clone ID: TF_ZmC183_1
aatagattatacaacactttgtatgtgttttatatatgtgtgtagatttatcatcatccatttgaatatagatataaaaagtaagagctaaaatgaatactatcttggaacggagggagtatttcataactccctcacaaactgctactttttttcatatgaaatgactgggaaatatgccccattgtcacatttgggtgggagattactagttgcacatctttttcattgaacaattgcacattccatctgctaatgttgttgagcagtggacatacaactacaaaatccttgttcaagttgatgccagatggtggcagctgtcagctattttgggtatagtgtcgcttttgaggtcttacattttttttctgttgatgggacttaatatgaacatttcatttgtctagttacttttgtgttatctctatactagtgttgtgctatattcttcagtttctggatgctactgggcctatcttgttattttttaagtaaagtatgtgtcaactggagcattgaatgcatgattgaaggtcggatgtcttgtaagcaaaccagtttgcatattcatgattaggaatagcagcattggctgccacgttgttgtcgattaaatcaaatggacgcaatagtggtttaaataatgttggttattttctcatgtttcacccttgttctataaaaagtttaggaccaggtagtgtaagcctttaagaatgaccttaaaatgctatactgttgtgttttgatgtgtttgacagtagctttttgtattccattgttactttagcactgtcttaccttttggatcatgttttataaatgtttgatactttaatgtgaaatccttttttctcatgtcccctgaattccatattatagattattagattttgatcaaagccacgtgggactaaattttctttgtataactaaagcagtctgatggagtcaccttctggtggtctcattggaaggcccgcgactgcggctgcgcctgcgcccgaccaaacgtaggagacccatctcctctcttttctttccaagaaaagtcttctcttctctgtctcagcgccgacgcttcccaactccttccaatcgattcttcgtctcgtcctcgtgtaatccccagcttgccctcctcgctcttccctcccaaaaccctacgcctccctgaccaagctccggggacgaatggacggaggagccggcttccctggcacgccggtcccgcgctcgccggaggacgttttccgggactaccgcgcgcgccaggccggcctaatcagggcgctcaccaccgatgttgagaagttctacgtgatgtgcgacccagagaaggataatttatgtttatatggacttcccaatgagacatgggaagtaaacttgcctgctgaggaggttcctcctgaactcccagagccagctctcggaattaattttgctcgtgatgggatgaatgaaaaagattggctatcacttgttgcagtgcatagtgattcttggctaatgtctgttgcattttattttggagcaaggtttggattcgacaaggaatccaggaaacgtctcttcaccatgatcaataatcttcccagcatatatgaggttgtcacaggaacagccaagaaagagtccaaagaaaaaactcctaaaagcagcaacaagactaacaaatctggctcaaagccttcacgccaggtagaacccaactccagggtcccaaagatgccacctccaaaggacgaggagagtgaaggggaggaaggtgaaccacaggaagaccatgagagtgcgctgtgcggcgcatgtggcctaggttatgacgacttctggatctgttgcgacttatgcgagacatggttccacggcaagtgtgtcaagatcaccccaaataaagcggagcacatcaagcagtataagtgcccctcgtgcacaggaagcaagagggccaaggcttgattctatctatctacgatatagatatgaattgcggacaatgctccaagaaccgaggagcctttgacgagagttgtaagatgaatcttccgggtagggcagctaatagatttgaatacttcgtgtggatactgtcggcattggtgcttgagatgcctcaaaatatagtgtcagtactgatcaactgttaactgttgtagtttgtggggccctcaggcatctatgttctgtagtctactgtgtggtggtttagataccgtctatgccatttgtgatgaagcagtcgttttaaagttagatcccagtaatttccctactatacatttgtcttcgtgtaatcgtgtttaggcggattccggccgtggcgcccaggtcccgggtgcctttgccggcggtggtgtcgggtatcttccgggtggcgcagcggttcggcttgtttgcgtcctctggataccttcgaaaaaaaagctcgagatgcctctaaatatagtgtcagtactgatcaactgttaactgttgtagtttgtggggccctcaggcatctatgttctatagtctactgtgtggtggtttagataccgtctatgccatttgtgatgaagcagtcgttttaaaaaaaaaaaaaaaaaaaaaaaaaaaaaaaaaaaaaaaaaaaacacccaacc

SEQ ID NO: 3382 - DNA, 1257 bp, Zea mays
  unsure (1)..(1257): unsure at all n locations
  Clone ID: TF_ZmC183_3
cgggtactagtgttgtgctatattcttcagtttctggatgctactgggcctatcttgttattttttaagtaaagtatgtgtcaactggagcattgaatgcatgattgaaggtcggatgtcttgtaagcaaaccagtttgcatattcatgattaggaatagcagcattggctgccacgttgttgtggattaaatcaaatggacgcaatagtggtttaaataatgttggttattttctcatgtttcacccttgttctataaaaagtttaggaccaattagtgtaaggctttaagaatgaccttaaaatgctatactgttgtgttttgatgtgtttaacagtagctttttgtattccattgttactttagcactgtcttaccttttggatcatgttttacatatgtttgatactttaatgtgaaatccttttttctcatgtcccctgaattccatattatagattattagattttgatcaaagccacgtgggactaaattttctttgtataactaaagcagtctgatggagtcaccttcgggtggttgcgttgcaggaaacgtctcttcaccatgatcaataatcttcccagcatatatgaggttgtcacaggaacagccaagaaagagtccaaagaaaaaactcctaaaagcagcaacaagactaacaaatctggctcaaagccttcacgccaggtagaacccaactcaagggtcccaaagatgccacctccaaaggacgaggagaatgaaggggaggaaggtgaaccacaggaagaccatgagagtgcgctgtgcggcgcatgtggcctaggttatgacgacttctggatctgttgcgacttatgcgagacatggttccacggcaagtgtgtcaagatcaccccaaataaagcggagcacatcaagcagtataagtgcccctcgtgcacaggaagcaagagggccaaggcttgatnnnnnnnnnnnnnnnnnnnnnnnngaattgcggacaatgctccaagaaccgaggagcctttgacgggagttgtaagatgaatcttccgggtagggcagctaatagatttgaatacttcgtgtggatactttcggcattggtgctcgagatgcctctaaatatagtgtcagtactgatcaactgttaactgttgtagtttgtggggccctcaggcatctatgttctatagtctactgtgtggtggtttagataccgtctatgccatttgtgatgaagcagtcgttttaaagttagatccacagt

SEQ ID NO: 3383 - DNA, 1218 bp, Zea mays
  Clone ID: TF_ZmC183_4
aattcggcacgaggtctcttttctttccagaaaagtcttctcttctctgtctcagcgccgacgcttcccaactccttccaatcgattcttcgtctcgtcctcgtgtaatccccagcttgccctcctcgctcttccctcccaaaaccctacgcctccctgaccaagctccggggacgaatggacggaggagccggcttccctggcacgccggtcccgcgctcgccggaggacgttttccgggactaccgcgcgcgccaggccggcctaatcagggcgctcaccaccgagaaggataatttatgtttatatggacttcccaatgagacatgggaagtaaacttgcctgctgaggaggttcctcctgaactcccagagccagctctcggaattaattttgctcgtgatgggatgaatgaaaaagattggctatcacttgttgcagtgcatagtgattcttggctaatgtctgttgcattttattttggagcaaggtttggattcgacaaggaatccaggaaacgtctcttcaccatgatcaataatcttcccagcatatatgaggttgtcacaggaacagccaagaaagagtccaaagaaaaaactcctaaaagcagcaacaagactaacaaatctggctcaaagccttcacgccaggtagaacccaactcaagggtcccaaagatgccacctccaaaggacgaggagagtgaaggggaggaaggtgaaccacaggaagaccatgagagtgcgctgtgcggcgcatgtggcctaggttatgacgacttctggatctgttgcgacttatgcgagacatggttccacggcaagtgtgtcaagatcaccccaaataaagcggagcacatcaagcagtataagtgcccctcgtgcacaggaagcaagagggccaaggcttgatcctatctatctacgatatagatatgaattgctgctccacgatccaaggagcctttgacgagagctgtaagctgactcttcgtgctagggcagctaatagattcgaatgcttgttttgatacaaattacgagtactgacgaaccgtaaactgatgtagtttgtgtggccctcaaagcatctatgtcctgatttgtgtggtttaggtttccttcggcacagtttctaatctaatatgagttttgtcaattagagagaagtggctatgctgaatttatgagctgattttataaagtgatgatttt

SEQ ID NO: 3384 - DNA, 1063 bp, Zea mays
  unsure (1)..(1063): unsure at all n locations
  Clone ID: TF_ZmC13516_1
cttccttggataccgtgctcctnttgcactcccccaaaacgcagctccctcagccaatcttccccagagcgcggctaggcacaggcatctgaagtatggacccctctgaacttccggagctgtcccgtactgctatgttgatctgctgcaaggtgtgtggaggacctgaagaggtggacaagaggttcctgatctgtgaccactatctttgcctgtacaagtactaccacattagttgcctgactaccgagcagattgcaagtgatgtgcagatgggcagccagcgctggtactgtccatcttgcctctgccgtgtctgcctgtgcgacacggacgatgaccagatcatcctgtgtgactgctgcgatcagggctatcatctctactgcctcagtcctccaagaagaaaggtgcccaaggggcattgggactgcgaaccctgcaaggagcggagggagaaggagaagaggatactgatgctccacaggaaggattacgatgaagacatcctgaagagtggcgagttccatggaccgaacttgctgcttaaggccgcgaaaaaggtgaagcgcgatgaggaggtgaaggtggctaagactaagagcaccagaaagtaagaggcatggagattgtgagcgagcggattttgtgttctctgccatgatcagctagcgccaagtttctgccctgggaggctcagctctgcccagctgaatgggacgggcggctgagggccgtagaaacctgtgctttctgaactgaatggttagagaacatgaattcgctagaattgctccagtctatttctttacaatcgtttctttcaacccggcagggtcatacttgacaaacttgccagcgcctgaacttgagaaggttgtgatcacccgtgatgcttttaaaccccgtgatgcttttaatggtttatgaaactggatcttggtagacttaattacccgtgatgcttttaatggtttatggaactgaatcttggtagaattaaagtatctgttgctgtgttgagaaatgttatggtttctagttcgttcttgcaggtgcaaaa

SEQ ID NO: 3385 - DNA, 1090 bp, Zea mays
  Clone ID: TF_ZmC2619_1
gccggccggtcacgggaagagccagaaacccccccgctgcgcaaccggaggcgtctcccagccccgcgccgccgctgacggtcgtggccggccccgtctcctcagcgccccggaccgtcgaggacatctacaaggactacgccgcccgccgcgccggcctcgtccgcgctctcacatctgatgtcgacgggttctacagcatgtgcgacccagagaaggagaacctgtgcctgtacggtctcccgaacggcggctgggaggtatcgctgccggtggaggaggtgccgccggagatgcccgaaccagcgctcgggatcaacttcgccagggacggcatgaggcgtcgcgactggctctcgctcgtcgccgtacactctgacgcttggctcgtctccgtcgcattcttcttcgccgccaaactcaacggcaacgacaggaagcgattattcaacatgattaatgatcatccatctgtgtatgaaataatggctgaccggaagggaagggagaataatcctggtgttgataacagcagcaaatccaggcactcaacgaagcgatcaaatgatggaaagataaagaactcaagagtggcagttggtgaatgtaggtatgagaatgatgaagaccacagcgaaaccctttgtggttcttgcagtggtctctacaactcaagtgagttctggattggatgcgacatttgtgagcggtggttccacggcaaatgtgtgaggataaccccagcaaaagcagaacagataaagcactacaagtgccctgattgcagctacaaaaagagcaggcaataaaatcttggagctgctggcctcctattactgactcagctgatcaaccaaacaatacttttcaatttggccgtagatgttaactaccctaggcatttctttgttgtggtacatgctggaaaaagacatacaggatagttgatcttacagtctggtcaattgcttttgtgcttgttttaatgacatctgtttacgggttatgtcttcaaggtggatggtaaaaaaaaaaaaaaaaaaaaataaaaacgtgatgagttatggccattatcgaaatttgagattaa

SEQ ID NO: 3386 - DNA, 562 bp, Zea mays
  unsure (1)..(562): unsure at all n locations
  Clone ID: TF_LIB3957-003-Q1-K6-G5
cggncgcgtgggcggncgcgtgggttttttttttttttttttttttttttaacaaactaacatgagtgatacataatgcacaacttagatctaaaacagtttgagttcagcacaggcgccctggggagaagatgaagaatacaggctactacaattagttgctagttactaacaatagatctagaacgtctttgacatactacagcaaacagcacatcaagaccctacagctggtcctacactgaaagcaacaaccatcgggcattcggtccccatgtgggtgttttacatcaagtcaggcatgagagatggatatatccagcatcatcatgctcgggctctcttgccactaccgctgcagttcggacacttgtagtgcttgatgtgttcggccttggcaggagtgatcttgacacacttgccatggaaccaagtctcgcacgcatcgcagcatatccagaactcatcctgtccgtagttgtcaccacaagaaccacacagcgtgttttcgtgatcttcctcttcctcctcttcctcgcctccgctgtcatcctcatccttc

SEQ ID NO: 3387 - DNA, 2664 bp, Zea mays
  Clone ID: TF_ZmC26156_1
aaacgaacaaccaaagtagagattcaaaggttgagacagaagaaggaaaagaagaatactacaaattcaacaagattgcatttaggcaatgaaagaaaaaagagaggtggctgtgctctactcgttcgtggatcgaacaaggagtctggcagcaccactgatggttttgttccatatgaatggaaacgtacgatcttctcctggctgattgatctgaatgttctatcagtcaatactaagctgaactgtttggatgaaagccactcaaaggttttactagagggttttgtcactagggatgggattaactgcagctgctgtagcgaggtcatttcagtgccagaatttgtgactcatgctggttctgaagtaaataagccatacagaaacatacttggggatgggctagacattgaccttttgcactgtctcattaatgcatggaatatgcagtctgatgctgaaaggcaagatttctttccagttagcattgagggcgatgaccccaatgatgacacgtgtggtatttgcggcgatggaggcaatttgatctgctgtgatggatgcccctcgacatttcacatgagttgtctaggactggaggcacttccctctgattattggtgttgtgcaaactgctcatgtaaattttgccacgaacattctagtgatggtgctgaagacactgctgatgttgattattcattgcatacttgttcccagtgcgaagagcagtatcatgaagcctgctctcctgagactgattccataactaacctttccagtcagacaggcaatttattctgccaacaaagctgcagactgctgttcgaggaattgcagaatcttcttgcagtcaagaaggatcttgaaccagaatattcatgcagagttgttcaacgcatccatgaagatgtaccagaagaagtccttgctttggacaaaagagttgagtgtaactccaggattgctgttgcactttcattaatggatgagtgcttccttccgattattgaccagagaactggcatcaacttgatacgaaatgttgtgtatagctgtggatcaaattttgcccggttggatttccgtggattctatatatttattttagaacgtggagatgaaataatagctgcagcatctgtccgaatacatggaaccaagttagctgagatgccgttcattggtacccggaatatgtataggcgacaagggatgtgccgccgacttgtagatggaatcgaaatgatcctcagctctctcaatgttgagaagttgatcattcctgctatcacagaacttgtggacacctggacatcgaaatttggatttagtccacttgaagattctgagaagcaagaagtgaaatctatcagcatgttagtttttcctggtacaggtctcctccaaaagccattgctaaaggccttgcctaatgaagaacaatgttcccaaggagacaaaactgagaaatcatctgatgtagtcaatgaagattctccttgctctgatgcaagtgctgatcccctaggtttgggggtcaaagagcatgaggacagcagcaaagacgctgatggcacttgtaacggtgacgtttcacaggaatgtccccattcttgatgggaagatttggttgcagttttctaggccccaagctttacatggactaagcctccatttgtttttgcacctcgagtttttgatccagcagttagcatgacatccatccgttggtgagaaagaggcttgccgggtttttttttggcatattatattagttgatggggcaccccttttagttttactcagaaattgatgattgacgcgtcggcctgggaaaagaatcaacccgtgcagttctgaaaagcgtttactccatccagccagctaacttaatgtgcagctgaaaaatcggcatgtagaagaatgtggaggataacgtcccttcttttgttttttttggtcgttaacttgagactccgagggcgagtcgtcgtaaatgttacaccagttgttattttgttaataggtttttttaaatgttttcgctagcgcattcctggaatctaatctcattcctgtaagataattctcacctctgtaagatcagctaatgtatgcgcaaagctagaaatagtccgcctgatccgtcacgcggaattggttacctaaaccctgttaatgtttcgttttgcatcgtgttggaatgtgtgtgttcttcctgtgaaacaataacatgtgttcgttcctgtggaaaggattcgctttgctggaatgtgtttgtttgttcttcctgtgaaggaaagcttttgcaggtcaaatcatcagttcatccccattaaaatgtgcatgcaatacaatgcccctggagaagcaaaatttacaggcaggcaggggtttgcgatgctggtgctgctaaggttatcgaggatcttgttcttgacatcctgtggaaacgggggggacggccctgccagcctgccttggaacaaaactccgccagcgatttgatccccttttccagcgcgacgtgactcctgcagtgcagtgaaaagggtcggcacggggttcctgtaactgtgtcgactatattttgtcaattcgctacccaaaacatttggaacctgcttggaacagctttttatgaaaagcttttctgag

SEQ ID NO: 3388 - DNA, 1382 bp, Zea mays
  Clone ID: TF_ZmC3619_1
ggctgcattggtaccctcgaggccggccgggaaaaattcgccacggtccccgtctctcccctagtcccctccgacctcttctaaaaatcctggtggctggctctcgttgtcctcaagcagtcaagctcctcctcctcctcccccccagtccctcccaggctcccaccccgccttgctcgcagcctccccaaaaccctagccctagccctagccctagccctagctctcccacacccgcactgggagatggacggcggcggcacgcaccgcacgccggaagacgtgttccgggatttccgcgcgcggcgggctggtatgatcaaagcgctcaccaccgacgtggagaagttctaccagcagtgtgacccagagaaagagaatctgtgtttgtatggtcttcccaatgaaacatgggaagtgaacttgcctgcagaggaggttcctcctgaacttccagagccagctctgggaattaattttgctcgtgacgggatggatgaaaaagattggctgtcactagtcgcggtgcacagtgatgcttggttgctggctgtggccttttacttcggtgcaagatttggttttgacaaagaatccaggaagcgcctttttgtcatgattaataacctccctacaatatatgaagttgtcacgggaactgccaagaagcaaaccaaggagaaaactcccaaaagcagcagcaagagcaataaagctggcccaaaaccgccacgccagccagaacccaactcaaggggttcgaagatgccacctccgaaggatgaggatgacagcggaggcgaggaagaggaggaagaggaagatcacgaaaacacgctgtgtggttcttgtggtgacaactacggacaggatgagttctggatatgctgtgatgcgtgcgagacttggttccatggcaagtgtgtcaagatcactcctgccaaggccgaacacatcaagcactacaagtgtccgaactgcagcggtagtggcaagagagcccgagcatgatgatgctggatatatccatctctcatgcctgacttgatgtaaaacacccacatggggaccgaatgcccgatggttgttgctttcagtgtaggaccagctgtagggtcttgatgtgctgtttgctgtagtatgtcaaagacgttctagatctattgttagtaactagcaactaattgtagtagcctgtatttcttcaatcttctcccagggcgcctgtgctgaactcaaactgttttagatctaagttgtgcattatgtatcactcatgttagtttgttaaaaaatgtgttagcattcgtatgaaacgccaaccatgtttacaaattaattaacttcaagtctattttgctcgcaaaaaaaacccccccccc

SEQ ID NO: 3389 - DNA, 2808 bp, Zea mays
  Clone ID: TF_ZmC1774_1
ggcttggtaagtttgtcatgctatcggatgtattataattcaagttttcatccgaccataaagaattgatattttgagcatatggagtctgaactaaacatgctctccatggtccgacaccccatacgataagggactgtaagcacactgtattgtcgtaattactgcttatccttcggcttaaaaaagcctgcttagtctttgaaagatgttttggactggtagatatcactcgggatgttttagttattgggatagcaattagtaattggattagtaatttgaatgtgactgcacagttgggggctccttgttgcaaagttttgtgccgttgctgagacaagacctgaggacaacattgatatttcttttttttttcctgtgaagcgagcggtactccggggagttatcaaacgcattggcatattgtgttcatgctcttcatgcaaaggccgaaaagttgtttcaccttactactttgaggtgcatgctgggagtaccaaaaagcatccatcagactacattttcctggaaaatggaaataatctgcatgatgtgttgagggcatgtacaaatgctacattagacatgttggagcctgcaatacgaaaggcaataggcccagcacctcaggagagaatatccagatgcaaatcatgcaaaagttcattcagtacactccgcagtgggaaatttgctttgttttgtgattcgtgtcttgagtccaagggagctaagaataatatcagttcatccaaagttgggcgaagtcaaacttcatctgccaaggtatataagagtgcatcaccaggagcaaagtcttcaagtgtaggaaggcttacaagaaaggataagggtatgcataaggtcgttttcatgagtggcattttaccagagggcactgatgttggttactatgttggtggaaagaggttactggatggatatataaaggaacttgggatctactgtcattgctgcagcacagtggttagtccttcacagtttgaaggtcatgctggtcgagctgctcgacgcaaaccttaccacaacatatatatgtcaaacggcgtttcactacatgagctgtcaatttcactcttgaaaggtcaaaagatgtcaaacagacaaagtgatgacttgtgcagcatttgttcagatggtgggcaactactcctttgtgatacctgtccaagagcttttcatagagaatgtgttggcttatcttctgccacaaagggaacttggtgttgccgatattgtgagaatagacaacagagggaaagttgtttggcatataacaacaatgcaatagctgctgggagagttgaaggagttgatgccttggaacaaatattcacgcggtcgatacgtattgctacaacacttgagactggatttggtggttgcgcactgtgcaagctccatgatttcagcaaaaagaaattcagtacccgaaccgtgctgctttgtgaccaatgtggtagagaatatcatgttggttgcctcaaggaacataatatggctgatctgacggcattgcccgagggagcctggtattgttctacggactgtgtgaggattaaccagacactgcaagatttacttaacagtggtggagaacctgttcttgccatggatttagatgtcattaagaagaaacgagaagtgaaaggttttaatgatgatgatgctgaccttgatgttagatggagagttttaaaggacaagagctcagacgacagcaaactagtgctctccaaagcagttgccattttccatgaaacttttgatcccattatccaggtttcaactggacgggacctcattccagccatggtttatgggaggagtgcaagggaccaagattacacaggaatgtattgtactgtgttaactgtgaacaatattgtagtttctgcgggtcttttccgcatcatgggtagtgaaattgctgagctgccgttggttgctacaagtagggatagacaaggcttggggtatttccaagcacttttttcctgcatagaacgtctgttgtcatctttggaggtgaaacattttgtgctaccagctgcagaggaagcggagtctatctggactgagcgttttgggttcgcaaagataagccaggatgagctgcgcgaatacctcaagggtgggcgaacaactgtgtttcaggggacgtcaaacctgcacaagctggttgcgaaacttgaatgctagttatgtgagaattgtatggcaagagcaaggacatgaagctaagaagcagctcattgtttgtgtgcctctgggattgatgcagacaggaaagaggcaccctgatccctttcttgtaaatgttggtgagcatgttggcattggcatcttgatctgtttccataggtaaggtgaagaggattgtgtaagataaaagggacaagctgtatgtaaagacaagccaaagctgagtgaatttcaggcaccttattgtgtggagggtcctgtgtttgttgagtaggcaacgctcgggctggtgtgagatgatgactgcatttgtgttgtgttggtggtattttcactgctgacatgactgttgtatcggatgacatcttttctgttttatgacagtggcagtgtgatactaggctgttaggaggggacgggggaggtcaaacccaacgtacatcatgagtggagctgctgtaatgtaacagaagtattgcacccccccccccccccccccccccagtatgctttaacggagatgcacgttgtacccgtggtaatatatataaatttgcgttgtaaagatcaaaaaaaaaa

SEQ ID NO: 3390 - DNA, 768 bp, Zea mays
  Clone ID: TF_LIB5116-009-A1-PF1-G2
gatatccgcgccgctgtctgctgcccccgccctgcgtccccgttccccattcgcacccctccccactgcccgcatctattccaccgccgccgccgccgccccgctccgctcggttccggctctccctccgcgctgctgtgctctgtggggcgccgggccgcgtgatccgccgctgcctccgtcgattcggctccagtttcggggcgctgcggcgaccccccgaggtgaagccgctcccggtactgcggttcagcgcctaattggcatgtgacgtcctccaacggtgaaggagaggagctctttatgtgatagtgcagcagatggaaattgggtttcaaaattcaaaagaaagcgaagcaagttaacagctagctcgtcaaatgagcatgaggctacatcaccaacatcggactctataatgaacaatggttccataaaaaagaggtccaagcatgacactagcatttctacatcagccaagaagataagaggacacgatgggtatttctatgagtgtgtagaatgtgaccttggtggcaatttgttgtgttgcgatagctgtccacggacataccacttggaatgtcttaaccccccccttaagcgtgcaccgcctgggaactggcaatggccaagatgtcgtacgaaacaagttagcttgaagttgttaggaaatgcggatgctgacacttccaaacgtgaaagaaccaagagaatgcgtacaagcaccatagcagatagcccatctccccataacaagtctctctg

SEQ ID NO: 3391 - DNA, 1111 bp, Zea mays
  Clone ID: TF_ZmC2557_16
ggggtaccctccgggccggccgggcgtcggcgcgtcgcatggatatggcccccgcgtctgtctacttcaatccgcgctcggtcgaggaaatcttcaaggacttctccggccgccgcgcggggctcgtccgcgccctcacctccgatgtggacgatttctgcagcttgtgcgacccaggtgagtgagatcgatccgcggcgagctcttcgctgcggtgcgtgcgtgcgtagagtggtggatccgggcggggaatgagcggatcgccgtttccttttcctgcgtgcagataaggataatttgtgtctctacggccttcccaacgggagctgggaggtgtcgccgccggcggaggaggttcctccggagttgcccgagccggcgctcggcatcaactttgcgcgcgacggcatgcagcgccgcgactggctcacactcgtcgccgtccactctgactcgtggctcatctccgtcgcattcttctacggtgcccgcctcaacggcaacgaccggaagcgcttgttcagcatgatgagtgatcttccttccgtcttagaagcattcgcggacaggaaacaagacagggataggtctggggttgatagcagcggcaagtccagacactcatcaaagagaggaaaagatggccatgccaagagttccagggcagcagctcctgccgccaaggagtatgacgaagacgatgacgaggaagacgaggaggagcacacggagaccttttgtggaagctgcggcggcctttacaacgcgagcgagttctggatcggctgcgacatctgcgagcggtggttccacggcaagtgcgtgcggatcacccctgcgaaagcggatcacataaagcactacaagtgcccggactgcagctcgaagaagatgaggcagtaggtgtaggtccccgcgtgatctgactgacccgtgtgatctgatccaaaaccataactccctccgtttgtttgtctcaaggtcgcagctagcagatgtgaattccttcatttgtggggcttgtttatgtggtggtaggaagaggcaaaggactgatagatagagatacatgaccgttttcttttatatatattcgttgttcaccgtttac

SEQ ID NO: 3392 - DNA, 1265 bp, Zea mays
  Clone ID: TF_ZmC2557_28
gcgcgacgaagcaaggaacgcaccccgaatcccaactcctgtgtccgccatcgcctcgtggcggtcgctcctgctcctgctgctgctgctgctcccccagccgctcccgcccggagcacgccgccggcgccgacgccggcgcgtcgcatggatatggcccccgcgtctgtctacttcaatccgcgctcggtcgaggaaatcttcaaggacttctccggccgccgcgcggggctcgtccgcgccctcacctccgatgtggacgatttctgcagcttgtgcgacccagataaggagaatttgtgtctctacggccttcccaacgggagctgggaggtgtcgccgccggcggaggaggttcctccggagttgcccgagccggcgctcggcatcaactttgcgcgcgacggcatgcagcgccgcgactggctcacactcgtcgccgtccactctgactcgtggctcatctccgtcgcattcttctacggtgcccgcctcaacggcaacgaccggaagcgcttgttcagcatgatgagtgatcttccttccgtcttagaagcattcgcggacaggaaacacggcagagataggtctggggttgatagcagcggcaagtccagacactcatcaaagagaggaaaagatggccatgccaagagtttcagggcagcagctcctgccgccaaggagtatgacgaagacgatgacgaggaagacgaggaggagcacacggagaccttttgcggaagctgcggcggcctttacaacgcgagcgagttctggatcggctgcgacatctgcgagcggtggttccacggcaagtgcgtgcggatcacccctgcgaaagcggatcacataaagcactacaagtgcccggactgcagctcgaagaagatgaggcagtaggtgtaggtccccgcgtgatctgactgacccgtgtgatctgatccaaaccataactccctccgtttgtttgtctcaaggtcgcagctagcagatgtgaattccttcatttgtggggcttgtttatgtggtggtaggaagaggcaaaggactgatagatagagatacatgaccgttttcttttatatatattcgttgttcaccgttttgcctggttcgtcgcagtcctatcgctgtgtgaaggcatgaactgatgagtgggttgttctcaatagttgataaagaatttcatcggtttcatgtcatcaaaaaagcatgtccgactccttataaaatccaaacgaaactataatgaatctctcccc

SEQ ID NO: 3393 - DNA, 2216 bp, Zea mays
  Clone ID: TF_ZmC113_1
gcagtcgaaacaatactgtggcatatgcaagaaaatttggcaccacacagatggtggaaactgggtttgttgtgatgagtgccagatttgggttcacgttgaatgtgatctaacatgcaacaacgtcgaggatttggaaaatgcagattatttctgtccggattgcaaatcaaaaagtaaaacagttccagcaactgaaaatttgaatacttccacttcagaatgtgctagcacttctaagggaaaactgaccgcaatgatagctgtttgctgcaatggcgaggatgcactgtatgtacctgagaagcacatgatactatgtcaatgtaagtcttgcaaggaaaggatgatgagtctgaatgagtgggagaagcatactggctcaaggaaaaagaattggaagatgagtattagacaaaagagtacaggggaactactcattaatttgctggatgatattccttgtgggacatcgaagtattctaacccaggcattaagaaagaagagctgctacaattgcaagctaatccttacagtcctgtctgtgctaaatggacaactgaacgatgtgctgtttgtcgatgggttgaggattgggactacaataaaattataatttgcaacagatgccaaatagctgttcatcaagagtgctatggagcatgtgctgtacaagatcttacaacatggctttgtcgagcatgtgaatccccccaacagaaaagagaatgttgtctatgccctgtcaaagggggcgctctcaagccaacagacattgatggactgtgggttcatgttacatgtgcctggtttcagcctaaagtatcatttccggttgatgagacgatggagccagctatgggaataatgagcatccctgtagaatactttaagaagacttgcgtcatatgcaagcaaatgcatggtgcctgcacacaatgctacaaatgctctacctattaccacgcaatatgtgcgtcaagagctggatattgcatggagttgcaatgctctgaaagaagtggcaggcacattacaaaaatggtttcatactgtgattttcatagtactcctgacccagacaatgtgttgatagtgaagacaccggaaggtgttttctctaccaaattttttctccaaaatggtgagaaacagacagctgcaagactcgtcaggaaggaaaatcaccaggagaaagtgcttcctcctataatttctgactgtctagtcgcaaagtgcctgacctatgaaatgtcgaaatacaagaaacaaccaggagaggctattgcccaccggattatgggacctcgtcaccactctcaggattttattgatggtcttaatgcatgcatggatcgtaaggatgaccaatctttttcaacatttaaagagcgacttcggtatttacagaaaactgaaaatttgagggtctcgtgtggtcgatctggaattcatggatgggggctcttcgccgcaaggaatattcaggagggtcaaatggttattgagtaccgtggcgaacaagttagacggtgtgttgctgacttgagggaagcacagtaccatagagaaaaaaaggattgctatttgttcaagataagcgaagatgttgtcatcgatgctaccgacaaaggaaacatagcgcgcctaattaatcactcgtgtatgtcgaactgctatgctaggatcatgaccgtcagcgatgacaggagcgagatcattctgattgccaagagagacgtctctgccggagaagagctgacgtacgactacttgtttgaccctgacgagtccgaagactgcagggttccatgcctgtgcaaggctcctaactgccgtgggtacatgaactagaagactaaccaacctcagaaatagggactaaagactaacgtgacctcagaaacagggaccaaaggctggccatttttcccggaattctaccgttagcttctcggtttatatttactggaaagtttattagttctcgtggctgcccaagttttgaaccattttgtttagatattgcgattgagggcagccacaccattgtatattctttcattgttgtaataagacaccagtataatcaagaatgctgactttgaaatggaaagaagaagaaactcaacttgatgccgtccaaaaaaaaaaaaaaaaaaaaaaaaaaaaaaaaaaaaaaaaaaaaaaaaaaaaaaaaaactcgagggagggc

SEQ ID NO: 3394 - DNA, 2255 bp, Zea mays
  unsure (1)..(2255): unsure at all n locations
  Clone ID: TF_ZmC1899_1
atgatacatacccttaagaagcattataaaggatgggatggttacctgggaaggtattgtttgcaattgctgcaaaaaaaacttatccgtatctgatttcatggctcatgctggtcgtagtcacccacagtcctcattgggcctctttctagagtctggcaagtcatacactttgtgcctggttgaggcttggtctgctgaatctatgagcaggagaagcaatgcatggggtagaaaagttgaggcaatagatgaaagtgatgacacctgtggtttctgtggagatggtggtgaattactttgctgtgacaattgcccatcgacatatcatcaagcttgcttgtctgctaaggagcttccagaaggtagttggtactgccataattgcacttgtcaggtttgtggggggccatttagtgaaaaggaggtttcaacattctcggcgattttcaaatgtttccaatgcggagatgcataccatgacacttgcattgaacaagagaagctacctcttgaggatcaaatatctcagacatggttttgtgggaaatactgtaaagagatattcatagggctgcgtagtcatgtcgggacagataatattcttgacagtgacctttcatggtccatactgagatgcaacaatgacgggcagaagctacattctgttcagaagattgcctgtttggcagaatgtaatatgaaattagcagtggctcttactctattggaggaatgtttcattcgtatggtggatcctagaactggtgtggacatgataccccatgttttatacaacaagggatcaaactttgctcgtgtggattatcagggattctatactgtaatcctggagaaaggtgatgaaatattatgtgtggcttctatcagagtacatggaactaaagccggggagcttccttttattgctacttctgtagactttcgacggcaaggaatgtgccgaattctaatgagcatcattgaaaagatgctctgttcatttaatgttaagatgttggtcctttctgccatcccagagttggttagcacatgggtgtcaggatttggcttcaaacctatcgaagatgctgaaaggaaacaacttcataatgtaaacttgatgttgtttcctggaacatccttactaacaaagagattggatggatttattatggccacaaaaccaggcgaggaaaaggatatacatgaagtttctggagtgcctaatcttaagcgtatgcctaatgggaaagcaaatgagcatttcaaactccatgaccttgatttgtccgggacagagtttaaagctgaggtttccgtgaatggtccattcagaacactgaaacatgaatgtggttcagcagcatggtttcagtctactaagttagctgttggggaagtgtgatattcttacacaaattatctgggctcatgctctgcatcgatactagctgctttgtgttggccaatttcgtcttcccacttcatggctcaaattaatttgcagcagcaaaatcattcgaacacttgctgctgcatgaactcatccttttcaagtaaagttctcacaagactactgggaaatggttgggatgacgcaggcatccatgaatttgggttgagcaaagttgaagaaaccacagattggtgtggtctgttctgcatcgagaaaatggaaattataactgtctctcctgggtgaagtgctctcctgagactgggtaaagtacgcaacacctgagttgatattgcttgcacgttgaacaaagaggatgtatttgcactccaacgtacaaagtgtaacgcattcggccccttttcaaagtaagccatgataggaattaatctaagctgtttggtatatacatcaaaagggtactgcagtaacatgtttggtaccttctcttgcgagttttattttgatatatgtgttttatatgtgtctagattaatcatcatctatttaaatatagacataaaaagaattatattctggaacggagtgagtattattttgccatatgtgctgttaggttgaggcccaaatggcaatgcaatgcatctgtcggcagttgattttcctgagtgccagattggttttgtaatccttgcggctatggaacgattgttcgtcaagtccttaagttattttggtttgtattaaaaaaaagagcaaaaaaaaaatggtgggaggcgtcccctcttcctccaaaaaaacaacaaggggggggtttttnaaaaaaaatngaagg

SEQ ID NO: 3395 - DNA, 1502 bp, Zea mays
  unsure (1)..(1502): unsure at all n locations
  Clone ID: TF_ZmC2849_3
tgatttgtttgtttggttgtaggctggagtgggcacccggtctgcgtgaagcggtaccatttcatcatcgagaacgacagtagccacctttctggccgccggcgcacntgctgcctccgctgcggaacacccatggccgaattgattgcaagcagttcatcaaacattatgatgagcatgctctgcggactccttcaaacccattcctgctctgtgtgaggtgctccattgaactgcttgatcacccaaaagattacacgacacctccagaagaacttgtacttctaccagcaagtgctaccctaggtgacctgaaagtacaggcttcaaaggctttccaagaaacgtacctgatgttccaaagcttccagactgaacagctccctgactttccaaacttcagtgatacaacccccgtgaagcatgtgcttggatcaggccagttgcttcgagtaaggggacgttgcactggggattacaggagaattgtacagttcaggatggagaggggtttggagaactggacggtggactgctcatgtggggccaaggatgatgatggggaacggatgctagcttgtgacatatgtggagtctggcagcataccaggtgctcgggaataagtgattttgaggaagtccctgaaaatttcatctgcagaaagtgtgctagtccacgcaagggagacggacgtgggggtggaggtagcaacggtggtggaacaatggaggttactgcgtctgggaggtgcaaggatgaaattggagcatcagttggtggagcaggcaagtatgggcgcatggcaacagttggatgactgtacataatgtagtgaaacgtaaatagtgagatggagagtagtaaggtgcacctaaaggcttttgtggaccttgagtggtgttaaatggatcttgtcgctgaccactgatgtgatgttaatctgttctccttgcagttgcacccatttcccattgcctgatgtccatcttctgttcgaagcatatcagacttttcatggctgcctaataaacaccataacaaaatcctagcaaatggtgccagaacagaggagctagcttctaacatatccaaagcgtatcgaggacatactcctcacatttccagcacctaggcagcgattagggctgcggccaccggacgggcgcctggacccagccaccgaccttgcggcagccgcgagctcgagctagcgccagcctcgcgccctaacccgcacggcaccgctaggcggcggccccgatcagcgcgattgcttcctggggtgcaatgaggcgtggagagcattgggatggcgtcgcgcgtggagctgctcgaggaaggaagggagagagggaaagaaagggagagagagagggcaggctgaggccggtgcgggaagaatcatcaataacgggagaanaaaaaaaaaaaaaaaaataataaaaataaaataaaaaaaaaaaaatacaaaaaaaaaaaaaaaaaataaaaaaaaaaatat

SEQ ID NO: 3396 - DNA, 414 bp, Zea mays
  Clone ID: TF_ZM4317.C4.o3.fg
atgaagttaaatatcaaaatagagaggagacggctccacatgatgatcaataatcatcccactgtatctgaagttgtgatagggagtggggagaagcaaccaaaagcctgcaacacaaattacgaaaccaagtcaagttctattaaggaacccagttctagcagcaagctagcagaggagcctttgccaaagaaggagcgacagatcatcaaagaagatggaggcggcgaggatgaagcttacccatgcggcacatgtggagggatgtactcggaaaatggagtattctggattggctgtgacatttgcgacaagtggtaccatggtgactgtgttcgcatcacacctgcggaggcaacgcacatcgatcagtacagttgccccgcttgcagcaacaagaggagcagagagtga

SEQ ID NO: 3397 - DNA, 1312 bp, Zea mays
  unsure (1)..(1312): unsure at all n locations
  Clone ID: TF_ZmC1419_1
agtggaccggatctccgaggcggggctccaccacctgccgcgccggccggcgagcctcttcctcttcctccggtcgctccccttcccatctccatcttgatttcgattctctggtggctgggaaagcctgcgagagcgcgataaccggaaagatctgagctgctgcaaccgatctccggcgccatggggttcctcgaggacttccaagccagtgttgaagcattgccatctatgctgcatcggaactattcattaatgcgagagttggataaaagtttgcatggtgtgcaactagaaaatgagcagcgctgtcaacaagaaatagaggacattaagcatggacttgaatctggaagtattacatatgacccagcaaaattgaaattttccgaagaagcaatggaggagcagaaacattgtgttagaattgctgacgagaaggtggctttagccactcagacttatgacttagttgatgctcacatccaacagctagatcagtttatgaggaagcttgaagaaatccggcaagaaaaagaggcagctgctgctgttactgcagggactgctgttgctactactgccactccaaccgtgaatgctggagcgacaactgctgatgctaatccgaagagtggacgatctggcgaaagaggcagagggggtcggaagaaggccaaggtacccacggagcagtcagtgccagtgccagtgccactgccacctattgacttagaattgcctgtggatcctaacgaaccgacatactgcctctgcaaccaagtcagctatggtgagatggtggcatgcgacaatcctaattgcaaaatcgagtggtatcactatggctgtgtgggcgtcaaggagcaacccaagggaaagtggtattgcccaaactgcatcgggttccagaagaagcgaaaaggcaagtgatatgcagtccacaggctgctgtgctagtgtgtccttgcttgttaattgtgttgctgatgttgggtaacaaatgtagtagtagttgctgcctgtgacagtgcataccgttgtagatccagtgttctgtacatgttactcctccttcggtgctcgtagtttagggccatcgaccatttgttaacttcatggcctttttggcgattcatgccccttgtatgggtttcacaatatcatgtctccttttcctggtatcacaatattatgcaatacagccggtttgtaatttaaaaaaaaaaaaaaaaaaaaaaaaaaaaannnnnnnnnnnnnnnnnnnnnnnnnnnnnnnnnnnnnnnnnnnnnnnnnnnnnnnnnnnnnnnn

SEQ ID NO: 3398 - DNA, 1177 bp, Zea mays
  Clone ID: TF_ZmC17187_4
ttgggtacctcgaggccggccggggttagattccattaacgtttcagcggtaaaagaacacgaacaaagcattaacaccggcgccaccgccagcacacaccagctcgccggagatcacaagaagatacaggaccgtgctcctcgacgccgcccgacatggcggacgccgcctctggccgcggccacgtcgtctaccctccccgctccgccgaggacatcttcaaggactaccgcgcccgccggtccgccatcctccgcgccctcactcacgaggtcgaggacttctacgcgcagtgcgatccagacaaggagaacctgtgcctgtacggctacgcgaacgaggcgtgggaggtggcgctgccggcagaggaggtgcccacggagctgccggagcctgcgctgggaatcaacttcgcgcgcgacggaatgaaccgccgcgactggcttgcgctcgtcgccgtccactccgactcgtggctcctctccgtcgccttttactatgccgctcggcttaatcgtaatgaccggaagcgcttatttggtatgattaatgaattgcaaactgtttttgaagttgtctccggtgcgagacaacaacaatctaaagagaggtccagtatggacaatggtggtagagccaagcctgtaaagatagaaaataatggaaaagtcacagacgaagcatacgaagatgacagtgatcacggtgaaaccctatgtggaacctgtggtgggatatacaacgcggatgagttttggatcgggtgtgacatgtgcgagcgatggtaccatggcaagtgtgtcaagataactcctgccaaggcagagagcataaagcattacaaatgcccgagctgcagctccaagagggcgaggcagtagcaaaacccatgaacgcaggaagcctccgaatgtgggatgtatggtgcagaagaggcgcattgcaaagtttgcaggcaggagaaggcccagagacctccatttacaagattagaactatattgctatcttccctgtgccttatgcttacttttttacatatgataagctgatgtgaggaaagataagacatttggcaaccagaggcacttagttaaatgccccttgatatacatgggggtaaaagaagaggaactcatgttttgtcgaatatatggaatctttttttcccctctta

SEQ ID NO: 3399 - DNA, 622 bp, Zea mays
  Clone ID: TF_ZmC3042_5
ttcccgggtgcatttttagcttgcttgtgatgaattgggcacgaggtttctctcaaggtattgcaaatgtgagatgccgtacaaccccgatgacctcatggtgcagtgcgatgcttgcaagcactggttccatccatcttgtgtggctatgaccattgaacaggccaaaaagctagatcactttgtttgctcagactgtttcaaagaaaatggttcaaagagactttcaaatgcatatgccacttcaccaaattttgagcctaaggctgaaccaaaaaggcagaggaggtaacaaactgtgagtggtaacatccatatgggtaaggggagatgtgctgcttctgtggtgaatcagcccttgccctttgctgtggtgagagcagaggtgtacagtgtactagaccagtgtttgctgttaggggaacgggttttgttcgatgtgtagaccgtgtggcatggcatgcagttgttggtagaggtcaaaagaacagtcgttgtgttcacttggtcagcttagcgccttagcccttgttaatgtgttaatgcactgtgttaactcagcgagccccccttgtggctgataatgcaagtcatgcagttgttgattcaaaaaaaaaaaaaa

SEQ ID NO: 3400 - DNA, 597 bp, Zea mays
  Clone ID: TF_21211304
ggttgtcacaggaacagccaagaaagagcccaaagaaaaaactcctaaaagcaacattaagactaacaaatctggctcaaagccctcgcgccatacggaacaacccaactcaagggtcccaaagatgccacctccaaaggacgaggagagtgaagaggaggaaggggaaccacaggaagaccaggagagtgcgctgtgtggcgcatgtggcctaggttatgacgacttctggatctgctgcgacctatgcgagacatggttccacggcaagtgtgttaagatcaccccagctaaagcggaccacatcaagcagtataagtgcccctcctgcacgggaagcaagagggccaaggtttgatccacgatccaaggagcctttgacgagagctgtaagctgactcttcgtgctagggcagctaatagattcgaatgcttgttttgatacaaattacgagtactgacgaaccgtaaactgatgtagtttgtgtggccctcaaagcatctatgtcctgacttgtgtggtttaggtttcctttggcacagtttctaatctaatatgagtattgtcaattagagagaaaaaaaaaaaaaaaaaaa

SEQ ID NO: 3401 - DNA, 758 bp, Zea mays
  unsure (1)..(758): unsure at all n locations
  Clone ID: TF_LIB4740-015-R1-K1-E12
gcattttattttggagcaaggtttggattcgataaagaatccaggaaacgtctcttcaccatgatcaataaccttcccagcatatatgaggttgtcacaggaacagccaagaaagagcccaaagaaaaaactcctaaaagcaacattaagactaacaaatctggctcaaagccctcgcgccatgcggaacaacccaactcaagggtcccaaagatgccacctccaaaggacgaggagagtgaagaggaggaaggggaaccacaggaagaccaggagagtgcgctgtgtggcgcatgtggcctaggttatgacgacttctggatctgctgcgacctatgcgagacatggttccacggcaagtgtgttaagatcaccccagctaaagcggaccacatcaagcagtataagtgcccctcctgcacgggaagcaagagggccaaggtttgatccacgatccaaggagcctttgacgagagctgtaagctgactcttcgtgctagggcagctaatagattcgaatgcttgttttgatacaaattacgagtactgacgaaccgtaaactgatgtagtttgtgtggccctcaaagcatctatgtcctgatttgtgtggtttaggtttccttcggcacagtttctaatctaatatgagttttgtcaattagagagaagtggctatgctgaatttatgagctgattntaataagtgatgatataaaataaactaaaagactagagccgnaaaatgtagcttttctga

SEQ ID NO: 3402 - DNA, 1345 bp, Zea mays
  Clone ID: TF_ZmC183_2
attgggtacctcgagcgcggcttgataggggcgctcaccaccgatgtggagaagttctacgtgatgtgcgacccagagaaggagaacttatgtttatatggacttcctaatgagacatgggaaataaacttgcctgctgaagaggtccctcctgaactgccagagccagctcttggaattaattttgctcgtgatgggatggatgaaaaagattggctatcacttgttgcagtgcatagtgattcttggctaatgtctgttgcattttattttggagcaaggtttggattcgataaagaatccaggaaacgtctcttcaccatgatcaataaccttcccagcatatatgaggttgtcacaggaacagccaagaaagagcccaaagaaaaaactcctaaaagcaacattaagactaacaaatctggctcaaagccctcgcgccatacggaacccaactcaagggtcccaaagatgccacctccaaaggacgaggagagtgaagaggaggaaggggaaccacaggaagaccaggagagtgcgctgtgtggcgcgtgtggcctaggttatgacgacttctggatctgctgcgacttatgcgagacatggttccacggcaagtgtgttaagatcaccccagctaaagcggaccacatcaagcagtataagtgcccctcctgcacgggaagcaagagggccaaggtttgatccacgatccaaggagcctttgacgagagctgtaaactgactcttcgggctagggcagctaatagattcgaatgcttgtttcgatacaaattacgagtactgacgaaccgtaaactgatgtagtttgtgtggccctcaaagcatctatgtcctgacttgtgtggtttaggtttcctttggcacagtttctagagctgattgtctatgaatctaatatgagttttgtcaattagagagaagtggctatgctgaatttatgagccgattttataaagtgatgatataaaacaaaaaaaaaaaaaaaaaagcggatgctgcaaaaaccgaggagcctttgacaaaagttgtacaatgagcagtttccggatagcgcagagtacgcgggtgaatacttcgtgtggatactttcggcattggtgctcgagatgcctctaaaaatagtgtcagtactgatcaactgttaactgttgtagtttgtggggccctcaggcatctatgttctatagtctactgtgtggtggtttagataccgtctatgccatttgtgatggagcagtcgttttaaagttagatcccagtaatttcccaaaaaaaaaaaaaaaaaaaaaaaaaaaagtactctgcgttgttaccctggctt

SEQ ID NO: 3403 - DNA, 490 bp, Zea mays
  Clone ID: TF_uC-zmflteosinte083c04b1
gatttataaccttcccagcatatatgaggttgtcacaggaacagccaagaaagagcccaaagaaaaaactcctaaaagcaacattaagactaacaaatctggctcaaaggtatatagttctttgtttatcacatagctatatcgtttgacatgcctaactccatgattctgctttgatggctgacgctgaacatttgacgcatacacagccctcgcgccatgcggaacccaactcaagggtcccaaagatgccacctccaaaggacgaggagagtgaagaggaggaaggggaaccacaagaagaccaggagagtgcgctgtgtggcgcgtgtggcctaggatatgacgacttctggatctgctgcgacctatgcgagacatggttccacggcaagtgtgttaagatcaccccagctaaagcggaccacatcaagcagtacaagtgcccctcctgcacgggaagcacgagggccaaggtttgatccacgat

SEQ ID NO: 3404 - DNA, 636 bp, Zea mays
  unsure (1)..(636): unsure at all n locations
  Clone ID: TF_LIB3632-049-Q6-K6-H9
ctagttctagatcgcgagcggcctcccttttttttttttttttttttttttttttttttttgcacaacaccaacaatggagaaatggtcagccgagaggtaccttcagtgacaacgtttacagactagagggcggggcccattccaatgtcaacactcagcacatgagacatgccacgcattaaacaatgctaggtcgaacagctaatcaacagataaaacaaccataaatgaaaaatgcaggcttacagactagggaactacacgccatatcttggcgccaaggaggtcgtttcttcctttccttcctagcaaggtcgcatcggttgctcacgccctgaccctcttgttggtgcagtctgggcacttgtactgcttgatatgctcggcccgtgcaggcgtgatcttgacacacttcccgtggtaccacttctcgcagttatcgcagcagatccagaactggtccttgccgtcgttggtcccgcaggttccacacaggngtgttgtcgtgctcctccgcctcctcgtccccgtcgtcgtcaccgctctcttcttcgtctttggggaccttagccttcgatcgagactctgctcttgactgcacttttgaactaggcttgntactcttgctgctact

SEQ ID NO: 3405 - DNA, 1988 bp, Zea mays
  Clone ID: TF_ZmC1927_1
gcctagagtcaaagcaacctcaagaccctcttaccacatcatatacatgtaatggcagttctagtctgactccaagttcgaaggaggctttgctaaagaacatatcatcaggcaagaagggcggtagtgctggcaaagtaacaaacaaggataacagactacacaaattggtctttaatgttttgcttgatggcacagaagtagcttactatgttgatgggcagagaaaggttgacgggtatattaaggatcaaagaatctactgtaatcactgcaacaaagtggttagcccatcagcatttgaagctcatgcgggtgagggatcaaggcgcaaaccgtatgataacatattcacatcaaacggagtatcattgcatgagctggcaatgaaaatatcaaaggatatggaactgtcagaacgtgagactgatgatctgtgcagagaatgtggtcagggtggagatattttcccatgcaaaatctgtccaaggtcatttcatccagcttgtgttggactctctaaagtcccctcagaatggtactgtgataattgtcgcaatcttgtgcaaaaagaaaaggctttagcagagaacaaaaatgctaaagctgctgggaggcaagctggagttgattccattgaacagataatgaagagagctatacgaattgtccccatctctgatgatcttggaggctgtgctctatgcaaacagaaagatttcaacaatgctgtgtttgatgagcgcactgtgatactctgtgaccaatgtgagaaagagtatcatgtaggatgcttgaagaatcaatggcaagtggaactaaaggaattgccagagggggagtggttctgttgcagtagttgctctgagacacgatcttcattagacaagataatctccgacggagctcaactgttggtggagccagatcttgaaatcataaagaagaaacatgtgacaagaggtttatgtatggacaccagtaaagatctcaaatggcaattactttctggtaaaaggactactgaagacggaagcatattgctctctgctgcagtgccaatttttcatcaatcttttgatccgatccgtgaagctctcactggtagagacctgattccagagatggttaacgggaggggacctaaggagggaatgcctggacaagattacagtggaatgtactgtgcactgttaactgtgggctctactgtggtgtcggcagcacttttgcgtgtgatgggaggtgatgtggccgagctgccactagttgctacaagccaggatgttcaggggctgggctactttcaagccttgttctcatgcatcgagaggatgctagtttcgctgaagatcaagcactttgtgcttccagctgcacacgaagctgaagggatctggatgaagaaatttggattctctaggaccactccggaagagctggaagcttatcttaatggggcacacctgactatattccatggaacatcatacctgtacaaggctgttccaatgtcatgatatatgggatgaaaaagatatgggtgttgcaatagctagcaggattttgtcttgtcttttctggagtcgctattgtgatgtacataaagagttgatgaggaaacaaagcattggcaagacaatgaaaggttggtatacaggagctggaagccaaggggaagaaaagagctacaagaggtctggattagttttctttctttgtttactcttgaatcgagtgtagtggcgctggggttggcaagtggtggcacacctagcaaattttggtgtaatactagatgcaatgcaattgaagcagttccgtgagtcctggtccgatagccatattttgcaattgaattttgatgtgtttgacaccgacaagtggcggggctcgtatgtgagtaatcggtggtccttttcttgctgtcctggttaaagttgcgatattgctgttttgaagtaacggcccctttggaatgacttcct

SEQ ID NO: 3406 - DNA, 4348 bp, Zea mays
  Clone ID: TF_ZmC2398_1
ctgctggaaatgctgttcatgatgaaatgctgacagcgatgttccaaacgtgataatgctaaattgctcgatgtcgaaaagaacacacagcgtttcatatcacaactacaaacgtttgtgaatctgaccataagttattccaagcaaggaaaatcagtgccaagtatagacagacagccaagagatgaagggcgagtctctaatgttaaactcgctttaagcaacaactccgagcgaccaaattgcgacaagttcttcacacagaacaacctccggatgaagatcatgcatgtcgagcaaaacgattaccccttgtatatcattccagcaggttccattctcgccaatggccttggttctacttggagaacctctcactgaagattcctgcacgttgggcaaaaccatttccccttgaatctcgtttctggtgtaagacccacacacgtgtaatgaaaccattcacctcctccacaattctcattgtcacaagcaatcatgtcaccatatgaaatctggtggcatatacagtatgtcggttcatttggatcaattgtttgatccacatccatagatgtacctgctttcttgctgctacctggagggggcattaaatcaaagtccatacccctttccctgtcccattccctctctctaaatttttttgatgcttgaggtgtactaaaaccaaacctccttttctcatccctgctaaccaccggaactggaggaaggactgtaggttcatctggaggtatcttcccttcatgctttaaatcttctgcaaactggcccaagtcttcatcaaggcgttttatatggctctctatcaggtcataagcttggcgtgccagtaagactttctcggtgcaaagattcagagcattgtcctggctagcttcaatgtccttcttcatcctctccgactcatcatcatccatgtttgacctgtcatacccatgggatgatactcccagaatatactttatctgttctttggtctgacccataatgccatgtgccctgtcatcgagctcgcgcatggtggagagaatcctttgcaggtcgccggccagggtgctcgagtactcgaggtagtcgtcgacgtacacgccggtccgagcgatcgccatgcctgtctatgattgctcgcgtctccgggcagggttcgatgaatcgatgccccggtttggggaactaggggtggagagacgaaccgtaacgggacgggacggtcctcttctcgctggcgtttggttggatgtgaggagaagtgggatgggctcgtcccacaggcgaatattcaccgtagatgcgggacggggtcgtcccgcttgcagggcgtgaagcgccgtttcccgagaagacgggctcaaggacagcgtggtggtctccggcgaaggagcgggcgcgaagggacaagggggcgtggacaagctccggtgaggacggcgctgaatcgaccttcgacccttggctcggggaaacgcgagcacgcagcgactcggggaagcgctggggatcggaagcgcggaccggcacggggaatgtcgagcgaccggcgacgacggggaggccccagcgaccgggtgggctgtgggcggcggcgaatctacccgccgaggtcgcgataaacaatgttatgtgcaaggataatattcttactaagagctgatttggtgattaggtatcccaaggggatccatgggggaggaatcccttccaattcaattttgaaaagtaagaggatttcttcccctagggatccccgatcaccaaattagtcctacgcgtgttttttttttttttttttcgggccggtgcaaaccattctaaagttcaggtacggccgacccgtgatgtccagcccgggactcccgtccaaggcagcagagaccagagagcgaaggaggccaaggccatcgctctcctagcctcggagacttgcctttgcatacacatccccccggagggcggtggccggagctgacccctgatcggacgcgcttagcgcctgagggcatggctgcaaccgtgaggagggctgcttcctccgtcctctctcgcttcctcctcacaaagccttcgccttcgcctgcttctgccgccggcaataattccgctctcctcggatcaggggctgctgctcttcacaggttcagcaccgcaccggcatccgcggccgcggccgcagaggagccgatccagcccgcggtggaggtgaagcacacccagctcctcatcaatggcaacttcgtcgacgctgcttctgggaagacgttcccgacgctggacccgcgcaccggcgaggtcatcgcgcgcgtcgccgagggcgacagcgaggacatcgaccgcgccgtggccgccgcccgcagggccttcgacgagggcccgtggccgaggatgaccgcctacgagcggtgccgcgtgctgctgcgcttcgcggacctgatcgagcggcacgcggaggaggtcgcggcgctggagacgtgggacaacggcaagacgctggcgcaggcggcgggggccgaggtgcccatggtggcgcggtgcgtccggtactacgccgggtgggcggacaagatccacggcctggtggcgccggccgacggcgcgcaccacgtgcaggtgctgcacgagccggtcggcgtggccggccagatcatcccctggaacttcccgctgctcatgttcgcctggaaggtcggcccggcgctcgcctgcggcaacaccgtcgtcctcaagaccgccgagcagacgccgctctccgcgctctacgtggccaacctcctcctcgaggctgggctccccgagggtgttctgaacgtggtgtccggcttcggcccgacggccggcgcagcgctctccagccacatgggtgtcgacaagcttgcgttcacgggatcgacgggcacggggcagatcgtgctcgagctggcggcgaggagcaaccttaagccggtgacgctggagctcggtggcaagtcccctttcatcgtcatggacgacgccgacgtcgaccaggccgtcgagctcgcgcaccaggcggtcttcttcaaccagggccaatgctgctgcgccgggtcgcggacgttcgtgcacgagcgcgtgtacgacgagttcgtggagaagtccaaggcccgcgccctgaagcgcgtcgtcggcgaccccttcagggacggggtcgaacaggggcctcagatcgacggcgagcaattcaacaagatcttgcggtacgtccagtccggcgtcgacagcggtgccaccctcgtcgccggcggcgacagggtaggcgacaggggcttctacatacagccgacggtgtttgccgacgccaaggacgaaatgaagatcgctcgggaggagatattcgggccggtgcaaaccattctcaagttcagcggcgtggaggaggtgatccggcgcgcgaacgcgacgccctacgggctggcggcgggggtgttcacgcggagcctggacgcggccaacaccctgtcgcgggcgctgcgggcgggcaccgtgtgggtgaactgctacgacgtgttcgacgccaccatcccgttcggcggctacaagatgagcggcgtcgggcgggagaagggcatctacgccctccgcaactacctccagacaaaggccgtcgtcacacccatcaagaaccccgcatggctgtaaatcacatcctccgtccttgcccgcacggcgctgcgccggttctcggagaacgtgacgaataaaacaaacggtttggttaaaaagacaaggacgacggaaaaaaaaaaaaaaaaaaaaaaaatgggtcatttttatctccctagagcatctccaacaatgcctcaaactaatgcctcaaatcgaaatatagggctctacacaggaaaaaccactccaacagtgcctcaattcaacaaattttgtcaaaaaactatagggcaacctctcaagtgcctcaaatatactacaccgtagtgggctgccctataatctagatttggggctttactgttggagcggggtgttttgttggtgccctaaattctataaaatttacttattttaaaattataaggcatttttataggtcacgttgttggagatgctcttaacaagcaccaccctagtcacgttttcatcgaactttaaaagcacgcgaattgctcagctctcaaaaccatttaaattacccattaggagaggttttccatggtgattttagcttttttttaattaatgtttggttgcaatgacaggacaggatgagatgagacgatctcttgtatctcttaaaaaaaaaaaaaaaaaaaaaaaaaaaaaaaaaaaaaaaaaaaaaaaaaaaaaaaccacccac

SEQ ID NO: 3407 - DNA, 805 bp, Zea mays
  Clone ID: TF_LIB4738-035-Q1-K1-E6
gtaccctccggctctccggtgtgtacttgtgtttctccaggcgaaggcggccgagcacgcgaccgagatggaggtggcggtggccgtcgcggctgccgcggaggccgaggaggacgaggctgctgctgctgctgcgacttcgacgctgcagcagtctgggaggaaacagccccgcgcgattgggagtgggcggtatcgctcggtatccagggatttggaggaggctgcccctaagaaaccgctgccaccatcatcgcagggtttggatttaggcggcctccctgttctcgatgtctttcaagtttactcctgcttaaggtcgtttagcaagcagtttttcctcagcaccttctcactggagacatttgtggctgcgttgtggagcacctatgtcaacccgttgatcgactgggtgcatttcacgctgctgcgggctctcaagagtcatctggaggactcagccaatgaaggagacccgtcggcggtacactgcattaggaatcttaactgggagctgttagacctagcaacttggccaatctatcttactgaatacttgctaactaggggctcagaattaaggttgtcagagtcagatggaaacgacgagggcttcaaaagcactggtgtaagaaggaaaaagaggggcagaggctcttctgctaaggtggcagtgggttcttctcaatttccagaaggatctactgaagtggatgatggaaacagcgatgaatgttatctttgtggcatggatggcaacttgttatgctgtgatggctgtccagctgcatttcattcgaaatgt

SEQ ID NO: 3408 - DNA, 1157 bp, Zea mays
  Clone ID: TF_ZmC13126_1
tgcgccagaggcaaagagttcaagaaacctgagaagcccatcaaccataagggaaccaaggagcaggtgtccatgaagccaaggtctccaccacgtgaagggaagcatctggagaagccgtgcgagatcgtcgatgtcgagcagtatgaagctgtggctgaagcgctcaggaaatctgacgaagcggctgatgctaagggagcatcgctcaaagacgtgacgaggaatggagctgatgaagtggcgggccaagaacaagggcgagagcaggagcccgtggacgtggaggacgacgacgacggcgtgcgctgcgccgtgtgcgcgagcaccgacggcgacccgtcggaccccatcgtgttctgcgacgggtgcgacctcatggtgcacgcgtcctgctacggcaacccgctggcgcgggccatcccagacggcgactggttctgctcgccgtgcgtcgccgggaggggcaagccggcggcggcgcggcgccggagctgctgcctctgcccggccgggggcggcgccatgaagcgcacgacggaggggaagtgggcgcacatctcgtgcgcgctgctcgtgccggaggtgttcttccgggaccccgacgggcgcgacggcatcgactgctcccgcgtccccgcgcaccggttcgccaggggctgctacgtctgcgggggcaacaacaacgggtgcgccctcgagtgctcccagcccaagtgcggcctgggcttccacgtctcctgcggcctcggcgccggcctctgcatcgagtaccaggaggggaagggcggcggcggcgccatcgtcgccggcttctgcagagagcacaccgagctatgggagaagcaacaattgacaggcaagtacaagattgtggcgagaggacaagaatgatgatatgggagatggataaaattgggtgcctgaagatgcgcttgttgttattaggatttgttgtacgtaggagagtctcgtgtactatgttaagaatagtcgaataagttgcttttcatttaattattttgcacattgtcctcaagatcacgatcagaaagtgtgctgttgtcggtaggttcatgcagaactaataagcttaagatctccattggtattgtacttccatccatttgttgagcaagtttccagtttcagcattc

SEQ ID NO: 3409 - DNA, 588 bp, Zea mays
  Clone ID: TF_LIB4073-010-Q6-K2-B4
tacaccaaggcaggtgggcaggcctccgccctcctcccctactccagggcccactgcagcctcagcccaggagccaccagatctcccaacaccatggtccgataccgcgtgaggagcctgagcgaacgctcgcacgaggtgtacaggcagcagttgcatgggcaagagcaaggacaccacggccaagaggagcaagggctgagcccggagcacgtcgaggtctacgagaggacccatggccagtctcactataggcgcagacactgctctcgaaggaggctgcaccggatccacaggcggcagcatcgctcctgcagaaggcgcaaaagacgctcctgcaggcaccggaggaggcatcgcagaggctgcagaaccaggaagagaacatgcagaaggcactaagcttcctgggcccctcacccccagctggaaattaagaaaaagtcgcccgaaacaccaagtgaggccatagcaattcccctacatcaaatgctcaagcccccagctggaagttaagagaaagtcacctgcccaagaaacaccgagtgaggccatagcaactcccctacatcaaatgctcaagccctg

SEQ ID NO: 3410 - DNA, 404 bp, Zea mays
  Clone ID: TF_LIB3357-002-P1-K1-H2
gacaggggagtccaagcttcagatggccagcgtcggtggagcagtggccgggggcgtgggggcgccgacgccgcacgtcctcgcggtggacgacagctccgtcgaccgcgccatcatcgccgccatactccggagctcccggtttcgtgtgactgcggtggaaagtgggaagagggccctggaactgttaggagccgaacgtgagtatgataatcaccgattactgcatgccagagatgacgggatacgagctgctcaagaaggtcaaggagtcgtccaagctgaagcagatcccggtggtgatcatgtcctcggagaacgtctcgaccagaatcagaagatgcctggaggaaggagcagaggatttcctggtgaagcccgtccgcgcgtcggacgtgtcgcgc

SEQ ID NO: 3411 - DNA, 2164 bp, Zea mays
  Clone ID: TF_ZmC617_1
ctttcttgtggatcaaatcgcccctgggaaggggtgggacttcactattattggcgaagctcgaactacaagcaagcgactgtgatgtcatcccaagattctattggcacggtgctcaagtgtatgcagaagggtgcggtggacttccttgtgaaaccagtaagaaagaatgagctgggtaacctgtggcaacatgtgtggaggaggtatgcaatgaattgccagacaaatgtccatcagaaaataatgcagtcagcaatcatgtaagtaccaatgttgcagatgggtcaaagataggagaatacattgatgaggaaagcgatgcctaaccaggcgaacgcttcggcgggtgttgctgcccgccctcgccttagttcccgtggtacgtgctccaagtgaaagtgagaagaatgtgcgttccaaatgccttaatggtattacttctgcaaaggtggctgagcaaataatggataatgccttgaggatcacggatgcaagttcacgtcgtccaaccaatcttggcaaagatttggctatgactgaaccagcagctgatagaaaatgccaatctttagtgatggaaaataatgctgtcaaagaaaagaaccctggtgaaaagtcgaagagtgctgtaataggtcatgctgattcttacccctcccaatttctcgagaccaacttgggaaaacaacagtatcgtaatggttacaagaatcaagaattcagggaaaaagatatctttaatcactcgaattcctctgccttctcgagatatggcaataaaaggatagaaccatcaggtgagattcagtttttcccttctccctgcgtcattgggcaagggcatgttcatggcaagaacccagttttccaacccaatggggtgttgctgcctcccaatgaacataatacaggtgagagtacaaggcaagctcgaatttctctggacagtaggacagagggtgctgccatcctgtgttccactagtgccagggaagatgctggtgcaaatagttcttcccatagaaaggacagtatgagccatccctcatatgggtttatacctgttccaattcctgtcggtgccatgatgccctaccattgtggtgcaattctgcagccagtatactacccacagggtccacttatgcactgtaattcatctgcaatcaacaaggcaacaattcatcaaacctctggccaatctaactaccgtgaagattgtggtagtggtagaccatctcaggttgatgaacacaaacagtcagaggaaaagcaccagttgcatcattcaagacaaattcatcgggaatcaggacaaccagttgacatggttagagctcacatggatcatgctaaccagagtgcaagctgcagccgggatatctgtaaaggaagcggatgcacgggtagcggtgaagccgataccaatgcgaacacgacggttgccctagagagtggcaacgagagtggcatccaaaatagtgacaggtctcgccgagaagctgcgttgatgaagttccgcatgaaaaggaaagacagatgcttcgataaaaaggtcaggtatcatagcaggaagaagcttgcggagcagaggccaagagttaaggggcagtttgtaagccagaagctgaaagcagctatggcaacggaagccgaaactgactcgtgacgggcgctagtccagaactgtaattttggttcttcccttcgcgccaggtgtgggcgattggactggtaagtctgaaggctggcaaaagtttttttttcttccttccatggttagcctttctgtacaaaggtgaactccacgtcgggtgtttgttggcatccaagccttattttttgcgaggtacatcaagttgacaaaatgttcggagggatagggtgaaaacggtgcaagcgccatatttcgtccatacgcttaggtgtttgtggagtgtgaaagcagagcctgtacagcatattcaccacccattcttgttgccattacaattgtagtaacttgtaattactactatgacaaaagtagacactgttgtagaacttacagccagcaggtcttttccatatgggacagtagcattttatttattaattggttgatcatatgaggacagtcctgaatgcaggacagttatttgtttgccttaaaaaaaaaaaa

SEQ ID NO: 3412 - DNA, 222 bp, Zea mays
  Clone ID: TF_LIB3180-050-P2-M1-A9
tgtttttttttcctcctggaatccacgatcatggaacatgatgcgttcaagaacatccccattataatgatgtcatcgcatgactcagtaagcattgatttcaaatgcatgctaaagggtgcagcatattttcttgtttagccgataagaaagattgaattaaggaacttgtggcatctcgattggagaaaaacaacatgctaacggtagtcctaatgctta

SEQ ID NO: 3413 - DNA, 1162 bp, Zea mays
  Clone ID: TF_ZmC8_2
atacatactatcaggctagaccggtagagtatattaattctaaacagctcgtgtgatgtttcacccagtcatcgccgtcgacagcgcgaggaaggcgatggagttcctcggcctcaaggacggcggcgaggagcaggccgtcgacatggtgctcacggactactgcatgcccgagatgaccggctacgacctcctcaaggccatcaaggcactgaaccccctggagccgatcccggtcgtcgtcatgtcgtcagaagacgagccccagaggatcagccggtgagccagccggctctgttctttcctctttttgagcaccgtttcctttggtccctatcccgtcccctgtgaatgcatgctgaatcatcccgtgagatagaatagcagacggggccaaaagccctggcccgtgtgtactgacggggtaacatttattcattcatccactcgacccgtgtgtactgacggcctcgttattctccggagcagatgcctgagcgccggcgccgaggacttcatcgtgaagcccctgcagagcaaggacgtgcagcgcctccggaactgctccgccgccgcgaggcccagcaagggcgccgcgccgtgcgaggccgccgtcgtggccaagaggaatcaaaagccgccgcatcctgccggcgccgcgtcgccgtctggacggcgagcgagcctcgccggagtcgccatggtgctgcactcgtcgggcgtggagtacctgccgctcctgctcaagctcgtcgtgctggcgtacgcggcgctgtgcctgggagagctcctgcacaggtgggcgtcgtcggacggccgctgctcgctctccccgtggtgcgcctgagcagcggtgcgtgtcctgggcaccagcaggagactggtgatgcaaatgcagagtttttcagctgctgaaccaaaaaaaaaaacctccaacagccgtggaggtctagcttagcctttaatttaggcactgtagaagattgactgctttgggattgggtacgctcgcgtctgccgtctgcgtggcgtttgtttcttgatttgagggagacgtatgtatgtacgtacgatacgaggccacggggggtacgctcccctgtatcctctcctctgtatagaatccactgaatcagaatgcaacgcgtgacccgagccccgt

SEQ ID NO: 3414 - DNA, 350 bp, Zea mays
  Clone ID: TF_uC-zmrob73055d04b1
cgtacgcgtgggccggctcttgctctgctcggttcctcctggcagcaaccgaatgtctcccgacgccgacgccgccgccgggggaggaggaggtggagaggcgagcgctcggcgccggtgccggcgcgtagtcgcctcccgcgtccgcttccgcggcggcgaacggccgggcgctggtgcggtgggaccagatcctgccgcgccgcttcctgcgggtgcttctcgtcgagcacgacgactctacgcgccatatcgtcactgctctcctccgcaagtgcggctaccgcgtggacgacgtcgcggacaggatgaaagcgtgtgacgttatgctggagcgtgcctacgacttc

SEQ ID NO: 3415 - DNA, 615 bp, Zea mays
  Clone ID: TF_LIB4172-033-R1-K1-B10
ggctggggcaaaaatctaacccttggtttatccgggggtttaacaaaggaaggggtctaacctttcccagtaggacctttccaaaattttgtcccttcctggccccggggcccttcattactggggacccaagcgagaagcaggggccttccagtttttcctatacatttcctttccccggcccccaaaggtttggggaaggttgggatctaaccaagctacaggggttttttgaaaattttgaaagcaaggaaaaccatcggggggccttttaaacggttttgaaggaccctatacagttaatttcccagggcagttaacggggccggtttttggatcaggccgtttatccccgaccttgggcatccgtttgggaccttggaatcgatcctcgcagttagggcgacaatcaggggcagccagtttttgttactgaacttcctgatcgggcgggccattttaagcccgtccgtcctttgaagggggaggcccaggaccaccacctgaaaggacggttcgggggcaaaggacctcgtgctttggacaccggaggcaaccgaagggacccggaagccgagcttttccagaagcctgggggtaacggctctgtggggg

SEQ ID NO: 3416 - DNA, 1629 bp, Zea mays
  Clone ID: TF_700170928_FLI
ctgaggtttttatgcccggtgtatctggtatttctctgctgagtagaatcatgagccacaatatttgcaagaacattccagtgattatgatgtcttcgagtgatgctatgagtacagtctttaaatgtttgtcaaaaggtgctgttgactttttagtcaagcctatacgtaagaatgaacttaagaacctttggcagcatgtgtggagacaacggtgtcacagtgtaagttgttcatggtctggtttgaatatttggtagtggaagtgaaagtggcattcagacgcagaagtgtaccaagtcaaaaggtgccatcacttgagctgagtttgaagaggtcgagatcatgtggagatggtgccaacgatacagtcaatgacgatgaacagcggaatagtgcattaaggcgatcgaatctctcggcttttacaaggtaccatacatctgcggcttccaatcaaggtgggacaggattggtaggtagctgttcgccgcatgataacagctcggaggctgtgaaaacggattctacttacaacatgaagtcaaattcagatgctgccgcaataaaacaaggctccaacggcagtagcataacaatgacatgggttccactacaaaggatgttgtgacaaaacccagcacaaataacgagagggtgatgttgccctctgctattaaggctaatggatacacgtcaacattccatcctgtgcagcagtggatggttccagataatgcgacagcagggaaagcgaaggctgatgaagtggccaacaatgcaggcagaaatagtcatcctggtgacgtgcagagcaacctgacgcaacaacatcgtccaacccttcattacgtccattttgagaatagtggatcaggtgccctgcaatgtggttcctccaatgtatttgatcccccacttgaaggccaggctaccaataactatggtgtgaaagccgggagcaactcaggcagcaacaaggggcagaataatgggagtacagctggtgcgagcacggctgctgcaaatgctggacggacagatacagagatacgggctatcgataaaagtggacctggaggtggcagtgggagtggcaatgacacatatgtcagacggcttgctgcgagcatgacaccacgacaagaacagctaaagaaatatagagagaaaaagaaagatcggaactttgggaaaaaggtgcggtaccagagcagaaagaggctagccgaccagcggccaagggttcgtggacagttcgtgaagcaagctgtgcaaaatcaagagggagatggagagagatgacccccccccccctctggcttcagctcatggttgttagacgtggcggttgatgattcttccttctctggtgtgatctgatatgatcgacaacacaccatccttccttttcttcattggtttcttcacatctagaatttactgcctgaccgggaaaaaataagctaggaacttctatacatgtgtatgcatttctaatcatgtagaagaataagtgtgtcttgactctagataattttaggtagagtcatgctcgctctcctacattatgtgatgtaactgaagtgttgttgtgttgtcatgtatggtcttggatcactttctgtc

SEQ ID NO: 3417 - DNA, 1196 bp, Zea mays
  unsure (1)..(1196): unsure at all n locations
  Clone ID: TF_ZmC751_14
aaaaaaataacccttctcccccaaccccatctctctctctgcctgcgttctcctggtgctgctctccctctcctcccctgctttgacctccccgcctttccccgccgtttcttggatttctaggatccagacaaccgcccctgtgagcctgccttcctgcctactacctgcgtacgtacaggagggtccttgcttgggtgatccgggtgcttggtttctcggttccccggctttcgctgctgttggattcgccgagccggagccgccggagatgactgtcgacgagctgaagctgcaggcgagggccagcggcggccacggcgccaaggaccagttccccgtcggcatgcgcgtgctcgccgtcgacgacgacccgacctgtctcaagatcctcgagaacctcttgctccgctgccagtaccatggcagccacggccctgaagctgctgagggagaagaaggaccagtttgaccttgtgatcagcgacgtccacatgccggacatggacggcttcaagctcctcgagcttgtgggcctcgagatggacctcccggtcattatgctgtctgcaaatggggagacacagacagtcatgaagggaattacccatgnagcatgtgactacctgctgaagccagtgggcattggcattcgaaaaaaaataaaaaaaaaaaaaaaaaaaaaaaaaaaatgtgaaaaaaaaaaaaaaaaaaaaaaacaaaaaaaaaaaaaaaaaaaaaaaataaaacaaaaaaaaaaaaaaaaaatgaaacatacataacaatcccgctgacgaagtgaacctcggatgagcaggagcgggaccaggtcgtgccgggacaccgagcaatgggaggcgcacggcgtcgcgcaggccaccgggtcgctggtgcacattcccgccgtcgcgctgcggagctgaccggccgggacggaacggaagcctacgatcgactgtacatacaggggttgggacttgttgggttttcctttgggtggagagcgagggagcgcagtcgagagccagcgagcagtctctcgtgcagtgcagtgcagtgcagctccggcgtagatgagattgtattgtgaccaagccgggagggaaagcagggaggggaggacaaagatgttttgtcacgtttcaggctccggccatcgccggagtttgtccggggaatatatcgatttcctccag

SEQ ID NO: 3418 - DNA, 825 bp, Zea mays
  Clone ID: TF_ZmC2028_4
cagtaacacacaggctcctggagaagctcggctgccgggtcctttcggtcgcctccggtgtccaatgcacgagctccttcgccgccgagccgtccttccagctggtggttctggacctcgccttgcagaggacggacgggctcgaagtggcccgcgcgatcaggaagttcagtagcaatagctggctgccgctgatcgtcgccctagctgcgaggatcgatgacaaggtccgagacggatgccagaggtcggggataagcggcctgatccagaaaccggccacgttagctgcgctgggagatgagctgtatagggtccttcagaacagttgaaagtgccgcctgatggttctcattgctttcagaattctcaatagaccgctgtagcttggttagatccatacattcacaaaacatttgggggcaggcgaagggaaatgtataggaaaagctggaagaccgctgcttctcgcttggttcctcagtagtgaaggacgacggtgacaggaaggtacagaattttggagagatcatactggtagagcttagactcattcatttgtaaaaccctcggataatccaaggtttagattcttgcactagcactaaccacgatataaatagtttggacgaaatccatggatgggttcagtgaatgctggcatagtagatgcctaaagggggcaaggaacttttgttatcggttagacatgctgaaaagcaggccggatgagattgcggacaggaaggcagctgatacggccgatgctgaccttgtatcttgttgaagattaaatactatggtagtagtacttgcagcccgtgc

SEQ ID NO: 3419 - DNA, 545 bp, Zea mays
  Clone ID: TF_11041691
gctcgtgtcgtttctgaagctagctagctagcgagcgacagtcgatggcgagccgcaagtgtctcggaggcgagggaagcgcgccggcaccgcacgtcctcgcggtggacgacagctcggtcgaccgcgccgtcatcgccggcatcctcaggagctcacagttccgcgtgacggccgtggacagcgggaagagggcactggagctgctgggcaccgagcccaacgtgagcatgatcattaccgactactggatgcccgagatgactggatacgagctcctcaagaagatcaaggagtcgtccaggctgaaggagatccccgtggtgatcatgtcctcagagaacgtgccgacaaggatcaacaggtgcctggaggaaggcgccgaggatttcctgctgaagcccgtccgcccgtccgacgtgtcgcgcctgtgcagccgcgtcctgcggtgagcacggcggcaagtagtagcacagcatgctggcgcgcatgctcgtggtagttcttttggggatgcatggtggtagctgtagcagcggcattcc

SEQ ID NO: 3420 - DNA, 537 bp, Zea mays
  Clone ID: TF_ZmC8939_5
agctcggaattcggctcgagggcccattggcatgtaccaatattagctatgacggcagatgtaatccaagcgacttttgaaaaatgtatgcagtgtggaatggatggatatgtgtcaaagccatttgaagaacagcagctctactctgctgttgctcatttcttagagactgatgaaatagaataacaaatccaacttcgtaggagattgatttgccacaacactgtttcaacatctgccaaaagacccatctgttcaacaggttctgaaaaacagcgatcggcagcatatttgcaatggaattgaggtcccagttcttatatatagaacttgctccaggaaacaaaatacatgggactcccactgaccagaagaaagaagataagaagatagtagggggtacaaaatgtttggtctggtttccgcagcaatttttttttctggccgtgttttctggaaccaatacaacatgaccttgcaacagtggtgtcagctgcttctgtaatgccttatgacaccacgatattttcaaatgct

SEQ ID NO: 3421 - DNA, 1465 bp, Zea mays
  Clone ID: TF_ZmC5787_2
atggagccgattagttgtggagattcgggtgcgtgatccggtcggatcttgctttcccgggggagtgggggcggggatcgaggccacgccgctgcgtgggcgcgcgtctgacgtgccgtgccgtaccatggctgccaggctgcgccgctcgcctatatcctcccccatccccccgccttccctctgcatctccctctacccgccgccacattcatcagtagaaaccacctatcctgcctgctctacctacctccgctccccagccatgacggtgctggacgccgagtcgcggttccatgtcctggcggtggacgacagcatcatcgacaggaagctcatcgagatgctgctcaagagctcgtcttaccaagtgaccacggtggagtccgggaacaaggcgctggagctgctggggctgagggacaacggcgcggaggacgcgtcgccgccgtcatcctcctcatcatcttcgtcgtcgtcctcccctgaccatcaggagatcgacgtgagtctcatcatcactgactactgcatgcccggcatgacaggatacgatctgctcaagcgagtgaaggggtcctcatcgctcaaggacattccggtggtgatcatgtcgtctgagaacgtgcctgcccggatcagcaggtgcttgcaggatggcgcggaggagttcttcctgaagcccgtgaagccggccgacatgaagaagctcaagtcacacctgctgaagcggaagcagcccaaccagaagaacaagcctcaggcgcaggcggtggagtctcctgagcagcagctggacccgcatccgcagccggtgcacgagccggaggaagccgcggcagatcgcaacggcgtcaacaagaggaaggcagcggccatggaggaggggctgaccgtggtggtgacggcgccggagagcaccaagccgaggaggctgtctacgagcagcctgactgtggagacctgatcaaccgtggcgacctacgggctacggctacgcacattaatctagcagtggatgcaagccccagtcccagccccgccgccaagaaacacattttggttctgggagctaacggagggaagtgacaaacaattaaattatatgtagcggctgctgcttcggcctgcaaattttgttgcgctaacggtcatggacatggacatggacaccatcccttgtgttcgttaatcgttcggaaggggaaaagaagaagaagctgtagataaaaaaaggacaggcggctaattgttaatttccgcatggcttaattctggcaacgacctgctggctcaatcaaaaacctgtgacggacagacggatggatcaactgatgatgttgttgttttggctcggttcttcttccttgtacactgagtgttcagatgaacatgttgtaatctgaacatccgttcatgtcagcctgcctgacgatggaggcaaaagttcttctacatcatggtc

SEQ ID NO: 3422 - DNA, 1195 bp, Zea mays
  Clone ID: TF_ZmC5787_4
cctcgaggccggccgggctacccgccgccacttcatcagtagaaaccacctatcctgcctgctctacctacctccgctccccagccatgacggtgctggacgccgagtcgcggttccatgtcctggcggtggacgacagcatcatcgacaggaagctcatcgagatgctgctcaagagctcgtcttaccaagtgaccacggtggagtccgggaacaaggcgctggagctgctggggctgagggacaacggcgcggaggacgcgtcgccgccgtcatcctcctctcatcttcgtcgtcgtcctcccctgaccatcaggagatcgacgtgagtctcatcatcactgactactgcatgcccggcatgacaggatacgatctgctcaagcgagtgaaggggtcctcatcgctcaaggacattccggtggtgatcatgtcgtctgagaacgtgcctgcccggatcagcaggtgcttgcaggatggcgcggaggagttcttcctgaagcccgtgaagccggccgacatgaagaagctcaagtcacacctgctgaagcggaagcagcccaagcagaagaacaagcctcaggcgcaggcggtggagtctcctgagcagcagctggacccgcatccgcagccggtgcacgagctggagctggaggaagccgcggcagatcgcaacggcgtgaacaagaggaaggcagcggccatggaggaggggctgaccgtggtggtgacggcgccggagagcaccaagccgaggaggctgtctacgagcagcctgactgtggagacctgatcaaccgtggagactacgggctacggctacgcacattaatctagcagtggatgcaagccccagtcccagtcccagccccgccgccaagaaacacaaagtcgtgcctgctgcttttggttctgggagctaagctaacggagggaagtgacaaacaattaaattatatgtagcggctgctgcttcggcctgcaaattttgttgcgctaacgggcatggacatgcatggacaccatcccttgtgttcgttaatcgttcggaaggggaaaagaagaagaagctgtagataaaaaaaaaagggcaggcggctaattgttaatttccgcatggtgtgacggacagacggatggatcaactgatgatgttgttttggctcggttcttcttccttgtacactgagtattc

SEQ ID NO: 3423 - DNA, 1084 bp, Zea mays
  Clone ID: TF_ZmC8_3
cgagaaagagcagagggacaccgaaacagagaggagcagaggggagcgacgacaggtcagcggagatggaagcagcggcaggaggagtggaggcggagggggtgatgagggtgctggtggtggacgactcccccgtcgaccgccgggtggcgcagctgcttctcagcagcgactcctgcgccggctcattccacgtcatcgccgtcgacagcgcgaggaaggcgatggagttcctcggcctcaaggacggcggcgaggagcaggccgtcgacatggtgctcacggactactgcatgcccgagatgaccggctacgacctcctcaaggccatcaaggcactgaaccccctggagccgatcccggtcgtcgtcatgtcgtcagaagacgagccccagaggatcagccgatgcctgagcgccggcgccgaggacttcatcgtgaagcccctgcagagcaaggacgtgcagcgcctgcggaactgctccgccgccgcgaggcccagcaagggcgcgacgcagtgcgaggccgccgtcgtggccaagaggaatcataagccgcatcctgccgctgccggcgccggcgccgcgtcgccgtctggacggcgagcgagcctcgccggagtcgccatggtgctgcactcgtcgggcgtggagtacctgccgctcctgctcaagctcgtcgtgctggcgtacgcggcgctgtgcctgggcgagctcctgcacaggtgggcgtcgtcggacggccgctgctcgctctccccgtggtgcgcctgagcagcggtgcgtgtcctgggcaccagcaggagactggtgatgcaaatgcagagtttttcagttgctgaaccaaaaaaaaaaaactccaacagccgtggaggtctagcttagcctttaatttaggcactgtagaagattgactgctttgggattgggtacgctcgcgtctgccgtctgcgtggcgtttgtttcttgatttgagggagacgtatgtatgtacgtacgatacgaggccacggggggtacgctcccctgtatcctctcctctgtatagaatccactgaatcagaatgcaacgcgtgacccgagcc

SEQ ID NO: 3424 - DNA, 820 bp, Zea mays
  Clone ID: TF_ZmC339_6
cccgcgggccgggccggggctgcagcctgactgtctgttttcagcacccgcaccacctgactgtctgtttgcagtagccgcacctgtgtcccgtccgtccctgcaatggccgccgccgctgccgctccaacctctgtggtgccgtcgccgtctcctgcgcccaaagccagcgacagcaggaagacggtggtgcccgtggacgcttcggagctggagaagcacgtgctggcagtggacgacagctccgtggaccgtgccgtgatcgccaggatcctccgtggctctaggtacaaggtgaccgctgtggagtcggcgacgcgagcgttagagctgctcgcgctgggcctgctccccgacgtcagcatgatcatcaccgactactggatgcccggaatgaccgggtacgagctgctcaagcgcgtcaaggagtcggcggcgctcagaggcatccctgtcgtcatcatgtcgtcggagaacgtgcccacccgcatcacccgctgcctggaggagggcgccgagggcttcctcctcaagcccgtccgccccgccgacgtctcccgcctctgcagccggatccggtgactgcgtgtggtgctatgttaggagctaggatcctcaacaaaaaaaaaaaaaatcctcttctttctttctctcttgcttggacatagatcttcaaacaaggagctaacatttggggggagactttttagctttagggatctcaacaagttgttcggaacggggggctgttcttttctccattcttcttaataacatcaggtgtcaatgtcatgagaaaaaaaaaaaaaaaaaagcggcc

SEQ ID NO: 3425 - DNA, 1171 bp, Zea mays
  Clone ID: TF_ZmC10160_1
cgacagacgatgcaagggaacatctgggcagttctcgacggccaaggactcccggagagcatgaccctggtcctgaggttccagctccaaccatcgctggcgagctccaacctcctcggagggtcgtttgatcaggagcactactcatcattgccatctaaccaaatagccgggctgaaggttctgctcatcgatgacgacgagatcaacctggtggtggcccggaagctcctggagaggctaggctgcaccgtttcctcaggctcgggactcatggactcttcctctgcctgtgcctcgttccagctcgtcatggttaacctcgagatgtcagcgatagatcccctggatgctgcctcgaggatcaggcagcagtacaggagctcgcactggcccctggtgatggccatgacgtcggagcagaacgtgtgggagaagtgcgcgcagtccgggatcaacggcgtcctgaagaagccgcttgttctgctggaagtgaaagaagagctcgagcggatccttcagaacacatgatgcctgccatgacccatgagctactaccatgatgaatacgacccccgtccgtccgtctagcatactacatagcagaggggaggggacatggatctcgagttgagaagtggatgcaagtctcctacgctgctgtagttgagtgactgctgtgaggacggaggtggtgacgacgacggatttggcaggcaagcacgagggccgcgttatccgatccatgcccatgccgcgtaaggaggcttcacctcgattcaccaactacataatcacctcgattcacacacgtcaggctttcagtcgataaattcattagtttcatcagaaacggaatgcagttgccagttaatgttggcgtcagtcgcaggggatcttcggccatcgtcgccgcatcagaagcaatgcgcagctccagtggcctcgaccgaacaggacaagaaataggtctagttggatttcttttcgcctttgggtttttgtttaaaaagaaagagaacttgattttccttaaactagaattctctgtcttccattatagtgcacccttttttatactcagattcaaaaccaaaatataaaagaattaagtagatctcaacttgtcatacttctcagcatatttgttatctatccacacttgttaagg

SEQ ID NO: 3426 - DNA, 1078 bp, Zea mays
  Clone ID: TF_ZmC33_1
ggtaccccctcgagccggcgggacaaaaattgtaacaaactacatatactaaagtttagtacattgagagcttgtctagctagtccatggccactcaaagtccccatgttctcgttgtggatcattcccgtgttgattgccttgttgcatcgattgtcctcaatagtttcaacattcgagtaactgttgcgggaggtgccatggaagcattggaattcttagatgcgaacaacagtcatgtggaccttattttgactgactactgcatgcctgatatgactggctatgatttgcttagggaagtgaaggaatcgccaagactaaagcacattccagtggtgattacatgcactgatgtcataccagaaagaatcattgagtgctttgaaggaggagcagaggaatacatgataaagcctctcaaggtttctgacgtgcctcgtattcttagctacatgtgatgcacttgagggagaaaacgaataaaaaggaaatgcaagcataaacagtctttgggttatagttctctatcaatcatgcttaagtgtgaccatatatggtctttttattatgtcacctgttgttttgaataatttgtagccaatgcaagcctaatcagtatttggcttatagttctctatcaatcatgcttatgtgtggccatctatggtacttttaatgtcatccattatttttttaaaaaaaaaaaaaaaaaaaaaaaaaaaaaaaaaaaaaaaaaaaaaaaaaaaaaaaaaaaaaaaaaaaaaaaaaaaaaaaaaaaaaaaaaaaaaaaaaaaaaaaaaaaaaaaaaaaaaaaaaaaaaaaaaaaaaaaaaaaaaaaaaaaaaagggggggccccttttaaaagaaaaaaatttttggccccgggtatggaaaaaaaatttttttttttaggggccccaaaaaaaaaaaaacgggcccggttttaaaaaccgtgggaggtgaaaaacccggggggaacccaaataaaaaccgtttgaaaaaaacccctttttccaaagtgggaaaaaaaaaaaaaggccccccccaaagccccttccaaaaaattgccccccct

SEQ ID NO: 3427 - DNA, 2854 bp, Zea mays
  Clone ID: TF_ZmC131_1
tcctagggatgctccaaatgctcatggatactgatttggacacaacgcaacaagactatgttagaaccgcacaagccagtggcaaaactttggtatccctcatcaatgaggttcttgatcaggcaaagatcgagtctggtaaacttgagcttgaggtggtaccctttgatcttagaacagtttgtgatgacattttgtctctcttctgtgggaaagcacaggagaaaggactggagttggcagtgtttgtttctgatcaagttccacaaacactaattggcgatcctggaagaataaggcaaatcattacaaatcttgttggaaactctataaaattcacagagaagggtcatatctacttgacggttcatgtcgttgaagagattatgcattgtctggaggttgagacgggaactcagtatacaaataccttaagtggctacccagtggcgaacagaaagcgcagttgggaaaactttcgactttttagtagggaactgaactcatccgagatgccttttgcacccattgcatcagactcaataagcttgatgatatcagttgaagatacgggtgctggaatcccgttcgatgctcaatcccgtgtcttcacccctttcatgcaagtaggtccatccatcgctcgcatacatgggggcactggcattggattaagcatcagcaaatgcttggttggactcatgaggggagagatcggatttgcaagtaaaccccaagttggttctactttcaccttcactgcagtgcttacgagagtccattccagcagaaatgagaataaatcatcagaatttaaagagatcaatgcattggtggtagatcatagaccggtccgtgccaaggttactaagtatcatttgcagagactgggagttcagactgaattgacaactgacctagatcagtatatttctaaaaataattgtggatcacagattgcaaagcttgtgctcattgacaaagaaacctggctgaaagaatcccactccatgcctcttttggttactaaattgaggaacaaagatcagccagactctacaaagttatttcttttggagaaccctaaaagttctgtcaagagcaattcacatatattcagggaatataacttgaatgtaattatgaagccacttcgtgcaagcatgcttcaggtttcgctacaaagagcattgggtgggatagataaactgcattgcaggaatggagtagtcggaaattcaacactgggcagccttcttcacaagaagcgaatcatagtggttgatgataatattgtaaatctcaaggttgctgcaggcgctctgaagaaatatggcgcggaagtaacttgtgctgacagcgggaagaaagcaatcacgctactgaaacctcctcacagttttgatgcttgtttcatggacatacagatgcctgaaatggatggatttgaagccacaaaaaggattagagtgatggaaagagatctaaatgagcaaatagaacgtggagaagccccaccagaatgcgcagggctccggcagtggcgaactccaatattagccatgacagcagatgttatccaggcgacgcatgaacagtgcttaaaatctgaaatggaaggtaatgtatccaagccattcgagggcgagcaattgtacagagaagtagctcgccatttctcaaatcgaggcgaacttcagtaggtacgcttatatggagtgtaaactaggcgacgcacgcacagtgcttaaaatctgaaatggacggttatgtatccaagccattcgagggcgaacagttgtacagagaagtagatcgctttttcaagcatcaattcgcagagttaggggccctattaaaacgctagcaacgctgggatgtggcctccagttaggtggaaaacactttaggctggagatggaaccacccatgttcggttccttggtacatctgaccaaactgcaaaactaaatgtgcaatgtcttgaaatcaaggtgcatgtggagctatttactcgacaatctgaagtcaaggcgtgtgaaaaaaaagcccagctgcattcactaaccgcagatgtcctctgccactataatatagagtagggagagaaattttccttccccggaaggtaccggctgtacatattaggtattggttgtttgtgcaggcatttgttggcattttgttgtgcatcgtcttcggtctgtattgtttgggtcgaagctgtaaaatgtaaatggcattttcaaagatggaagttttgtttgacaaaaacatcggtcgtcatcgtgaataaaattaataagataaaaaaaacagtgggcatcaattcgcagagttagagggcccctattaaaagattagaaatgctgggatgtggcccaatccagttcgaacaaggcctcaggtggaaacgatttaggctggagatggaaccacccatgttcggatgcttggtacatctgaccaagctgcaaagctaaatgtgcaatgtcttgaaatcaacatgcacgtgcagctattcattcgacgatttgctgaggtcaaggcgtgtgaaaaaaaaatcagctgcattcactaactgcaggtgccctctgccactatataatatataagactagggggagaagttttccttcccccggaaggcacggctgtacatattatattagggattggttggttgtttgtgcaggcatttttgtatgcatcatattcggcctgtatgggtcgaagctgtaaagtgtaaatgacacattcaaagatggaagttttgtttgaccaaaaaaaaattataatataaaaaaatataaaaataaataaaaaaaataaaatataaatattaataataaat

SEQ ID NO: 3428 - DNA, 817 bp, Zea mays
  Clone ID: TF_ZmC339_3
ttgggtacctcgaggccggccggggccgcactgtctgtttgcagcacccgcaccacctgactgtctgtttgcagcagccgcacctgtgtcccgtccgtctctgcaatggccgctgccgcaccggctccagcatctgtggcgccgtcctctgcgcccaaggccaccggcgacagcaggaagacggtggtgtccgtggacgcgtcagagctggagaagcacgtgctggcggtggacgacagctccgtggaccgtgccgtgattgctaggatcctgcgtggctccaggtacagggtgaccgccgtggagtcggcgacacgagcgttggagctgctcgcgctgggcctgcttcccgacgtcagtatgatcatcaccgactactggatgcccgggatgaccgggtacgagctgctcaagtgcgtcaaggagtcggcggcgctaaggggcattcccgtcgtcatcatgtcgtcggagaacgtgcccacccgtatcacccgctgcctggaggaaggcgccgagggcttcctcctcaagcccgtccgccccgccgacgtctcccgcctctgcagccggatccggtgactgcgtgtggtgctatgttaggagctaggatcctcaaccaaaaaaaaaagattcctcttctttctttctttctctcctgcttggacatagatcttcaaacaaggagctaacatttggggggagactttttagctttagggatctcaacaagctgttcggaacgggggggatggagcacagcgttggctgttcttttctccattcttcttaataacatcaggtgtcaatgtcatgcacg

SEQ ID NO: 3429 - DNA, 814 bp, Zea mays
  Clone ID: TF_ZmC353097_1
ctcgaggccggccggggccacggtgccaccgcatcgcacttgattgggccggggcgttgcgctctctggtctggtcaaggcgtcgagcgtccgtcctccaatggctggcgcggcggcggagcgcaaggcgatcagggtcctcctcgtcgaggacgaggagatccacagggttctggcgagggcgctgctgaggtcggcctgcggcggcgtggagctgcacgaggcggggaccggcgccgaggcggtacggcgcgtgcgggatggcggtgccgccgccgcctacgacctcatcatcaccgactggaagatgcccgtcatggacggccacgaggcgacgcggcagattagggcgatgggcgtcacgacgccgatcgtcgggctgtccagcgacaccctcccgccagacgtcgacgcgttcatcaaggccggggccgacgacttcacccccaagcctctgtccaaggagaagctcgtccgtatccttaccaagttccatctcgcttagctctctatttgctgtccaaggagaagttcatccgggtttttttttttggttgccaaattggcaaatacaatctccactttgctctatgtttgggtgcaaatctcaatgagtggataaataaagggtctcgaagaatcgggtgggctttcttccactatggaccttgggccttatatcagctcgtgttatccttctcgcatataattcacacccgctctgtaatctgtacgttggttggtattggcatcacatgacaacaaggccctctttgttaaaaaaaaaaaaataaaattttaaaataaaataaaa

SEQ ID NO: 3430 - DNA, 2244 bp, Zea mays
  Clone ID: TF_ZmC745_1
atttgacctgagatccatccttgatgatgtcatctcattattttcttcaaagtcaagagagaagggaattgagcttgctgtatatgtctctgaaagagttcctgaactcttgttgggtgatcctggaaggtttcggcagataattacaaatttagtgggcaactcaattaagttcacagaacggggacatatttttgtacaagttcatctggcagatcactcaaatcttgcaacagaacccaaagttgagtcagtggctaacgggatgaatggacataaagatgagaaaactgctgtagcaaccagtgtttctctcaacacactaagtggttttgaagctgctgatagccgaaatagttgggaaaacttcaagcttttgctttcttatgagaaaaatgagatgccctatgaaagtgtatctgataaagttactcttgtagtaagtgtggaagatacagggataggtataccattggatgcccaagccaaggtgttcactcctttcatgcaggccgatagttcgacttccaggacatatggtggtactggaattggattgagcatcagcaaatgtcttgttgaactaatgggtggtcagataaactttgtcagccgaccacatgttgggagtacgttcacatttactgcggttctcaaaagatgtgacagaagcgctattggtgacagtaagcctgttatgttgcatcctcttccatccagtttcaaaggtttatctgcactattggttgatagaagaccagtaagagctactgtaactaagtatcacttgcaaaggctgggaattgcctgtgatgttgttgctaccattgaactggctcttggtgtgctgtccgggagaaatggcagttccctaaccagtatgaagcaaccatgcatgttattgatcgagagtgattcatggggcttcaatattgatgtttctttacgatctagactcctggagatgaagcagaatggtcacacacatgtattacccaaaatcatccttcttgcagctgcagaatcgggcaaactcaaagaacactatgcagttgattctgtgatcacgaaacctctgaaagcaagcgcacttgccgcttgtctattccaaacacttggtatcaaacagtcaagcaacgagagaagtgacaactcaggttctctttacgggttgcttcttggcaagaacatattggtggttgatgacaacaaggtaaatcttagagtggctgctggcacgttaaagaaatttggagcaaaggtggagtgcgtggagagtggaaaagatgccctcgccctcctacaggtcccatataagtttcatctttgtctcatggacattcagatgcccgaaatggatgggtttgaggctaccaagcaaataagggcaatggaagcgaaggcaaatgagcaggcagtcgcctgtgacgattcagaaatagatggcgcgacaagggcagcaagatggcgcctgcctgttcttgcaatgaccgccgatgtcatccaggccacccatgaagagtgcacgaagtgcgggatggatgggtacgtcacaaagcccttcgaggagaagcagctcttccaggcgttgcagaagttcttggaccccggcatgtcctgctaacgccgaagtgatgcgttggagaccgtgcagcgcgggctgctcgtcgatcatgccagcggggaacagcaggcagacaaggcagcacgcaccacgggccttcgctggtctgcctgcctgtgcaggcgtcgtgtaaatgtattgtatttgcagggatactgtttacagcgctagtatgccccgtgccacaatgtccgagctacctgtggctgatgcacgttgcgcataggtggttttttttgtacagcttccaccatttttgtgctccagatcagaccaccgaaggaggcaagcatgctcgctggtgcagtgcagcactggaaggaaaacctgacttcctgagagtagatttttgctgtttaattgcattgggatttatgatgtattataatcagataaatgtgtgatgtaagctggcgtaattggcccaatgcatttccattgttatggatgagttgaaatggcattggttagacatacactattgggtgtatgcccttccacagttccattttccctgcaaaatatcaaaatgtgcaaagggatagtggaatcatggcttgaattatatgaattttctttggtgtttttttcccgtaaaaaaaaaaaaaaaccgtctagag

SEQ ID NO: 3431 - DNA, 776 bp, Zea mays
  unsure (1)..(776): unsure at all n locations
  Clone ID: TF_LIB4977-010-R1-K1-B10
ttgggtccctcgaggccggccgggccgggatcgttggcagcgccattcatccatttgtctttttgatttgttttgacctgagggcaaggcagggcagaacagagagcattcgtctcgatcaaccagatctcgatcaatggaggtggcgggggcttgctgccacgccggcgaggagaggaaggtggctgtgcctatcggcaacgatgcggaggtggagccatgcgtcatcgccgtggacgacagctccgtcgaccgcgccatcgtcaccgcgctcctccggcgctccaagtacagagtcactgcggttgacagcgggaagagggcgctggagatactgggctcggagccgaatgtgagcatgatcatcacagactactggatgccagagatgaccggctacgacctgctcaaaaaggtcaaggagtcttcgaagctgaagcggatcccagtggtgatcatgtcctcagagaacgtgcccaccagaatcaccagatgccttgaggaaggcgcggaggacttcctgctgaagccggtcaggccgtccgacatctcccgcataacaaccaggatgctgctacactgaacttctttcaccagtggccacccaagccaggcgtagtgttttcaattcaagtcacagtagaggtataggaacggagtcaatttagggtagcaattagccgcaggaagtttgatgtaatgtggcctttcattcattagtgcttcgagctttctttggcgtcttactcgnatcagaacaggcagggattagttgt

SEQ ID NO: 3432 - DNA, 556 bp, Zea mays
  unsure (1)..(556): unsure at all n locations
  Clone ID: TF_ZmC8939_3
gagaaaaaaataancgatatgatcatgatgggtgaaatatccgctaataattatggaaataaggcccattggcatgtaccaatattagctatgacggcagatgtaatccaagcgacttttgaaaaatgtatgcagtgtggaatggatggatatgtgtcaaagccatttgaagaacagcagctctactttgctgttgctcatttcttagagactgatgaaacagaataacaaatccaacttcgtaggagattgatttgccgcaacactgtttcaacatctgccaaaagaccatctgttcaacaggttctgaaaaacagcgatcggcagcatatttggtgatttcctctacatgctttttaagagcaagctaatgcaattaaatatttccccatgcagttctacaagcttatgcatttacattctttgtggagcgataaaactttgcttgtatacttgtctgccaaatatctactataacatcttgttatcaagaaagaaacctattgtaacattgacttgcctagctctgaatgcagatgaagcatcaatattttgg

SEQ ID NO: 3433 - DNA, 3621 bp, Zea mays
  Clone ID: TF_ZmC2028_1
gaaaccaggggaaggcgcagcggtttgccggcagacgggcgggcccaggccgaggaaacaggcaggtgcatccatccagagccacgccggcgaaacgcggcgaacagatacgagcacgcgagagtggtgcagcgaggttgaagcaacgacccgcatccggccagcccccgagctgcgctgctctgctcttgctctcgttcgtcccactcctttcttcccaccgaggggagagacaaccccctggctcctgcctgctcgacggacccaaagcatcgcctcctcttcctacccctctcctcaatcggctcgtccggtcgtcgcttagcgccctccacccgccagccaccccactgcgacgccgcgttctccccttcttccgacgtcgctgtctctctctcagcccagctccaggggcgaggctgtgaaagaagagggaggaaagggagaaaaaaagaccctcttttcttccgtcggcaggcctcgtgaccatggatccgccgcccgccgggctctcgacgctgccgaggtctgctggagatccgtagccagcccacgtgtagacggttatggtgctagtaccggtgccaacgctgtgtttcttggcgggcgttgctgctcctcctccgcttgaggattgctgctgcatccggcaggagggatggtcggaggcggaaggagcgtcggcacccgcagcgtggaatcgacgacgggcgcctccagtcggttcagaaatgcgcaaatgcgcgtctgaatgaagcctggttggaggtggtagagccgatggtggtgggaacggcactgctgcgcggggtttcctccgcgtggatcctcctgttcctctcctccctgctcctctcgccgtcagcggcgtctgtcgatttcggccactgcggcggctgcgacgacgccgacgacggcgccctctccagcacctataacatcctgcaatgccagaaggtcagcgacttcctcatcgccgcggcctacttctccatcccgctcgagctgctctacttcgccacctgctccgacctcttccccctcaaatggatcgtgctgcagttcggcgccttcatcgtgctctgcggcctcacgcacctcatcactgtgttcacctacgagccgcactccttccacctcgtactcgcccttaccgtcgccaagttcctgacggcactggtctccttcgcgacggccatcaccctgctgacgctgataccacagctcctgagggtgaaggtcagggaaaacttcctgatgaacaaggcgcgtgagctggaccgggaggtggggaggatgaaaaggaaagaagaggcgagctggcatgtgcgcatgctcacacaggagatccgcaagtcgctcgacagacataccatcttgtacaccaccatggttgagctctcgaaggcactggaactgcagaattgtgctgtctggatgcctgatgagaccaggagcacgatgatcttaacacatcagctgagggaaagggatataatggacccacagaaacactcgattcctattgatgatccggatgttcaagaaataaaggcaaccaaggatgcaaaagttcttggcccagattcggcgctaggggtttctagccgaagcaagcatgaagcagggcctgtggctgcaataaggatgccgatgttaagggtgtcaaatttcaaaggagggactccggaagtgatgcagacgagctatgctatcttggttctggttttgcctaatgatggttcattagggtggggtcgaagagagttggagattgttgaggtagttgctgaccaagttgcagtcgctctgtcacatgctgcactcctagaggagtctcagctgatgcgagagaagcttgccgagcagcatagggacttgctgcaggcaaaggatgaagccatgagggcaggggacgctaggaattccttccagactgcaatgtacgatggaatgcgaaggccaatgcactcaatccttggtctcgtctcaatgatgcaacaggagagcatgaatccagagcaaaggcttgtgatggatgccattgccaagacaagcagtgttgcatccacactgatgaacgatgtgatgcaaacatcgacaatgaactgtgagcacttgtctttggtcaggaggccgttcaaccttcattccttcattaaagaagttgttggagtggtcagatgtctaactggttgcaagggtgtggagtttgagtttcaagtggagaattctttgccagaaaggatcattggtgatgagaagagagtcttccatattgtcctgcacatggtaggcactctaacagaccgatgtaatgctggctgtatctcattatatgtaaatgtccataatgaggttgaagataggcataatcatgactggatgctgcgaagagcaaacttctctgggggctatgtatgtgtgaaatttgagattaggattagaaaatcaaagggctatctgttgagttcatcaagcagtcagataagtcagggatccaaacccaacaattctgagatggggcttagcttcaatatgtgcaagaagattgtgcagatgatgaatggcaatatttggtcagtatcagattctaaaagcatcggagaaactatcatgctagtcctccagttccagttggaacctgtgactccggtctctggagcgtcctcagatttgtacagatcatccgcaattcccaactttaatgggctcagagtcctccttgcggacagcgactgcaccaaccgagctgtaactcacaggctcctagagaagcttggttgccgagtcctttcggtcgcttctggcgtccaatgcatcagctccttcgctgcggagtcgtccttccagctggtggttcttgatcttgacatgcagacgatggatggattcgaagtagcccgcgcgatcaggaagttcagtagcaatagttggctgccgttgattattgccctagcagcaagaatcgacgacaacatccgggatcgttgccagaggtcaggagtaaatggcctgatccagaaaccggtcacattagccgcgctgggagatgaactgtatagagtccttcagaacaattaaaagagcctgacggttctcatttctttcaatctcaatagattgctatagcttgatcggtaactaatttctgccaggttagctccatacaatcacaaaaaaaaacattttgaggcaaaagggaaatgtataggaagctgaaagcatcgctttctgcttggttcctcggtgaaggaggaggaggacgactacgacaggaaggtacaaaaaacttggagagatcatactgttagaacttagacccattcatctgtaaaccctcagataagcaaagaattagattcatgcactaacactaaccacgatataattagtttggacgaaaaaaaaaaaaaaaaaaaaaacatcgacgatccatagatgggttcagtgaatgctggcatagtagatgcctaaagggggcaaggaacttttgttatcggttagacatgctgaaaagcaggccggatgagattgcggacaggaaggcagctgatacggccgatgctgaccttgtatcttgttgaagattaaatactatggtagtagtacttgcagtct

SEQ ID NO: 3434 - DNA, 3314 bp, Zea mays
  Clone ID: TF_ZmC2028_2
atcgcctactcttcctactcagctccgtctggtccggtcgtcgcgtagcgccctcacccccaagccacccccaccacgaaggccgcgcgctccccgccttccgacgtcgctctctccgcccagctcaagcgcccagcggtgagggaagggaaggaaaaacagacctttttttttcttctcctcggcggcctcgtgactatggatccgccgggctccggtctcccgccggtgccgaggtttcctggctcgatccgtgaccggcccacgtggagacggtgctggtgctagtaccggtgcctccaccgtgtttcttggcgaccttactacctccttctctcctcctctggaagattgctgctgcagcctgcaggaaagatggccgaacgccgaaggagcgtcggcgcgtgcagtgtggaatcgacgccgagcgcctccagtcggtgcaggaatgcgcaaatgcacgtctgaatgaagcctggttggtggtagagccgatggtggtgggaacggcgccgtgcggggtctccgtctcctccgtgtggatcctcctgctcctttcctccctgctcctctcgccgtcggcggcgtccgtcgatttcggccactgcggcggctgcgacgacgccgacgacggcgccctctcgagcacctacaacatcctgcaatgccagaaggtcagcgacttcctcatcgccgcggcctacttctccatcccgctcgagctgctctacttcgccacctgctccgaccttttccccctcaaatggatcgtgctgcagttcggcgccttcatcgtgctctgcggcctcacgcacctcatcactgtgttcacctacgagccgcactccttccacctcgtactcgcccttaccgtcgccaagttcctgacggcactggtctccttcgcgacggccatcaccctgctgacgctgataccacagctcctgagggtgaaggtcagggaaaacttcctgatgaacaaggcgcgtgagctggaccgggaggtggggaggatgaaaaggaaagaagaggcgagctggcatgtgcgcatgctcacacaggagatccgcaagtcgctcgacagacataccatcttgtacaccaccatggttgagctctcgaaggcactggaactgcagaattgtgctgtctggatgcctgatgagaccaggagcacgatgatcttaacacatcagctgagggaaagggatataatggacccacagaaacactcgattcctattgatgatccggatgttcaagaaataaaggcaaccaaggatgcaaaagttcttggcccagattcggcgctaggggtttctagccgaagcaagcatgaagcagggcctgtggctgcaataaggatgccgatgttaagggtgtcaaatttcaaaggagggactccggaagtgatgcagacgagctatgctatcttggttctggttttgcctaatgatggttcattagggtggggtcgaagagagttggagattgttgaggtagttgctgaccaagttgcagtcgctctgtcacatgctgcactcctagaggagtctcagctgatgcgagagaagcttgccgagcagcatagggacttgctgcaggcaaaggatgaagccatgagggcaggggacgctaggaattccttccagactgcaatgtacgatggaatgcgaaggccaatgcactcaatccttggtctcgtctcaatgatgcaacaggagagcatgaatccagagcaaaggcttgtgatggatgccattgccaagacaagcagtgttgcatccacactgatgaacgatgtgatgcaaacatcgacaatgaactgtgagcacttgtctttggtcaggaggccgttcaaccttcattccttcattaaagaagttgttggagtggtcagatgtctaactggttgcaagggtgtggagtttgagtttcaagtggagaattctttgccagaaaggatcattggtgatgagaagagagtcttccatattgtcctgcacatggtaggcactctaacagaccgatgtaatgctggctgtatctcattatatgtaaatgtccataatgaggttgaagataggcataatcatgactggatgctgcgaagagcaaacttctctgggggctatgtatgtgtgaaatttgagattaggattagaaaatcaaagggctatctgttgagttcatcaagcagtcagataagtcagggatccaaacccaacaattctgagatggggcttagcttcaatatgtgcaagaagattgtgcaggtaaatcaaaataatagaatatcttaagcatttatacccgcaaatttttttgtacagctaggcactagcagcttagacttggccgtcacatagatagtttgctatacaccaattgaactgccaaactacagaatgtgtttagtggctatagtgtggcctttttgtgcaagtgcttggaatatttattatctcacctcaaactgggcatactgagaggacatattggtccttatgttgaacttacgttttagtcataactatttttatggtatttcttccgtagtatgtgtgacttgcatagatatatttaattggtatgcttgtagtagcccgaacctcagcgactctatttgattgttatgttttggtttgcaatttgttcatccagttgtggaagtggccaatgtatacttgatttgatgtgcaatcattagtgtgcttactgatacgagccctcctttgtgctgcagatgatgaatggcaatatttggtcagtatcagattctaaaagcatcggagaaactatcatgctagtcctccagttccagttggaacctgtgactccggtctctggagcgtcctcagatttgtacagatcatccgcaattcccaactttaatgggctcagagtcctccttgcggacagcgactgcaccaaccgagctgtaactcacaggctcctagagaagcttggttgccgagtcctttcggtcgcttctggcgtccaatgcatcagctccttcgctgcggagtcgtccttccagctggtggttcttgatcttgacatgcagacgatggatggattcgaagtagcccgcgcgatcaggaagttcagtagcaatagttggctgccgttgattattgccctagcagcaagaatcgacgacaacatccgggatcgttgccagaggtcaggagtaaatggcctgatccagaaaccggtcacattagccgcgctgggagatgaactgtatagagtccttcagaacaattaaaagagcctgacggttctcatttctttcaaaaaaaaaaaaaaaa

SEQ ID NO: 3435 - DNA, 981 bp, Zea mays
  Clone ID: TF_ZmC745_2
catcacacagtcaagcaacgagagacgcgacaactcaggttcccttcatgggttgctccttggcaagaacatattggtggttgatgacaacaaggtaaatcttagagtggctgctggcacattaaagaaattcggagcgaaggtggagtgcgtggagagtgggaaagatgctctcgccagcctacaagttccacataagttccatctttgtctcatggacattcagatgcccgaaatggatgggttcgaggccaccaagcaaataagggcaatggaggcgaaggcaaatgagcaggcagtcgcctgtgatgattcagaaacagatggcgcgacaagggcggcgagatggcacctgcctgtccttgcaatgaccgccgatgtcatccaggccacccatgaggagtgcacgaagtacgggatggacgggtacgtcacgaagcccttcgaggagaagcagctcttccaggcgctgcagaagttcttggaccctggcatgtccagctaacacccaagtgctgcgtttgttgcaagtgaggcaccattctcctccgttctgtagttcgctaaccatggacgcaatctgaccccgaagaaagatcgtatatcgcgggctgctcgtcgaccatgccagcggggggaacagcaggcagcacgcagcaggggggctttgctgcctgcctgtgcagtgcaggcgtcttgtaaatgtattgtattagcagggatcctgtttatagcgctagtatgggcctgcgcgacaatgttggagctgcctgcggctgatgcacgtcgagcataattttgttgtacagcttccaccatttttgtgctactgtggcaggcatgctcgcaggtgcagtgcaggactggaaggaaaacctgactgcctgagagtagtgtttttttttggccgtcaacattgcattgggattcatgatgtattacaatcagctaatgtgcgatataagctcatgtaattggctc

SEQ ID NO: 3436 - DNA, 419 bp, Zea mays
  Clone ID: TF_uC-zmroteosinte077a02a1
ggtgctgatttttatacgggtgcggttgccatggcatgaattatataatctgggcataccagccacacatgttacagcaggaagaagaaaaaagaaactagggctaggggaaaatgaactcccaagaaactagagaagtcaagaacttactctcaagaacatgggatctctgacagaattctttcagcctcgatgggtgaaccccgatatcctccactattttacactccatataagcctacctactgaacttggtcttgatttaggaaaaagcgagctacttctctgtacaattgctcgccctcgaatggcttggaaacataaccatccatttcagatttcaagcattgttcatgtgtcgcctggataacatctgctgtcatggctaatattggagttcgccactgccgaacccctac

SEQ ID NO: 3437 - DNA, 2987 bp, Zea mays
  unsure (1)..(2987): unsure at all n locations
  Clone ID: TF_ZmC8939_1
ttacgnttcccggtcaacaggtaaaggggccctaacatccccttttaagcttctgaagtccaaccatctcggtgtggtgcttacattcactgtatataaatatgatctgcctccaaatgcaacaccacaggagcgtattcatgctacattgggctatcttggtgcctcatttgatgtcccttctctggttgataaactcctagaacaactcgctagcaaacgaaagatagtagttaatttatatgacaccacaaatcatacctctcctattgaaatgtatggttctgattttactccatctggtgatctgcatattagtagcattgattttggagacccaacacgcaaacatgagatgcattgcagatttaaacatgaaccttcactgccatggtctgcaataataatatcaacagctgtagctataattgttttgcttgttggacatattatttatgcaactctgaactcccttgaaaaggctgaacatgattatagagtaatgagagaacttaaaggacaagctgaagctgcagatatagcaaaatctcagtttctagcaactgtttcccatgagattcggactccaatgaatggtgttttaggtatgctgcagatgctaatggacactgaacttgatacaactcagcaggattttgtagtcaccgctcaagaaagtggaaaggtattaataaacttaataaatgaagtccttgatctggctaagatagagtcaggaaggattgagctggaagcagtgccttttgatgtccgtgatattcttgacaatgtgatatctcttttctacgataaatcacaagctaaaggcatagagttggccgtgcttgtatctgaccaagttcctgatgtcctaattggggatccatggcggttccggcagatcattacgaaccttgtggggaattctatgaagtttactgaacagggccacatctttgttcaagtccatttggtcaaggaactaaacaggaaaggaaacaatttttgtgatgtttctgctcataacagagaaattctgtatgattctgacaactcgatgctatggaacacactaagcggacttgaagtagcagatagctggaggtccttggagaattttacgatgttcaagaattcaaatggtgaaacagatacaattaggttagctgtcagagttgaagacaccggcataggaataacaaaagatgctcaaatgcgtatttttacacctttcatgcaagctgacagttccacctcacgaacatatggtggaactggaattggcttgagtattacaaaacgtttagttgaattgatgggtggagaaatagggtttactagtaaatcaggagttggtagtacattttcttttactgccattttcaaggagaacagaggatgtcctggagatatgaaaagatactattctgaacctactccgttggattttcaaggaatgagggctcttattattgatggaaggagtgcacgtgcagaggttactatgtaccatcttcgtagacttggaatacagtgcagtcttgttgccacatctgaatctgaatctgcatcttcagctttgatgaaagcctgcacctcaagcaaaaacaatccggacatggtccttgttgatacagaagcttggggtaaaggttcaggtttggcattctatcatcgttttgtagattgtcaactaaagggcgcacacaagttttctcagcccatgccaaagactattcttttgggaagctcaataagccctgttgaatctgattatttaagattgacaggatttggtgattgcataaggaaacccctccgtcttagtactattgttgcctgtcttcgcaaaaccttaggggttggggttacaaggcagcagagtagagaccaatctttggttcttcaaagtgtactaactggaaaacagattctggttgtggatgataatgcagtcaaccgtaaagttgcagctggttctttgaagaaatatggatctaaagttacatgtgttgatagtgggagtgatgcaattgatatgctcaagccacctcacacatttgatgcttgcttcatggatgttcagatgcccgagatggacgggtttgaagctacaagattaatccggtccatagagaaaaaaataaacgatatgatcatgatgggtgaaatatccgctaataattatggaaataaggcccattggcatgtaccaatattagctatgacggcagatgtaatccaagcgacttttgaaaaatgtatgcagtgtggaatggatggatatgtgtcaaagccatttgaagaacagcagctctactttgctgttgctcatttcttagagactgatgaaacagaataacaaatccaacttcgtaggagattgatttgccgcaacactgtttcaacatctgccaaaagaccatctgttcaacaggttctgaaaaacagcgatcggcagcatatttggaaacaaaatacattggactcccactgaccagaagaaagaagataagatagtagggggtacaaaatgtttggtctggtttccgcagcaattttttttctggccgtgttttctggaaccaatacaacatgaccttgcaacagtggtgtcagttgcttctgtaatgccttatgacaccacgatatttccaaatgctgtgttgtaagtgctttacagacaaaccgaggtccagctttctaaaacattgagttcaatgacatcacttcatccattatttaagaaagcgagggtcttcaaatcaggaggatacaattgtatcaccaagtcaggcacacagtttcaaggtgactttgttctgatctgattgttaatgcaatctgtaaagaggcaactatgagttagggattgtttgatgccttgaatgtcgtatattcatattccatcatttttgtgggcacttgtatatacattgatgattaattgtattgctagataaaaaaaaaaaaaaaaaaaaaaaaaa

SEQ ID NO: 3438 - DNA, 2024 bp, Zea mays
  Clone ID: TF_ZmC131_2
tccacaaacactaattggcgatcctggaagaataaggcaaatcattacaaatcttgttggaaactctataaaattcacagagaagggtcatatctacttgacggttcatgtcgttgaagagattatgcattgtctggaggttgagacgggaactcagtatacaaataccttaagtggctacccagtggcgaacaggaagcgcagttgggaaaactttcgactttttagtagggaactgaactcatccgagatgccttttgcacccattgcatcagactcaataagcttgatgatatcagttgaagatacgggtgctggaatcccgttcgatgctcaatcccgtgtcttcacccctttcatgcaagtaggtccatccatcgctcgcatacacgggggcactggcattggattaagcatcagcaaatgcttggttggcctcatgaagggagagatcggatttgcaagtaaaccccaagttggttctactttcaccttcactgcagtgcttacgagagtccattccagtagaaatgagaataaatcatcagaatttaaagagatcaatgcattggtggtagatcatagaccggtccgtgccaaggttactaagtatcatttgcagagactgggagttcagactgaattgacaactgacctagatcagtatatttctaaaaataattgtggatcacagattgcaaagcttgtgctcattgacaaagaaacctggctgaaagaatcccactccatgcctcttttggttactaaattgaggaacaaagatcagccagactctacaaagttatttcttttggagaaccctaaaagttctgtcaagagcaattcacatatattcagggaatataacttgaatgtaattatgaagccacttcgtgcaagcatgcttcaggtttcgctacaaagagcattgggtgggatagataaactgcattgcaggaatggagtagtcggaaattcaacactgggcagccttcttcacaagaagcgaatcatagtggttgatgataatattgtaaatctcaaggttgctgcaggcgctctaaagaaatatggcgcggaagtaacttgtgctgacagtgggaaggaagcaatcacactgctgaaacctcctcacaattttgatgcttgtttcatggacatacagatgcctgaaatggatggatttgaagccacaaaaaggattagagtgatggaaagagatctaaatgagcaaatagaatgtggagaagccccaccagaatgcgtaggggttcggcagtggcgaactccaatattagccatgacagcagatgttatccaggcgacacatgaacaatgcttgaaatctgaaatggatggttatgtttccaagccattcgagggcgagcaattgtacagagaagtagctcgctttttcctaaatcaagaccaagttcagtaggtaggcttatatggagtgtaaaatagtggaggatatcggggttcacccatcgaggctgaaagaattctgtcagagatcccatgttcttgagagtggaaaacactttaggctggagatggaaccacccatgttcggttccttggtacatctgaccaaactgcaaaactaaatgtgcaatgtcttgaaatcaaggtgcatgtggagctatttactcgacaatctgaagtcaaggcgtgtgaaaaaaaagcccagctgcattcactaaccgcagatgtcctctgccactataatatagagtagggagagaaattttccttccccggaaggtaccggctgtacatattaggtattggttgtttgtgcaggcatttgttggcattttgttgtgcatcgtcttcggtctgtattgtttgggtcgaagctgtaaaatgtaaatggcattttcaaagatggaagttttgtttgacaaatacatcggtcgtcatccgaccgatgtatttgtcaaacaaaacttccatctttgaaaacgccatttacattttacagatggaagttttgtttgacaaatacatcggtcgtcatc

SEQ ID NO: 3439 - DNA, 1761 bp, Zea mays
  Clone ID: TF_ZmC779_1
gctccttcgcagagagtcccggggactgccgggctgcaggctgggtggcctccctgtcttggccggggcactgccagaggattaccgggggcctccggcccttcgcggtgcctcagggacttgccggctagcgccgagcaggcggggaagctgggtgggccagggctgggccgtgcaatctcctaccagttcgttggctggatggcggggcctctgactgtcgcctccggggggcgcggacgttctgcatctgcccttgtgcccccccctgtaagccctggagctgcggaccctggtcttgagccccccgttgggctccgtggcctgtccctgtccgcaaacagtgatatagaaggttctttcttttttaagccacaaatgcgggcttcccttctgtctcctggtgtttcaataatgaacaacacaaagttattcagtaccaagcttatgtgctatgacccgcctgacataccagatgaccgcaaattgtcctgaaataatttcccttagacaagacgaaattttacaaatacttctactactcaacaaccgaatggtgctagtgttaggagcacagctgaagaagaacatgataatgcaatggtccttgaactgaatagtcaagctgaacgggtttccagttcccgaggagatttggtatccgtttcaggtgctgctccatgcaaagttcctgaagaacaatcactccacaagaaatcaaaatgttctccaaccagcaacaaagcaaagatcctcctagttgaagataacaaggtcaacataatagtggcaaaatcaatgtcgcagcagctgggccatggaatagatatcgtaaataatgggatgcaagcaatccgtgcagtacagcagcatcaatatgatcttattctgatggatgttcacatgccagaaatggatggcctgcaagccactaaacttatccggtcttttgagaataccggctgttgggatgtttctgtaaagcctgaagataatccgatgataactgactcagctatttcatcagattctgcacatgcaaaaaagcaagggcagagggttcctataatcgcgatgacagcgaattcattcgcagagagtgccgaggaatgccttgctgcaggcatggattcctacatatctaagccggtgaacttccagaatataaacgagtgcctgcagcggtacttggtgtctcagtgactaaccgactattgtaaagtagaaaggtaatctgtgtaggccaggaaagttttgtggaatcacctacgagttcgtttgctgtaaatcgatgcgtaataaattctagcgtatcctgccttgtcgaccattttaccttcaccttctgggagacagagacatactgaatctgacctaaccccaccagtaagatcaagagctaactctgaactttaggatcccatttggttacgaggcatatccctgtatataattgtcacggaggttcttatcctttagcagttagtcttctatctgtatcgtaattgatgagcaacatcggttttatgatgatgtgatggagaagcaaaggtgtaatacagcaataagtgtacatgtattgctggaacatttatagatcaaacctgccatctttttcggtgcaaaatattctaataatccacgttcaaagatttcaaagttaaaaaaaaaaaaaaaaaaaaaaaaaaaaaaaaaaaaaaaaaaaaaaaaaaaaaaaaaaaaaaaaaaacaaaaagggggagaaaaaaaaaaaattctggg

SEQ ID NO: 3440 - DNA, 3903 bp, Zea mays
  Clone ID: TF_ZmC887_1
ccggccgggtatccgcgaggatccccccacaccttgcgacgctgcgttgtcacccacccataaggttggggccgccagcaggctcagacgttcctgttcttgattaaacgagagaaggatggcggcagggtctcagggaggtggcctagtctccgtttggatgatcttgagggaacaaattctgatcaaagtgattcagaccgccggacagttattaatgcccgcgagcagctagtcgtaggcgtaactattttaaggcagctgtcgccgcttggaactttcgagagcttcgcttcttttgataagctgtgcaacaggcgtcgttccgccccgctccctctccaccagctccaagcttcctttaggctcgctgttgctagtgctgccttgctgctagtgataggggtcccggggccctcaagttctgggtgggcggcgagcatatggtgggcactgggcgggggaataaggaggaagagaaagaggaggaggagcggcagtagatttgggccgcacaggcagggatggggggcaagtaccgcgcggcgaggacgaagaggtggtggagggggctggcagcggccgggtgggtgctaaccgcggtggtctgctccgcggtgatgcactggaccctgcgccgggacaccatggaccacgccgtatggatgctcagatgcaagtgatggacgggtttgaggcagccgcaggaacaaggcaaatggagttgaaagcgaacgaggaaaggaagaacaagttggctccgattgaaggcccgacaactgccgagtaccatctgcctgttctggcaatgacagccgatgttatccaggcaacttacgaagagtgcataaaatcgggaatggatggatacgtatctaaacccttcgacgaggagcagctataccaagcagtctccagattggtagtgggaacgacagattcggctgtttgatgttcaaaatacgatggaccggacttctcattcatcgatcgaagtgaagcatcaccatcttgcctctgtccagctgactctatcccttgacaatgggcctgacatggcctctcacaagactagatgaaaaaaaaagaagatgaaagtgccgtgagttagctacgtgtcacacatgacatgaagttgctgcggcagcccagaggagtgtaggtagatcaccctgtaactctcttgttctttgatgtttataggctgttgtgtcttctgacaattcattggaaataccacaactagttgcgctcgaaataaggatatagaagtaactggctatgatgtcacaaatgcttcagatgctatggttttgtatggaccttcaagtttggacgagcaagtgcctttcttgcatgttagcatgttggattttggagatccatttaggaagcatgaaatgagatgcaggtatagacaaaaacttcctatgccgtggtctgccataaccaatcctttgggcacatttgtcatatggatgcttcttgggtatagcattgctgctgcatattctcgatatgacaaagttactgaagattgcagaaagatggaagagctaaaaacgcaggcagaagctgctgatgttgcaaaatctcagttcctggcaactgtgtcacatgagatcagaacacctatgaatggcgtccttggaatgctggatatgcttttaggaacagatctaactatgacacagaaggattatgctcaaactgctcaaatgtgtggcagagcattgattacactgataaatgatgtccttgatcgagcaaagattgaggctggaaagttagagcttgaagcggtgccttttgacctgcgttctctcatggatgatgttgtttccttgttttcttcaaagtcacgggagaagtgcattgagcttgccgtatttgtatgtgacaatgttccgaaggttgttattggagatccttggaggtttcgacagatactgacaaatttggtcgggaatgcagtcaaattcacagaacgaggtcatgtatttgtgcgggtgtgtttggctgaaaactcaaatatggaagccaatcaggtcctacatggagccatgaatggcaaaggtggtagagttgagtcaacagctaatggtgccttcaatactttgagtgggtttgaagcagcagacagacgaaatagttggcaatattttaaactgctcctctctgataaggagtcgcttttggatgatcttgagggcgaaaactctaatcaaagtgattcagatcgtgtcacactagcaataagtattgaggacacaggtgtcgggataccactgcaagcacaagatcgtgtttttacaccgtttatgcaggctgacagttcaacttcaaggaattatggcggtactggcatcggtttaagcatcagcaagtgtctagctgaacttatgggtgggcagataagtttcaccagccatccttctgttggaagcacgttcactttctcagccacactgaagcactcatacaaagatatttcgggtgattcaagtaggagcttgacagaggcactaccaactgcttttaagggaatgaaggccatcttggtagatgggagacctgtacgtagtgctgttacaagatatcacctcaagaggttgggaatacttcttcaagttgtgaacaatatgaacgcagtagtaaaagctttcccaggacaaaatggagcagccggttctagggaaaaagcatcaattctttttattgagagtgacttctggaggcctgagacagatgttcagttattgaaccatctacgcgagcagaagaacggtcagttgtcggatgggcacaaggtagttcttttggtcacctctgaagccgacaaggacaaatatggatccatatttgatattgtgatgtgtaagcctataagggcaagcacaattgcttcatctattcaacaactgctcaaagtagagatagccgaaagaaaagataatcaaaaccggccgtcgtttcttcgaagcttgctggttgggaagaatatattggtcgtagacgataataaagtcaacctcagagttgctgcggctgcactcaagaagtatggtgctaatgttagctgtgttgaaagcggcaaggatgctatcagtctacttcaacccccgcatcgcttcgatgcatgttttatggatgttcagatgccagagatggacgggtttgaggcaaccggacaaataaggcaaatggagttgaaagcgaacgaggaaaggaagaacaagttggctccgatcgaaggcgcgacaactgccgagtaccatctgcctgttctggcaatgacagccgatgttatccaggcaacttacgaagagtgcataaaatcgggaatggatggatacgtatctaaacccttcgacgaggagcagctataccaagcagtctccagattggtagtgggaacgacagattcggctgtttgatgttcaaaatacgatggacctgacttctcattcatcgatcgaagtgaagcatcaccatcttgcctctgtccagctgactctatcccttgacaatgggcctgacatggcctctcacaagactagatgaaaaaaaaagaagatgaaagtgccgtgagttaggtacgtgtcacacatgacatgaagttgctgcggcagcccagaggagtgtaggtagatcaccctgtaactctcttgttctttgatgtttataggctgttgtgtcttctgacaattcattggaaataccacatctcgttgcaatcccctagtttcagaaaaaaaaaaaaaaaaaagcggccctgccttgttgtctcatccacatgatccagaaaactgtttcttccagcgccaagaaaaacacgggtaatggcctgtagacctacttcagtattggtatatgctaatggatactaatcagtctcttgac

SEQ ID NO: 3441 - DNA, 1025 bp, Zea mays
  Clone ID: TF_ZmC339_1
cattggctccctcgcgtccggccggggctgcagcctgactgtctgttttcagcacccgcaccacctgactgtctgttcgcagcacccggacctgtgtcaatggccgctgcagccgccgctccagcatctgtggcgccgtcctcgcccaaggccgccggcgacaacaggaagacggtggtgtccgtggacgcgtcggagctggagaagcacgtcctagcggtggacgacagctctgtggaccgtgccgtgatcgccaggatcctgcgtggctccaggtacaaggtgaccgccgtggagtcagcgacgcgcgcgctggagctgctcgcgctaggcctgctccccgacgtcagcatgatcatcaccgactactggatgcccgggatgactgggtacgagctgctcaaacgcgtcaaggagtcggcggcgctcagaggcatccccgtcgtcatcatgtcatcggagaacgtgtccacccgtatcacccgctgcctggaggagggcgccgagggcttcctcctcaagcccgtccgccccgccgacgtctcccgcctctgcagccggatccggtgactgcgtgtggtgctatgttaggagctaggatcctcaaccaaaaaaaaaaagattcctcttctttctttctttctctcctgcttggacatagatcttcaaacaaggagctaacatttggggggagactttttagctttagggatctcaacaagttgttcggaacgggggggatggagcacagcgttggctgttcttttctccattcctcttaataacatcaggtgtcaatgtcatgcacgatctccttcctccccatgaccatttcatccagtgacctcatatgatcctgctgccgaggatgtcagtgtagtaggttgtgcgaatccaatcggaccagagattgttattcctcttaaaaaagctgttgttgtgtaatgcgactagtacggtggtgtaattgcaaatcgatttattattattatatattacaaatataaattactagtagagaggcg

SEQ ID NO: 3442 - DNA, 2699 bp, Zea mays
  Clone ID: TF_ZmC4195_2
cactttttgcctttttcggaggccacgggtcaccgctaacctccatccatccatttgccgattcacctacacagcaggaacaaacgaggagccctccaaggatatgcgccccgccgcttatacattaaccaaagacttgcctccaatcaatcccaccactcgtgtctacctcttcgagttgcgaggatgcctgcgaatgaccaccatcccaacggcctgctccaggagtcagcccctggactccagcatgatgatatggaaaaccagcagcagcaagtctgctgggagcgcttcctcctaaaggacactctcaacgtcttgctcgtggagagtgatgcttcaaccaggcaggttgtcagtgccctgcttcgttgctgcatgtaccaagttatctctgccaaaaatggccagcaagcatggagttatcttgaagataagggaaacaacatagatcttgttttgactgaggtttttatgcccggtgtatctgggatttctctgctgaataggatcatgagacacagtgttttcaagaatattccagtgattatgatgtcttcgagtgatgatatgagtacagtctttaaatgtctgtcaaaaggtgctgttgactttttggtcaagcctatacgtaagaatgaacttaagaacctttggcagcatgtatggagacaacggtgtcacagctccagtggtagtggaagtgaaagtggcattcagacccagaagtgtgccaaatcaaaaggtgtcaatgaatccggtaacaacagtggtagcaacgatgacgaagcaggcatgggacttaatgcaagggatgacagtgataatggcagtggcactcaagcacagaacttgtggactaagcttgctgtggagatcgacagtccacaagctacgtctctggatcagttagccgatccacccaatagtacctgtgcgcaagtaatccactcaaagtcagagatatgtagcaacagatggctaccagataagagcaacagaaactgcaagaagccaaaaaacactaatgatgactttaagggaaaggacctggagataggtggccctgaaaatttatatatgggtcaccaatcttccccaaatgggagatccatcaaagcagcagaccatgaaaacaattcaaaggaatcaatgatggaaaatttagaggagccaactgttcgagctgctgacctaattggttcaatggccaaaaacatggatacccaacaggcagcaagagctgcagaagatacccctaatttctcttccaaagtgccagaagggaaaggtaagaataaccagaatgataagtatgttttgccatcacttgagctgagtttaaagaggtcgagatcatgtggagatggtgccaacaacaaaaatacagtcaaagacgacgaacaacggaattgtgtattaagacgatcaaatctgtcggcttttacaaggtaccacacatctgcggcttccaatcaaggtgggacaggattggtaggtagctgttcgccgcatgataacagctcggaggctgtgaaaacggattctacctacaacatgaagtcaaattcagatgctgccccgataaaacaaggctccaacggcagtagcaatgacaatgacatgggttccactacgaaggatgttgtgacaaaacccatgttgccctctgctattaaggctaatggatacacatcagcgttccatcctgtgcagcagtggatggttccagctaatgcaacagcagggaaaacgaaggctgatgaaaatacagccagaaatcactacgtccattttgagaatggtgggtcaggagccctgcaatgtggttcctccaacgtatttgatcccccacttgaaggccaagctaccaataactatggtggtgtgaaagccgggagcaactcaggcagcaacaaggggcagaacaatgggagtacggctgctgcaaatgctggactggcagaaacggagatacaggccatggacaaaagtggagttggaggtggcaatggcaatgggagtggcagtggcagtggcaatgacacatatgtcagacggcttgctgcgaacatgacaccgcgacaagcacagctaaagaaatatagagagaaaaagaaagaccggaactttgggaagaaggtgcggtaccagagcagaaagaggctagccgaccagcggccacgggttcgtggacagttcgtcaagcaagctgtgcaaaatcaggacggagctagagagagatgaccgacatcccccctcccctgtggctgtgctgctctctggcttcagctccctactgactccgactccacctctgctggcatgcatggttgccgctttggactcaaaacacttgacagttagacgtgcggttgatgattcttccttctctcgtggtgtggactgatatggtcaacaacacagcctccttccttttcatcattggtttcttcacatctagaatctactgcctgaccgggaaagaataaacaaggaacttcttcttctatacatgtgtatgtatgtatgcattcctaagcatgtaatgtagaagaataagtgcgtggcttgactctagatggactttaattttagacagagtcttgctcgctctcctacatcatctagtgtaactaaagtgttgtcatgtatggtcttggatcactgtctatcaatatattatatcgtggcgttcc

SEQ ID NO: 3443 - DNA, 901 bp, Zea mays
  Clone ID: TF_ZmC887_2
gtgcaagcctataagggcaagcatgattgcttcatctattcagcaactgctcaaagtagagatgcctgaaagaagagataatcagaatcggccatcatttcttcgcagcctgctggttgggaagaatatattggtagtagatgataataaagtcaatcttagagtcgctgcagctgcactcaaaaagtacggtgctaatgttagctgtgttgagagtggcaaagatgctatcagtctacttcaacccccacattgctttgacgcatgttttatggatgttcagatgccagagatggatgggtttgaggcaacaagacaaataaggcaaacagagatgagagttaacgaggaaaggaagaataagttggtgttgattgaaggctcaacatttgttgagtaccatttgcctgttttggcgatgacagccgatgttatccaggcaacttacgagaagtgtataaaatcgggaatggatggatacgtgtctaaacccttcgacgaggagcagctataccaagcagtctccagattaatagtgggaacgacagattcgactgtttaatatttagatggctatgaatctgatttctcattcatcgaattgaagcacaccaccatgttgcttctgtccaagcttgactctaacccttgacaattgtctgacctggcctctcgcagcactagatgaaaaggatgaaagtgccacgagttggctatgtatcagcaccacagatgaagttgcctcaccccggagtgtaggttggtagatcactctcttctttgatgtttataggttgttgtatatcttctgacaattcattggaaaccacatctcgttgcgacattggaggacatcttcaatgctggtaaatttgttataggaatatcctttaatgctggt

SEQ ID NO: 3444 - DNA, 3011 bp, Zea mays
  Clone ID: TF_ZmC4195_1
cactttttgcctttttcggaggccacgggtcaccgctaacctccatccatccatttgccgattcacctacacagcaggaacaaacgaggagccctccaaggatatgcgccccgccgcttatacattaaccaaagacttgcctccaatcaatcccaccactcgtgtctacctcttcgagttgcgaggatgcctgcgaatgaccaccatcccaacggcctgctccaggagtcagcccctggactccagcatgatgatatggaaaaccagcagcagcaagtctgctgggagcgcttcctcctaaaggacactctcaacgtcttgcttgtggagagtgatgattcaaccaggcaggtcgtcagtgccctgcttcgttgctgcatgtaccaagttatctctgccgaaaatggccagcaagcatgggcttatcttgaagataagagaaacaacatagatcttgttttgactgaggtttttatgcccggtgtatctggtatttctctgctgagtagaatcatgagccacaatatttgcaagaacattccagtgattatgatgtcttcgagtgatgctatgagtacagtctttaaatgtttgtcaaaaggtgctgttgactttttagtcaagcctatacgtaagaatgaacttaagaaccagtggcagcataattgaagacaacatcgtcacattctctcttgcgtgttcgagaaaaaaaaaatgttttcttatttggaacacagtcttgaggtagtggaagaaaaagtggcaatcagacgatgcagttctctcttaattatattaatagctaaaaatgttctcacagtggaagcccggtggaagaagctagtaagagacccaatgcaagtaacgagtgtgagagtattaataataatcaacagacgaactcattatgaaattacgtagtgcagatcgactgtccacaagctatatctctggaccagttatccgattcagccactaggaccggtgcaccagtaatccactcaaagtcagagatatgtagccacagatggctaccaggtagcagcaacagaaactgcaagaagcaaaaatacactaatgatgactttaagggaaaagacttggagatagatggtcctggaaatctatatatggatcaccaatcttccccaaatgagagacccatcaaagcagcagatcatgaaaacaattccaaggagtcaatgatgggaaatttaggggatgcaactgttcgagctgctgacctaattggttcaatggccaaaaacatggatgcccaacaggcagcaagagctgcagatacccctaatttctcttctgaagtgccagaagggaaaggtaagaatgatgactttaagggaaaggacttggagataggtggccctagaaatttatatatggatcaccaatcttccccaaatgagagacccatcaaagcagcagatcatgaaaacaactccaaggagtcaatgatagaaaatttagaggagccaactgttcgagctgctgacctaattggttcaatggccaaaaacatggatacccaacaggcagcaagagctgcagaagatacccctaatttctcttccaaagtgccagaagggaaaggtaagaatgaccagcatgataattatgttttgccatcacttgagctgagtttgaagaggtcgagatcatgtggagatggtgccaacgatacagtcaatgacgatgaacagcggaatagtgcattaaggcgatcgaatctctcggcttttacaaggtaccatacatctgcggcttccaatcaaggtgggacaggattggtaggtagctgttcgccgcatgataacagctcggaggctgtgaaaacggattctacttacaacatgaagtcaaattcagatgctgccgcaataaaacaaggctccaacggcagtagcaataacaatgacatgggttccactacaaaggatgttgtgacaaaacccagcacaaataacgagagggtgatgttgccctctgctattaaggctaatggatacacgtcaacattccatcctgtgcagcagtggatggttccagataatgcgacagcagggaaagcgaaggctgatgaagtggccaacaatgcaggcagaaatagtcatcctggtgacgtgcagagcaacctgacgcaacaacatcgtccaacccttcattacgtccattttgagaatagtggatcaggtgccctgcaatgtggttcctccaatgtatttgatcccccacttgaaggccaggctaccaataactatggtgtgaaagccgggagcaactcaggcagcaacaaggggcagaataatgggagtacagctggtgcgagcacggctgctgcaaatgctggacggacagatacagagatacgggctatcgataaaagtggacctggaggtggcagtgggagtggcaatgacacatatgtcagacggcttgctgcgagcatgacaccacgacaagaacagctaaagaaatatagagagaaaaagaaagatcggaactttgggaaaaaggtgcggtaccagagcagaaagaggctagccgaccagcggccaagggttcgtggacagttcgtgaagcaagctgtgcaaaatcaagagggagatggagagagatgacccccccccccctctggcttcagctcatggttgttagacgtggcggttgatgattcttccttctctggtgtgatctgatatgatcgacaacacaccatccttccttttcttcattggtttcttcacatctagaatttactgcctgaccgggaaaaaataagctaggaacttctatacatgtgtatgcatttctaatcatgtagaagaataagtgtgtcttgactctagataattttaggtagagtcatgctcgctctcctacattatgtgatgtaactgaagtgttgttgtgttgtcatgtatggtcttggatcactttctgtcaatatattactagcccacaactactattaatttgatgagatgtatataatt

SEQ ID NO: 3445 - DNA, 935 bp, Zea mays
  Clone ID: TF_ZmC131_3
caggcgctctgaagaaatatggcgcagaagtaacttgtgctgatagcgggaagaaagcaatcacgcaactgaaacctcctcacagttttgatgcttgtttcatggacatacagatgcctgaaatggatggatttgaagccacaaaaaggattagagtgatggaaagagatctaaatgagcaaatagaacgtggagaagccccaccggaatgcgcagggctccggcagtggcgaactccaatattagccatgacagcagatgttatccaggcgacgcacgaacagtgcttaaaatctgaaatggacggttatgtatccaagccattcgagggcgagcaattgtacagagaagtagctcgctttttccaaaatcaagaccaagttcagtaggtaggcttatatggaggagtgtaaagtagtggaggatatcgccaacggttcacccgtcgaggccgaaagaattttgtcaaagatctcatcttcttgaaagtgggcatcaattcgcaaagttagagggcccctattaaaacactagaaatgctgggatgtggccgccagttaggtggaaacgatttaggctggagatggaaccacccatgttcggatgcttggtacatctgaccaatctgcaaagctaaatgcgcaatgtcttgaaatcaacatgcacgtgcagctattcattcgacgatttgctgaggtcaaggcgtgtgaaaaaaaatcagctgcattcactaactgcaggtgccctctgccactatataatatataagactagggggagaagttttccttcccccggaaggcacggctgtacatattatattagggattggttggttgtttgtgcaggcatttttgtatgcatcatattcggcctgtatgggtcgaagctgtaaagtgtaaatgacacattcaaagatggaagttttgtttgac

SEQ ID NO: 3446 - DNA, 752 bp, Zea mays
  unsure (1)..(752): unsure at all n locations
  Clone ID: TF_ZmC311956_1
tttggnaccacaaacaccagcctaccctgtagaatatatgggcactcaaatagtaagggaacaaacgagtggtagcctcactgccattgttgtggacgaaaatctatgccatgccagggctgcaagctgcatgcttgccaacctccagtgtaaagtgattgtgtatgcgagtcctgttgatgcgctcaagtttcttaaggatcaccaaagagatactgattttgcgttagtggaagtcaacatgaaagagatgcatggttttcagttccttgacatgtccaggaagttgcacaaaagccttcaagtgatcatgatgtcagctgatacgacatggcccacgatgaagagaagtgtcgagcttggtgcacgtttcttgattaaaaagcctcttgatgcaaatacgatgaataacctgtggcagcatcttgacctaaaatttcaacggaccgacaagatcaaggccttattcccaggttggagctactgtgacatgttttctttttccttttgaaaaacgatgtggcacttgttgaactccgtagacaacagcaaaaggtgtacatcgacttcagttaccgtttcaatcaaatgtttttttttgtcaaatcaccattagtattgtagtccgaaaaaacgcatattactcgctaccttgcatgtgaatcatataggtattgaagggaaaacggggaatgcatttgaggaagggaccaagcagaggggaactcacttgatgtggactccattcctgc

SEQ ID NO: 3447 - DNA, 833 bp, Zea mays
  unsure (1)..(833): unsure at all n locations
  Clone ID: TF_LIB5117-009-Q1-PF1-H11
gccttcaatggatggcctacaagccactaaattgatccgttgctttgaaaatactggctgttgggatgcttctgtaaagcctgaagacaatgagatgatagctaactcagctatttcatctgattgtgtgcaagacaagaaagggaagagagtacctataattgcgatgacagcaaattcattcgcggagagtgctgatgagtgccttgctgcaggcatggattcctacatatctaagccaatgaacttccaaaaaacaaaagagtgcctgcagcgctatttgttgtctcagtaactaaccaattgctgtaaagtgtaggaaggtgatcctggagctgctgcataaagatttggccctgctttttggcgctgcttattcctgctccctgcgagtgctggtgtcactagcagcagtgaaaggggcgtgctgaaggggacctgacaaatgccatggataatgctcctcccctttcttcaggtttggggcaaggataatgctcctcccctttcttcaggtttggggcaaggggtttttcctgggaagtgctggtgcaggagagcagttgagcacaagggctgccgtgagttagaggggccggtgcaccgtactaccaccgaacaggcttgtgggcgacggcgcggtcgctgtcacgcgttgtgctcgatgcccggttcgtcatctcgacggcgaccggtcgtgggaaagagctggtacagatcagcacagncattcctaccggncggcggacggcgaggttcagctgcagtatggcgccaccatcttcttcaggtacaaaaggngggcacaagttgttgatgatgatggcataatg

SEQ ID NO: 3448 - DNA, 632 bp, Zea mays
  unsure (1)..(632): unsure at all n locations
  Clone ID: TF_ZmC353097_2
gggcgctgctgaggtcgcccgtcggcggcgtggagctggacgaggcgaggactggcnccgaggcggtacggcgcgttcgggatggcggtgccgccggcgcctacgacctcatcatcaccgacgggaagatgcccgtcatggacggacgcgaggcgacgcggcagattagggccatgggcgtcacgacgccgatcgtcgggctgtccagcgacaccttcccgtcagacgtcgacgcgttcctcaaggccggggccgacgacttcacgcccaagccactgtccaaggagaagctcgtccgtattcttgccaaattcaatctcgcttagctctctgtttgctgtccaaggagaagctcatccgtattttcttgccaaattggcaaaatacaattcttgcttagctcttcgtttgggtgcaattttttttgaggggataaataaaggctctcgaagaagtattttgctctatgtttcggtgcaaatctcaatgagtggataaataaagggtcttgaaaaatacgggtggcgccttcctcccctatggaccctgggccttatatcagctagtgttatccttctcgcatataattcacacccgctctgtaatctgtacgttggttggtattggcatcc

SEQ ID NO: 3449 - DNA, 334 bp, Zea mays
  Clone ID: TF_LIB3205-080-P1-N1-G10
atgcgggaaatataaagtgctgtgtgaacatattagattgagaaccaggcctagtagaaaagttaagaggaactgaatgagtagcatgtagttcattagctcagaaggtgtttttgggagttcagtactatccataaaacatgggagatgaatcgaatgaaatggtgtatgcctgagggttgctcatacgagcattatgatgcatgagacgcctacgacaggttcgtttgttatgatcaaactccgtttaaccatgaaaactacaaacagagaaggtttaaagaaatgagggaaatgggggcgaaattatgtgaacgaacagataaaaaggtaa

SEQ ID NO: 3450 - DNA, 1015 bp, Zea mays
  Clone ID: TF_ZmC9712_3
atagaatgcaacttccattacttataaaaattctgttgctgtgccaccaacttccattacctgtaataaactgggatcaagggcgcgtgaatgaacacacctctgtttgtcgcatcaatcgcaggttccaccagctgcctgaattcgaccagctaaagaagagctgccgcaaacgcctcgcaggccacaacgagcgccggaggaggccgccgcctggaccccttgcgtcacgatacggccgtcacgctgcgtcgctcggcggtaaccaaaagctggtttttaccctgtgatgtcgtctcggcgaccaaagttcccgtcttttttttgtaaccgctaatgttcatgtgcttggtccagaagagcccggcaggctcagaagcttcatgctggatttctcgtacccgagggtctcaagcgccatgaggggtgggtttccggcggtgaggcccggtggtgaaagggtgcctggcggtatccagtggcaagcgggcttggatcctcgtcaccaccaaggcgcggtcgcgggatacggcgcccactatgggagcgagggtggtagctcgtcgtcggcgaggccgccggtgttccctggcccggagctgcccccaggtggatgccttgcaggagtccccgcggactccagctgtgctctctctcttctgtcaactcagccatgggatgctgcccacagccacagccacagccacgctgcgccaacagcgggtttcgacggcggcagccctgtggcgccctccctcatggcggcgagtagctacatcgcgccgagcccctggaccgagaccgactcctggggccacgaaggcgggcggagcgtgcctcagctgccacctgacgacgtccccctcggcgaggtgcactccggctcgagcagccaccacggccagttctcaggtgagctcgagctcgccctgcagggaaacaggccagcgccagggtcggcggcaccgccagcgccgcgcaataatcagggctccgcgggcacgttcgaccaggc

SEQ ID NO: 3451 - DNA, 1063 bp, Zea mays
  Clone ID: TF_ZmC14746_1
tcgacgccgacaagcgcagctgcagaaagcgtctggacgggcacaatcgccgccgcaggaagccacagccagacaccatggcttctgctagctttatcgcaagccagcaaggcacgcgattctcaccatttgcgcatccaagactggaggcgagctggccgccgggggtgatgaaaaccgaggagagtccatatcacatcactcaccaaatccctctgggctccagcagcagcagcaggcagcagcatttcgtggctctgggagccgccacgcctgcctacgccaaggaaggccggcgcttccctttcctgcaggagggcgagataagcttcgccaccggcgtggtgctggagccgccggcggcggctccagcgtgccagccgctcctcaggacgggagcaccatccgagagcagcggcgccggcggcagtaagatgttctccgatcaggggctggctcgcgtgctcgactcggactgtgctctctctcttctgtcagcgccggccaactcctccggcatcgacgtcagcaggatggtccgcccgactgaacacgtccccatggcccagcagcccgtggtcccgggcctgcagttcggcagcgcgtcgtggttcccgcgcccccaggcttccacgggcggctccttcgtcccctcctgccccgccgcggtggagggcgagcagcagctgaacgccgtgctgggccccaacgacagcgaggtgagcatgaactacggcgggatgttccacgtcggcggcggcagcggcggcggcgagggctcctcggacggcggcacctcgtcgtcgatgcccttctcgtggcagtagtcgtcgtcacttgtcagcagccgctgcgttctctcatctttcgcgcttcagacgatctggtagggagatactggctttagtgatcactgatcagcattgatttctgttctttttcctgcattcgctttgttgaatcggctctgctcgccagcattcgtgtggacattttttgaacataattctgtgttcgtttccctccgtcgcgaactagaccaacgcgtccgcccacgcgtccg

SEQ ID NO: 3452 - DNA, 578 bp, Zea mays
  Clone ID: TF_cC-zmle189110e02d1
gacccacccgtgcggtatttgccaagttacttttttttggcatctttaatgatgttaggtagctttgaaaatgtgaccagctgagggcagggaccagccactcaagttgtagagcgaagtggacttgtgctagtctatatgatgctcaattattttgcttggctcagactctcatgatatttatgttatttaatcttttctaattaaggtacacaggaacgctagcatgaaatgaatagtgaagaaaaattggcaattccttttgtttctggcactagctgtaatggtgtaggactgcctaagtggagtgttgaactgttgatgcaacatcttgagaaggagaaattgtacacaagcttataactaacatttacactttgatctgttgttgacataatgaagctccatttccctcttttctttaatccttctctggttgtagttttcatggtttagcggagttttgatcagaacaaacgaagctgtcgtaggcgtttgatgcatcataatgcacggaggaggaaacctcaggcagacacaatttcattcaattcatcgacaatgttttatgatacaag

SEQ ID NO: 3453 - DNA, 955 bp, Zea mays
  Clone ID: TF_ZmC200243_1
cggacgcgtgggtgccgccctcgcccgccttcaacaccggcagccgcaccacaaattcctccccacgcgttgccttctccccaccaacggcgcccttccccaacggctgcgaacgctaacgcgcttccccaatcgttgctccttcgaccaggtgcttcggtagaaggacgtcgcctagagccatcccatctctgagcatcgtggtctccccgatgtggatggggaaagaatataggttgcccaatatctacaaagctgaacacaccctatcatctgcaccagcaagcagcctagcagcagtcctcacccatcagcaattcagcatgcatctggaagactacgtgtgtctacgtctgctactgctgccgaggtgtctactctcttaggatcaggggaaaatgattgaaagaatggaaggatctatgaattgtcaatgtcctcagaagaatggataactcatgtgtttcagtgtggacctcatccttttcgattccaccagctacttgaatttgaccaactaaaggagagctaccacagacgtctcataggccacaatgaacgtcgaaggaggccgcctcctggacctcttgtatcacactacggtcgtcttgctgcgttgtttggtggtgacaaaagctaattttaccttatgtcattgaatatcttcatctgatgcatactatgaacatcatgaagtcactaccaggggtgagaatgttcctgccccatttatgatatttgagtccactggatccctagatattctgagagagggatgcttataaaggatttgcgggcttcatacgactttttttgtttttggatgcttatagggaacgacatgacatagaaggcatgtgtaaatttatctcatgcctatattatttataatgatttcctttggcattatatcagcttatttgattgttgttccttttaactgcgaatgctactc

SEQ ID NO: 3454 - DNA, 144 bp, Zea mays
  Clone ID: TF_ZM5059.C4.o2.fg
atgatctaccgggccgacctgagcaagtgtcgcgactaccgccgccgccacaaggtctgcgaggcgcactccaagacgctcgtcgtcgtcgtcgccggccgcgagatgcgcttctgccagcagtgcagcagccttttcatatga

SEQ ID NO: 3455 - DNA, 169 bp, Zea mays
  unsure (1)..(169): unsure at all n locations
  Clone ID: TF_LIB3069-037-Q1-K1-C4
tccacgcgtccggcttcttgctgcaggtttcatctgctcggggagttcgataaggtgaagcggagctgcaggaagcgcctcgatggacacaaccgtcgncgtcggaagccgcagccggaccctctaaaccccgccggcttgtttggcaatcaccacggagtgacaagat

SEQ ID NO: 3456 - DNA, 1018 bp, Zea mays
  Clone ID: TF_ZmC18262_3
gcggcgtccggcgacggctcggacgactccggggcggccaacaacaacggcgcgctgccgctgccgctgccgccgccgcacggggtggaggacaacaacagtcccgcggagctggcgggcgcgggtggcacctcccgggcggtggcgaggagggtcgcggcggccggcgcctccccggcggcggcggcgaggaggggcgccgccttgaacgccgcggcggccggcggcgccgggccgagctgccaggtcgagcggtgcagcgccgacatgggcgtggagaagcggtacaaccggaggcacaaggtgtgcgacgcgcaccgcaaggcgtccgtcgtcctcctggccggcctccgccagcgcttctgccagcaatgcagccggttccacgagctgtcgcacttcgacgacaccaagcgcagctgccgcctgcgcctggcggggcacaacgagcggcgccggaggaaccccgcggaggcgcaggaccagcacggcgggcggggcgacccggggagccaccacctccagatcagataaaaacctactacgtcagcatgctctctctcttctgtcatgcaggacgcacgcacctagcgtcgtcaccgatccatagtccgatatgtgtctcaagtgttgtgtgtgcgcgctctcgccgcctacccctgtcctgcagtgttgcgtagtatatggttctacgacctacacgtactgctgctactactgcgtgctaactttaatctgatggcagtccacagctagctagcacatcacctcctgtaagtaatgtgcttatctatatgtgcaccgaccggaaccggaggcgtgcgtacgctgatctgccacgaagcctactagtagttaaatgtaacgtaacctgcaggcaattaagcagggcgctgctatatatagcgtaattaattgtgcgtatgggtatgggtggttcgattatcggatgtgtaatccctgtacgtggccgggcccgtgccaaacgtacggtgacctgtgcaggctctgtgtgtcg

SEQ ID NO: 3457 - DNA, 487 bp, Zea mays
  Clone ID: TF_ZmC182445_1
gcccgggccacgcgcagcaggcggcgccggcgtgctccgtgcagggctgcgacgccgacctgtcccagtgccgcgactaccaccgccgccacaaggtctgcgtggcgcactccaaggcgcccttcgtcaccgtcgccggccagcagcagcgcttctgccagcagtgcagcaggtttcatctgctcgaggagttcgacgaggtgaagcgaagctgcaggaagcgcctcgacggacacaaccggcgccgccgcaagccgcagccggatcctctcaaccctgctgccggcttgtttggcaatcaccaccatggaggagtgacaaggttcacatcgtacccacaccgcttcaccaaatccatcgcaaagcccgaatgggcggtcgtcaagacggagaccgacgcgttccaagaccagtactaccctgccgtccacctcaacggcgccggcgccggcgccctctttcacgacaaggaccggaagcactttcc

SEQ ID NO: 3458 - DNA, 1188 bp, Zea mays
  Clone ID: TF_ZmC1701_1
gtcaggttgaaggctgcaaggttgatctctcttctgctaaagagtaccatcggaagcacagagtctgtgaacctcattctaaggctcccaaggtggttgttgctggtctggagcggcgcttttgtcaacagtgtagccggttccatggattagctgagtttgaccagaagaagaaaagctgccgcaggcgcctcaatgatcacaatgcccgcagacggaaaccacaacctgaagcactttcttttgggtcatcaaggctgtcggcaatgttctatgacacaagacaacacacaagccttctgtttggtcaaggtccttatggtcaaatgagaagttgtgcaagttcttcatgggataacccaggaggcggcttcaaatttgcagagacaaaaggtccctggttaagagctggtggtgttgatgggttgcatcaatcaagtcagcaggtgtggaacaactttatgccgcatggtgtccatcaagattttgatgggttcacagctttcaaaggaaccaatgcaaaggtccttcatcaaggcgttgaagcttctgcggtcgcctccaaccagaacggagccccacaaccggaccttcatcgtgctctctctcttctgtcaaacagctgggctggtgccggtaccgaccagcacccgacggcccagctgcgccaccacgctgccctgagcagcagcctcgccgccagctccgtctccgtggcgcaggcctcgccagcagggctgtggcaggacggcggcggcggcgcggccctgagccaccacgactatgcccacgcacaggcacggttccaggctatcgacgcgctgggcggcgccggcgccgccgccgccgttgcagcgggtcaggagcttctccagctcccgcgtccgccgtccccgtacgacgacggctcctcgtcccgctacgacctgatgcgctgatccttcttccctttgggcttctggtggagcgcggggtttcgatttttgaacgaactctggatggaactcggagttttgaacgaactgctgtatgcttgctatcaaggtctgctggctcgggctcggacgctcgtgggatcgccagcagctccgtgtgcttgaataaatccacagttttttttgtgtgacgctagctatttatttatttcacttgtgtaatgtgatgcgaggaaaaaaaaaaaaaaaaaaa

SEQ ID NO: 3459 - DNA, 1134 bp, Zea mays
  Clone ID: TF_ZmC18238_6
aactggcgaagaaaacatctgctggtggggtttttcttctccgcgggttgggcccagcaagcctacgccggcagctcctcttaccctcgtcaaactccgcgagtgggtgaaatctactacactgctggcagaagcgctgcgcctggttggcgacgacggccctgatggtcttgctgtgggtctcgcagaccttgtgcctcctgtggtaatccttggcgccggtcagatccgctcggcagtcatccacctggcacatcgggtagcccgcgcctccgttggcagccccgccaccgtcaccgcccgcgctgcccggcgatcctgaccgcacccgcttgctcggcctgaccaccgggtcctgccccgatgcaggcggggacggcgacagcgacgccgcgggaggcgtcgggctggcgtccatcggggtcgtggagtcttcccgcaggccgagctggaggttcagcgcgccgggccccctggcgctgcgcctcagcagccggctggggctggccaccggcgaggcggagcgcatcggaggacggcctggcggtgagcgcgcggctgtcccagtcccacagcctggggttccagttcccagcgccggcctccgcggcgccggccgcgggccacgggtggccgcgcttcttcgcggcggcggcggcgtggggaggcatcggctggatctggtgaaggaagagcggaggggccacctgcggccccacctccctctgcatcgctcctcaaggtctccgggcctcccaactcagccgcggcaaccgatcagggatctctcacgcaagtcttcggcgccagtccacgtcacctcgccgcctccccagccgtccagaaatagggccagagcagaaaatatcccttccctgcccacctgcgtagtgctggaatcggcggaggatgaagaagtgggagtgggagagagagaggaatgtgctgcccgccctgatggtgtggtgcggcgctgggaggaaggcgtgtgtagagagactagagagagaggcagcggggaatcgagcggagaggaggcagcagcgcaaagcgggcgaggaagaggacctcccgcgtgggtaagcgtcctggcgcggcgacggacgggggcctggtggcgcctcgtgccgaatt

SEQ ID NO: 3460 - DNA, 1196 bp, Zea mays
  Clone ID: TF_ZmC735_1
tccgcccacgcgtccgcccacgcgtccggtcaacggtctcgagctacgcttctgccagcagtgcagcaggttccacaacctggccgaatttgaccagcaaaagaaaagctgtcgcaagcgtctagcaggccacaacgaacgccggagacggccacctcctggaccccttgcgtcacgatatggccgtctcgctgcaccgctcggtgaagagcccggcggcaggttcagaagcttcatgctggatttctcatacccaagggttccaagcgccatgagggatgggtttccagcggttcgacctggtggtgaaagggtgcctggcagcaatatccagtggcaagcagcgagcctagatcctcctccccctcaccatcagagcgcggcagcaggatacggtgcccactcgtacgggagcccgggtagctcgtcgtcgtcgaggccaccggtgttccctgctggcccggagctccccccaggcggtggatgtctcgcaggagtccccacggactctagctgtgctctctctcttctgtcaactcagccatgggacgctgctggccacagcgccggccacggccacggccacgccgcgtcactgcccgcaacagcaggcttcgacggcaaccccgtggccatggcgagtagctacatcgcgccgccaagcccctggaccgactcccgggcccacgaaggcgggcggcggaacgtgcctcaactgccacccgacgtccccctcggcgacgtgcactctggcccaggcacccatcacggccagttctcaggtgagctcgagcttgccctgcagggaaacaggccagccccggcgccgcgcaatggccagggctccgcgggcgcgttcgaccaggccggcagcacgacggagtggtcgctctaggaggccaaataaaagcgcggcacatcgtcgtagccgcacagcgagatggagcttgaagcctggctccgctagctacctgcatgcgctgtttgcttgcctagaggctagagcatccagtatgataataagcgaggaactagtgcagtgccggccaggagactgatttcttttgcgcttgtccatgaactcgtctgttgcgtctatgtacacctccatggtttgaactcgtcggggacttcgctcgatgtgttattaatctcatgctcatccttccgctaaaaaaaaaaaaaaaaaaccgatt

SEQ ID NO: 3461 - DNA, 1309 bp, Zea mays
  Clone ID: TF_ZmC18262_1
agccggttccacgagctgtcgcacttcgacgacaccaagcgcagctgccgcctgcgcctggcggggcacaacgagcggcgccggaggaacccggcggaggcgcaggaccagcacggcgggcggggcgccccggggccccgccgcccggcgcgccgataaaaacctactacgtcagcatgctctctctcttctgtcatgcaggacgcacgcacctagcgtcgtcaccgatccatagtccgatatgtgtctcaagtgttgtgtgtgcgcgctctcgccgcctacccctgtcctgcagtgttgcgtagtatatggttctacgacctacacgtactgctgctgctgcgtgctaactttagtttgatggcagtccacagctagctagtactgtgcttatctctatgtgcaccgaccggaaccggaggcgtgcgtacctacgctgatctgccacgaagcctactagtagttaaatgcaacgtaacctgcaggcaattaagcagggcgctgctatatatagcgtaattaattgtgcgtatgggtatggtggttcgattatcggatgtgtaatccctgtacgtggccgggcccgtgccaaacgtacggtgacctgtgcaggctctgtgtgtcgatgatgttgtctgccgcctgcgcctggcggggcacaacgagcggcgccggaggaacccggcggaggcgcaggaccagcacggcgggcggggcgacccggggagccaccacctccagatcagataaaaacctactacgtcagcatgctctctctcttctgtcatgcaggacgcacgcacctagcgtcgtcaccgatccatagtccgatatgtgtctcaagtgttgtgtgtgcgcgctctcgccgcctacccctgtcctgcagtgttgcgtagtatatggttctacgacctacacgtactgctgctactactgcgtgctaactttaatctgatggcagtccacagctagctagcacatcacctcctgtaagtaatgtgcttatctatatgtgcaccgaccggaaccggaggcgtgcgtacgctgatctgccacgaagcctactagtagttaaatgtaacgtaacctgcaggcaattaagcagggcgctgctatatatagcgtaattaattgtgcgtatgggtatggtggttcgattatcggatgtgtaatccctgtacgtggccgggcccgtgccaaacgtacggtgacctgtgcaggctctgtgtgtcgatgatgttgtactctgataatgatataatccattgtggtaatgtatgctatttaataaaaaaaaaaaaaaaaaaaa

SEQ ID NO: 3462 - DNA, 1614 bp, Zea mays
  unsure (1)..(1614): unsure at all n locations
  Clone ID: TF_ZmC117363_1
caagactgcagcctgattcgacgattccagaagtgcataacatgcacatatttttgcccaaaaaaaaacaaacacatatatacaaggaaaacgaagaaaaaaattgaacgggcgcatttgaatttaacggctaaacactctgcacagcagctaccacttcctttcagatgccagcactagtcgtcgtgtcacttgtatacatctctgacggaccacaacctgagtctgcaagtgcacaggtaccccgaattcccagccatcagacactagagtatcgatcgagaacacaacaggagcacataaaaacaggacaacaaaacaatcctactgccaagagaatggcagtgcctgtgatggatcctcaaacatagcatcaggaacaaacacatggtggccagcactggccgcgaatgcagcagtggccacagctgccgttgcagcctgcgacacggcagcggcagtggtcgaagaggcagtaacctggggttggccaacggcggggacgccagcagttgaggggcgacgcagcgacgatgacagaagagagagagcacactcggggcccagtgtgccggagagagcgttgtcgcgtgtgctgcttccagtgtggctgctgctgccttcagcgtgatggccagggcgggctgcatggaggtggtggagcacactgctaccgccaccctgtccctgtgggtgagggaactcgtctggtggtgttcttgagaacgatatggagaagggctgctgacggcccaccaagtgcacggcgtccgaattctggccaactgttggaattgtttgtgggnagaactcaaactgattcacttggnggtatggaaagaaaccccctagatttgtcagatcatgctgtggctttcttcgacgcctattatggccatccagacgcttccggcaacttcttttttcctcgtcaaactcggacagcatgtgaaaccggctgcattgctggcagaagcgccgctcctgtccgccgacgaccaccaccggcgccttggagtgtgcctcacagaccttatgaagccggtggtactcgcggcaccggctgagatcagagcggcagccgtcgacggagcacgcctccgcgccggcacctcccacggccgcgcgggacctcctcccggctcccggcgccgccccagtcggccgcgagctctgggcaagacccgcggcgaaatcctggagccgcacctcggcgtcggcggcggaggaggacgggcctgcgaaggacagcatggtcggaccggggtccgtcgccgccgcgccccacgacggagacccggacgccgctgcccagtccatgccgccgccggcgaagaaggaaagaaacgcctccgcctgctcccaaacaagaaaccttcaagacggcgaggacaagttcaggaaaaaattcctctgcaagaaacaaacaaatagccaagagaggagcatccacgcaagaaggcccgcaggatgtgcaataaagctaccgcaagagaagatatacgtatggcgcgaagcagaaggtggctattcaagtgcaagcaaaacagaaggggatgaggcagactgcaggcaggcaggcaggaggagctcggtacatacaatcggagaaag

SEQ ID NO: 3463 - DNA, 416 bp, Zea mays
  Clone ID: TF_jC-zmXLIB3527P102Dc10d1
ggtgaaccgaggattgggggaggtcgatttgctcagaagagctaacaaaatgcggccggtatcgccgtatgaggacaggcgactggtgggggcacttatactctgatctccaatgatgacatcacccacctcttgtgtgtgcggggggggcggacttctgcttacattatacccagaaaaagtgcctcggcgagcacttcttcttgttgccagattgacgggagccgagctcctgttagtgtggccagcgaccaccatgctatgcacaacgggtgcagaccactgacgaccagaactgcgctctacacaccttgtgcctagtatgggatctgccggcaccgctaaaagcagcacgttcttcacgaatttgatgagagggagaggagctgccaatcacacctggcctagctattgga

SEQ ID NO: 3464 - DNA, 2429 bp, Zea mays
  Clone ID: TF_ZmC749_1
gttctgtcagcagtgtagcaggtttcagcttcttcaagaatttgatgaagggaagaagagctgccgctcgcgtctagcacaacataatggaaggagaaggaaagttcaaccacaagctgttgtgaatgggaattccatgagtgaaaatcaatctctaagtagcaccttaatccttctgttaaaacaactttccaggctagagtgtacagacatagtcattctaaatgtgtgcttgtatgggtggcagctggtagctcctctgagccaatcaatcatcctaattctttggttaaccttttgaagaaccttgctgctattgctagcacacagtcatatcaagatattctaaagaatgcaaattcaaattcaatattgtcaaatgatggtaataatgctgcaaatggatctactgtgcatgagcaaactatacggtcaattccaatcagtggagaatcattagcagaagagcctgctgtgaaaagccgagtacatgattttgatttgaatgatgcttgctttgaagaagttgagagccgaacagataaaattgtgttcaaactgtttggaaaagagccaaaagattttcctgtagatctacgggaacagatcctacactggttatcgcattatccaactgatatggaaagctatattaggcctggttgtgttattctaactatttacctccgcctccctaattggatgtgggatgagcttgatgatgatccagcttcgtggatagaaaagcttattagcttatccaatgatggactttggagaaaaggatggttgtatgctagggtacaggactgcctaacactgagttacaatggtagtcttatgtttgcatctccctggcaactggtaattggcgacaagcatcagagactgtgtgtaactcctattgcagttgctatgtgcttcgtctgtaaaagtctcagtgaaaggcagagctcatgtctcggttaccatgcccagcacaattgatactgtcggaaagcatgctagccgaatgaagcctgccgatcaaatcacatttggtgttgagaaaaaacaactaagcatcaaccaaacattgagctgcagacagtgtgtccagcaggcccagcagcttgcattccatccccgaacaaataaggtttctgtctaataggactgcgatgctttccttggtctccattgctgccgtctgcgtctgtgtgggattgatcatgaagagcctgccacaagttggttgtatgaagcctttcctctggggcaatataggttggggccccaattgatagactgcagaagagccagcccgatttgtatcaggtgtatgatgaagatgtttgcgccgagcgaagctagtttcttgtaatgtacatgtttctgtatactaaatgtctaacttatttctgtttatagtaaaacctgtgaacttgcctagcttgtaactccattgcatttgcatcctgactgaagtaaagcttttacttgttttaaaaaaaaaaaaaaaaaacaaaatgtgttgcttactgctgttaaaaaacgctcaaagcctttagttgagtttctattaagatacacagcaacagattatgctccagtgggcggtggagccggcgctccagttcagttcttgttcactcctgcgatgactggactgtcaaatatcacacctcttcatattgcagccacaatcagtgatgctactggtgttttggatgctttaactgatgatcctcggcagttgggaatcaaagcgtggaagaacgctcgtgacgccactggcttcactcctgaggaatatgctcgaaagagaggccacatatcctatatccaattggtacaggacaaaattgacagaagggtgagcagagctcatgtctcggttaccatccccagcacaattgatactgccggaaagcatgctagccgattgaagcctgccgaccaaatcacatttggtgtggagaaaaaacagcgaggcatgaaccaaacattgagctgcagacaatgtgtccagcaggtccagcagcttgcattccatccccggacaaataggtttctgtctaataggactgcgatgctttccttggtctccattgctgccgtctgcgtctgtgtgggattgatcatgaagagcctgccacaagttggttgtatgaagcctttcctctgggacaatatacgttggggccccaattgatagactgcacaagagccagcccgattgtatcagtgtatgatgaagatgtttgcgccgagcgaagctagtttcttgtaatgtacatgtttcttatactaaatgtctaacttatttctgtttatagtaaaacctgtgaacttgcctagcttgtaactccattgcatttgcatcctgactgaagtaaagcttttacttgttttggttgagaggaaaaaactaatcaaaaaaacaatct

SEQ ID NO: 3465 - DNA, 954 bp, Zea mays
  Clone ID: TF_ZmC229717_1
agggagcagagaataaattactaaaacgaggaaagaagagggaactggtgcgatgaccactagtacagctgaaacgatagactgctggacgcttgaatcggaaagctagcttctgccacgagaacgggagcgaaggggacgtcccgtcggaggatccgtcgccgccgacgtggaatatgccgtggtagttcatctcgtggccgccacgtcggagctcggcaccaggacggtgttgagctgctcgctctccacgcccggggggcaggcgaacccgccggcgggtagggacggcgccggagccggcctgggagcaggcgaaccagtccggcaccggggagacgccgaactggtggtgctggaggccggggacgaggggctgcgccatggggatgcgctccgcgggctggaccatccggctcacgtcgacgctggaagagttggcgggggatgacagaagagagagagcacaatccgagtcgagcacgggggcgagcatcttgctgctctcgggcggcggcggggccacggcggcggtcgtcttgaggaggggctggcacaccgtggagacctcgagcgtcccggcgcctgatgcgctgaagctgacttggtcgccgtcctggaggaacgggaagcgccggccttccttggagtaggccggcgacgtggaggtgccggcgaagtgcggcctgttgctgagcaccgggtggtgtgtgtagtatgagctgtcctcggatttgatgactccagaccagcttggctccggccttggtgccgggaacgacgataaccttgtccctgcactcgaaaacaagccttgttgacttgtcataaagctcccagagctcatggtatctggctgcggcttcctgcggcgccggttgtgcccgtcaagcctctttctacaactgcgcttggcctcatcaaactctagcccggccggcctcgagggtccca

SEQ ID NO: 3466 - DNA, 1282 bp, Zea mays
  unsure (1)..(1282): unsure at all n locations
  Clone ID: TF_ZmC18262_2
cttcccactcattactcagcttaggaggtccagggcctccagctccgatccaccagctacgctagctcntatgccggactcctcctcctccgccggcacaggcggcatggccccctcgagctcggcggcgccgggccgagctgccaggtcgagcggtgcagcgccgacatgggcgtggagaagcggtacaaccggaggcacaaggtgtgcgacgcgcaccgcaaggcgtccgtcgtcctcctggccggcctccgccagcgcttctgccagcaatgcagccggtaagccccgcctgcctgcttgctcggaggcacatgcacatgggcgcagtgcagtgtgcagtccggccggcgtgcgtgactcgtacgtgagtgagttcgtgacatgctcaaaggcaccggccgctttcagtttgtacgggtactactactactaaactaaacgagcttaattgcacgaggagaaagcttgcagctttttttcttgggtcatggatagcacggtgagctgctgggattggatcctaagctagctaggttgctctctcaactcaagatcttgcagaagcgtctctcagtctcatgcaacctctttggaggttccacgagctgtcgcacttcgacgacaccaagcgcagctgccgcctgcgcctggcggggcacaacgagcggcgccggaggaaccccgcggaggcgcaggaccagcacggcgggcggggcgacccggggagccaccacctccagatcagataaaaacctactacgtcagcatgctctctctcttctgtcatgcaggacgcacgcacctagcgtcgtcaccgatccatagtccgatatgtgtctcaagtgttgtgtgtgcgcgctctcgccgcctacccctgtcctgcagtgttgcgtagtatatggttctacgacctacacgtactgctgctactactgcgtgctaactttaatctgatggcagtccacagctagctagcacatcacctcctgtaagtaatgtgcttatctatatgtgcaccgaccggaaccggaggcgtgcgtacgctgatctgccacgaagcctactagtagttaaatgtaacgtaacctgcaggcaattaagcagggcgctgctatatatagcgtaattaattgtgcgtatgggtatggtggttcgattatcggatgtgtaatccctgtacgtggccgggcccgtgccaaacgtacggtgacctgtgcaggctctgtgtgtcgatgatgttgtactctgataatgatataatccattgtggtaaaaaaaa

SEQ ID NO: 3467 - DNA, 1496 bp, Zea mays
  unsure (1)..(1496): unsure at all n locations
  Clone ID: TF_ZmC9712_2
ggccggcggcgccagcggcggcgacgaaggggacggccagctgcacggcctcaagttcggcaagaagatctacttcgaggacgccggcggctccagtagcagcggcggcagtggcagtgccagcgcgaccgcgcctccagcgacgcagcagccgtcgccgccggccgcttcgcctagggccgcgcccggtggcggcaggaggggcagggccgcggctggcggcgcgggcccctccttgccgcccgcgcccccgcgctgcctggtcgacggctgcaacgccgacctcaccgacgccaagcccgcctactactgccgccacaaggtgtgcgaaatgcactccaaggagccccgcgtcctcgtcaacggcctcgagctgcgcttctgccagcagtgcagcaggttccaccagctgcctgaattcgaccagctaaagaagagctgccgcaaacgcctcgcaggccacaacgnnnnnnnnnnnnnnnnnnnnnntggaccccttgcgtcacgatacggccgtcacgctgcgtcgctcggcgagcccggcaggctcagaagcttcatgctggatttctcgtacccgagggtctcaagcgccatgaggggtgggtttccggcggtgaggcccggtggtgaaagggtgcctggcggtatccagtggcaagcgggcttggatcctcgtcaccaccaaggcgcggtcgcgggatacggcgcccactatgggagcgagggtggtagctcgtcgtcggcgaggccgccggtgttccctggcccggagctgnnnnnaggtggatgccttgcaggagtccccgcggactccagnnnnnnnnnnnnnnnnnnnnnnnnnnnnnnnnnnnnnnnnnnnnnnnnnnnnnnnnnnnnnnacgctgcgccaacagcgggtttcgacggcggcagccctgtggcgccctccctcatggcggcgagtagctacatcgcgccgagcccctggaccgagaccgactcctggggccacgaaggcgggcggagcgtgcctcagctgccacctgacgacgtnnnnntcggcgaggtgcactccggctcgagcagccaccacggccagttctcaggtgagctcgagctcgccctgcagggaaacaggccagcgccagggnnnnnnnnncgagcagcgccgcgcaataatcagggctccgcgggcacgttcgaccaggctggcaacacgatggactggtcgctctaggccnnnnnccgaaataaagcgcagcagatcctagccgcgcagggagatggaggaggctgaaagtttgatgctgcacgctgcttgcttagcttagagcatccagcatgataagagtgatgaactgatgcggtgtcaggagactagtttattctgtgcttcaccatgaactcgtctgtcgcggcgtctatgtagacagacggcacacgtccgtggttcgaagttaccagtatgcttgtcggggactttgctcgcgatgcattaatctcattgttcacca

SEQ ID NO: 3468 - DNA, 739 bp, Zea mays
  Clone ID: TF_ZmC120974_1
acgcgtccgggcggagtgctccgtcgacctcaagctcggcgggctaggcgagatttgggcggtggaccgcacaaccacgaaggagcgggtggctgcaaccgcagctccgtccgccaccccgatgaagcgcccgcgcttgcggcccggcggcgccggcggggcacagtgcccgtcgtgcgcggtggacggctggggggccgacctaagcaagtgccgcgactaccaccgccgccacaaggtctgtgagacgcactccaagacgcccatcgttgtcgtcaccggccgcgagatgcgcttctgccagcagtgcagcagggttctatattcataagcatgttgttgcaccacacaacctttttgttttatatgttgtcatctgatctctggtgaaaaggagggagatgagctacggaggaaatctgatgttatggaattctaagaaaagtctagatttccacaggtccagtggtgccactgatgtcaagtcagcagaaacgattcttgagcatgagtatgcgtcgatgctctttttccctgaggcaatgctactcctatgcacagtgatgtagtagcaacggagaactgtcattaattggatacttcttatcctaattgcaggcgtatcatttagcttggggtttgaattatcggattgccctaccatactgcttagctaaagcccttgtcaaaatgcataattagaagcaactattaaagaaagatcaggtagtttgctact

SEQ ID NO: 3469 - DNA, 1694 bp, Zea mays
  Clone ID: TF_5931779
caggtccctcctcctgcacacacccacagtgcacatatatagtaggagaatgatgatgatgaacaccagcgccgccatgtcgccagcaagtaccgacgtcgtcgtcgtcgacgacttctccctcggcgtcggcgtcggcgccatgcatcagccgtacgtcgtcggcttcgacgccgacgccggcatgggcatcatcatgcccagcgtcgtcgtcgataggccgctgctccagcagaacaccaacctattagaagagtacgacagtttcgacttcgccgccgccgcggggctgctactaccgttccaagaactacctgctggtctcctgccccccgcgaattacctgccgccgccaacgccaataagcatggccatggccatgtcgccgccgtcgctgctgctgacgacgctcccgggcgtgccagtgcctacggcggcggcggcggatgtcgtgtacggaggattgggcgggggcggcgcgggaggactgtcgttcgtcctgaagcgggaggccggcggcggcgggggaatgatcggcggcctgaacctcggacgccgcacctacttctcccccgccgccgtggaccggctactcggcggcggcggcctaggcgtgggcctcggcatgagcgtgctggggctcggggtcggcgccgccgcccaccagcagcagcagcagccaccgccgcggtgccaggccgagggctgcaaggccgacctctccgccgccaagcactaccaccgccgccacaaggtctgcgagttccacaccaaggccagcgccgtcgccgccgccggcaagcagcagcgcttctgccagcaatgcagcaggtttcatgtgcttgcagagtttgacgaggccaagaggagctgccggaagcggctcaccgagcacaaccgacgccgccgccggaagccgatcagcgaacagggtaatgaccactcgtcattgccgccgccgccgccaaagacagcggatacttgcatgaccacctcgtacaatgatgaccccaacagtgcgagcaacacggctgcagccaagtcggcggccatctcgcagaacggcggcgtcagctgcctcgacgtcctggacaacgagcagcgcggcggcagcggcgccgacggcgctatctctggccgcgccgcccccgccgctgcatcacgagaaggacgggagccaggactccgtgctatgatgcagcgccgggtccattggtccatggccggcggctggacgacgacgaatcgccgtttcatcacctcgctggtagtgatgcagacccagcagcagagcagcacggcggcaacgtcttgtcgtgctcgtcgatcggtgtcagatcagcagaacggcggctgcaacggtttctttgaggtggacttcatctaatgcgatgcagatgcacgtaaaaggagcagggaaaagcatatagctagcgtcgctagctgtgtattgtttctgagatgggaaggatgcatggcgtgaggaaagcaacaaaggctagggtttggttggttccactctagctaggggccttttctttttactgtggttagtacttgggctagctagctagtagtgctggccggacttctgttctattaattactagagggaaatgctggtgtagtatgtgtgtgttttccttttccctgttgctaacaatgtatatactattacgtgtaaaaaaaaaaaa

SEQ ID NO: 3470 - DNA, 1646 bp, Zea mays
  Clone ID: TF_5931777
atagctcgatcgctctctgtgtccgctcctcctgcctcctgcacacacatacactcagagagcatagtagcagtagccagtaggatgatgatgaacaccaacgcgatgtcgccgacagcaagtaccgacgccgacttctcgttcggccccttgcagccctacgtcggcttcgacgtcgccggcatgggcatgcccagcgtcgtcgtcgagaggtcgtcgtcgctactgcagcacaacaccagcagcagcagccacaacaacaacctagggctatacgacagtttcgacttcgccgccgccgcagggttaccgttccaagaatctggtctcctgcccccggcgagcctgccgctggcgccgtcgccgccaagcatggcggccatggcaatgccaccgtcgtcgctgctgctgacgctcccaggcgtgcctgcggcggcggatgtcgtctataacccctttggtggcggcggcgcgggagggttcctgaagcgggaggacggcggccccctcgtggacgctgctggaggcggcgggaggatcgggctgaacctcgggcgccgcacctacttctcccccgcggacgtactcgccgtggaccggctgctgacgcggtcgcggctggcgggtggcggcgtgggcgtgggcctgggtatgggcctcggcatgggcgtgctggggctcggcgccgcccaccaccagcagccgccgccgcggtgccaggccgagggctgcaaggccgacctctccgccgccaagcactaccaccgccgccacaaggtctgcgagtaccacgccaaggccagcgccgtcgccgccgccggcaagcagcagcgtttctgccagcagtgcagcaggtttcatgtgcttgctgagtttgatgaggccaagaggagctgccggaagcggctcaccgagcacaaccgccgccgccggaagccgagcagcgcacaggacgaggactcgtcaccgccaccacccaagaaactggatacttgcataactaatactgcctcttacaatgatgatctcaagagcgcgagcaacacggcagctgcggccatctcgccgaacggcagcggcgtcagctgcctagacgtcatggacaacggccagacgagcagcgcagcggcgccgacggctctgtctttggccgccccgccgccgccgccgctgcacgagaaggacggcagtctcgactcgatgctgatgcagcgggtcctgcagggccgacgggaggacgacgacgacgaacagcgtcgccacttcatcacctcgcttgtgatgcagacgacccagcagcagcacagcggcggcggcggcgccggcaacatcttgtcgtgctcgtcggtatcagatcagcacaacggcggcggctgcaacggtttctttgaggtggacttcatctagtgtataatcagatgcatgacgtgaggaaagcaagcaaaaacaaagctgggttggtttcactgtagagcggctagtagccttttcttttttactgttgttcttagtacgacttgagctagctagctagtggttggacttcttttaccagatggaaatgcttgtgtacgtagtatgtgtattcctttttcctattgcgaaaaatgtaaattattattacgtgtaaaaaaaaaaaaaaaaaa

SEQ ID NO: 3471 - DNA, 820 bp, Zea mays
  Clone ID: TF_LIB4746-102-R1-K1-C4
ctcgaggccggccgggacagtccacactgttcaccacctctcccatcctctcttcgatccccaaatcccgaattgaccagcccaaatcgtcgccccggcgcatggagtggacggccccgaagcccgcctcatcgcctcccctcctctgggactggggagaccacgccgccacgggctcgggctcctccagcgacgccccggcgcggcgcggcgggaaggagcgggaggcgaagcgtgccagggccggcgaggaccgcgggggaggtgagctgaggtgccaggtcgaggggtgcggattggacctcagcagggtcaaggactaccaccgtaagcaccgcgtctgcgaggcccacactaagtctccccgcgtcatcgtcgccggccaggagcgccgcttctgccagcagtgcagccggtgggtcgccttcttgcttgctttcgcttgccccctccacgcctctgctctcgcttgctctgtgcgattgcttccgtcttccttcctttgattgctttctgcaacgatggtcgcgtgatttgttgattggtttggacaagcaggtgtttttacgtgttctctattagttttgtggctacatactgtgtgtgtacggcgcgtgagctgcgtgcgcggttgtgccgttttttttgggtacggaactgcatttttttcctgatctagcaatgaaagatgcttcctttccactattgggactgttgtacttgttgtggagatcgtacgcatgggtggaatgagaaatggctactatgcctgtttcccttttccaggtttggtatggctctcgatatatgtgtatgcttt

SEQ ID NO: 3472 - DNA, 2059 bp, Zea mays
  Clone ID: TF_5931781
ctcacaatcactcaaccactgcctccagctccagcagcagctagctcagctcgatcgtcctcccgacccgatccatccaccccactccccgtgctccaccatctcggcatctcgctcgctcacttagctcgagctgcggcaaacagccggccggcagtccggcacacgggagatgatgaccgggaggctgaacgtggccacgtcgtcctcgccaggaggagacgacttcctgttcatgcccatgcagcagcatcagccgccgccgcctcctcctccgccctacgtcgggttcgagcacggccacggcgtggcgggaggcggcagccagcgcgttgccggaggggtgcagcaccacctctacgacggcctcgacttcgccgccgcggcgctgcagttccagcagcaggcggaggcgccgcacctgcaccagcagcagctgctcacgctgccgtccagtctcggccccatggcgccgccgcctccgccgccgccgccgctgcccatgcctatgcccgtgcccgggatgcccggcgaccacgtgtacccggcgctcgggatggtgaagcgcgagggcggcggcgcggacgggaggatcgggctcaacctcggccgccgcacctacttctccccaggggacatgatggccgtggaccgcctcctgatgcggtcccgcctcggcggaggcggcggcgcgttcgggctcggcttcggcttcggtttcggcggcgcgcaccaccaggctccccccgcgcgctgccaggccgagggctgcaaggccgacctctccggcgccaagcactaccaccgccgccacaaggtctgcgagtaccacgccaaggcctccgtcgtcgccaccggcggcaagcagcagcgcttctgccagcaatgcagcaggtttcacgtgctgtcggagttcgacgaggtcaagaggagctgccggaagcggctggccgagcacaaccgccgccgccggaagccgcccaccaccgcctcatccaaggacgccgcgtcgccgccggctaacaagaagcccaactgcggctccatcacaagctcttactccactgacaacaagaacctgaacacggccaagtcgaccatgtcatcgaacacgggcagcgtgatcagctgcctggaccaggccgcgggcaacaagcagctgcaggcgaggccgacgctgaccctcggcgcgtcgccggacaaggaccagcagcagcagcagcagctgagagccatgctccaggcccaagcggcggccggcggcggccaccaccaccaccaccaggagcagcacttcataacctctctgcaggttcacaacaacgacggctgcggcggcggcaacagcagcagcaacaacaacatcatcctgtcgtgctcctcggtgtgctccagcgcgctgccgtcggccaacggcgaggtctcggaccagaacaacgctggtggcatgcataacctgttcgaggtggacttcatgtagaccgtcgagatcggggcaaagcaaaaggcaggcaggcaagcaagcaagcacgggagtacgtccgtccttctggcaaggtgtccttggtgtgtatcagtgtaggtaaaaaggaataggagagagagagagagagagagcaaaacagctaggcatggagtgggaggagaaacaagacgagaaaagacacatagaaaagagagagagagagaaaggacgcagagaaggattctatccatccatcagtccatcacactccatgcatcagtagctagctagctagcagcaagctgcagagcctgcagcaagctgctgctggtctacaacctcttgttgcaaggttccatggccatagcaaagccatgcgtccgtcccgttgcattggctctctctctctatatatatacctgtacgtactgtcgtgctgcagctgctgccattgcaagcctttctacctttccatttcaagcggggaataataactgctatttcactttaaaaaaaaaaaaaaaaaaaaaaaaaaaaaaaaaaaaaaaaaaaaaaaaaaaaaaaaaaaaaaaaaaaaaaaaaaaaaaaaaaaaa

SEQ ID NO: 3473 - DNA, 666 bp, Zea mays
  Clone ID: TF_LIB4171-035-R1-L1-D5
aaattcggcacgaggcttcgatccccaaatcccgaattgaccagcccaaatcgtcgccccggcgcatggagtggacggtcccgaagcccgcctcatcgcctcccctcctctgggaactggggagaccacgccgccacgggctcgggctcctccagcgacgccccggcgcggcgcggcgggaaggagcgggaggcgaagcgtgccagggccggcgaggaccgcgggggaggtgagctgaggtgccaggtcgaggggtgcggattggacctcagcagggtcaaggactaccaccgtaagcaccgcgtctgcgaggcccacactaagtctccccgcgtcatcgtcgccggccaggagcgccgcttctgccagcagtgcagccgattccatgcgctgtcagagtttgatcagaagaagaggagctgcaggaggcgtctgtctgatcacaatgcccgccgccggaagcctcagccagatgcattcaccttcgcctctgcaaagctgccttcgacattgtttgatgataggcggcaaataagttttgtctggaataaagctcctgttagccatgtaagacccttcacttctccatgggacagctcatctgacttaaagcccccttatgcaaaggaaataagtgatgtatcaacaaaagttgggacaattact

SEQ ID NO: 3474 - DNA, 721 bp, Zea mays
  Clone ID: TF_ZmC5424_29
cccacgcgtccggcttcttgctgcaggtttcatctgctcggggagttcgatgaggtgaagcggagctgcaggaagcgcctcgatggacacaaccgccgccgccggaagccgcagccggaccctctcaaccccgccggcttgtttggcaatcaccacggagtgacaagattcacgtcttacccgcagctcttcgcggcgtccatggaacagcctaaatggtcggtggtcaagacggaggccgacgtgttccaagaccagtactacccggccgtccacctcaatggcgctggcggcggcgccatcggctcccacttccacggcaaggagcggaagcacttcccgttcctgaccagccacagcaacggcggcggcggcggcgacgtggcgaccgccgcggccctgggctgccagccattcaccatcaccaccacggcggcctcagagagcgacagcaagcagagcaacggcaactgtgctctctctcttctgtcagacaacccgacatcagcacagacggtcatgatccctactaccgcgcagtccctcgccgcggtgatgcagcacgggggcagactccctggcagcgtcagcgctcagcggcgataacagatgctgcttgcagccttggatatttgtggagtgaacgcattgttgatagcatatggataagaaagtaatgtaattatctggagatgtgtaattatgtggcaatattatttgc

SEQ ID NO: 3475 - DNA, 793 bp, Zea mays
  unsure (1)..(793): unsure at all n locations
  Clone ID: TF_LIB4969-009-A1-XP1-H2
gccggccggtttgggacgtccacctgttcacttcctgccccctccccgcacctccctccgatcccccaaatcccgaattgaccaacccaaagccgtcgccccgcatggagtggacggtcccgaagcgcgccagggccgacgacggcgaggtgaggtgccaggtggaggggtgcgggctggacctcagcagggtcaaggagtaccaccggaagcaccgcgtctgcgaggcccacaccaagtccccccgcgtcgtcgtcgccggtcaggagcgacgcttctgccagcagtgcagccgatttcatgccctgtcagagtttgatcagaagaagaggagctgcaggaggcgtctgtctgatcacaatgcccgccgccggaagcctcagccagatgcattcgcctttgcctctgcaaggctgccttcgttcggtaatgtgttcatatcttaagtagtgcttgaaatttgccagtggatactggcaaaatggtggtgatgggctcttagccagctgcatgtacagcacgccaatagatgtcttgttgctcaaatggcaagctttctatcttttatacttggcaataagttgctgttgcgtttcttcatggaattatatacaaactaaactagacattttttgaccggcaaaagctgtaggggaaagcaataaatatactccctccgttctttttttatttgtcgcgttttagttcaaaatagtatatatttaaaaagaaagagaacttgtaccgagagaagggtgaacccaccaaagggcagagaaataannagaagtag

SEQ ID NO: 3476 - DNA, 1958 bp, Zea mays
  Clone ID: TF_ZmC9188_2
tcttactgtatgaagtttttaggcatatatatctcctgtatgggagtgggacatggcaatgaaccatgagtaggacctatattgtttttgctttgcttgggttcttgtaacccagatttcatgccctgtcagagtttgatcagaagaagaggagctgcaggaggcgtctgtctgatcacaatgcccgccgccgggggcgggggccagatgcattcgcctttgcctctgcaaggctgccttcgtcgtcgttcgatgataggaggcaaataagttttgtctggaataaagctcctgttagccatcctttcacttctccatgggacagctcatctgagctccctcatgcaaaggaaataagagaggtgtcaacgaaagttgggacaattactggacaagttcatttggataaatcttacgtgtccaatgctgttccatcacttacccatggcaaagatgagccttggccaatgaaactcccccgcacctccctccgatcccccaaatcccgaattgaccaacccaaagccgtcgccccgcatggagtggacggccccgaagcgcgccgcctcgccgccctcgcctccgctcctctgggactggggaggagaccacgccggcgccacgggctcgggctcgggctcctccggcgacgccccggcgcggcgcggcgggagggagcgggaggcgaagcgcgccagggccgacgacggcgaggtgaggtgccaggtggaggggtgcgggctggacctcagcagggtcaaggagtaccaccggaagcaccgcgtctgcgaggcccacaccaagtccccccgcgtcgtcgtcgccggtcaggagcggcgcttctgccagcagtgcagccgatttcatgccctgtcagagtttgatcagaagaagaggagctgcaggaggcgtctgtctgatcacaatgcccgccgccggaagcctcagccagatgcattcgcctttgcctctgcaaggctgccttcgtcgtcgttcgatgataggaggcaaataagttttgtctggaataaagctcctgttagccatcctttcacttctccatgggacagctcatctgagctccctcatgcaaaggaaataagagaggtgtcaacgaaagttgggacaattactggacaagttcatttggataaatcttacgtgtccaatgctgttccatcacttacccatggcaaagatgagccttggccaatgaaaggtccggacatgtctatagctgcttcaaaattcgatggagcaccggatcttcagcgtgctctctctcttctgtcagttggcgcctgcggattgcccgatcctgtacaccaaacatcttgcgtcatccaattcactagtgccagcgagaacagtggcgaccttcatctatcacatggagcgaactctggtctagcgtcatgcggtgatggacagcatatagcttctcagcctcaggctcagctggttcggtttaccatggataccagcaacagtgtctatgagcccagtttcttcagtgtaaaccagataaattaagcgttgaagacacacgccacttggtcatttggataaatagccctgaagatggcctgagcttgtgcaagaagttcttcaaccaaccaccggacataaggatctatctgttaatgttatctgtgtatttattagccatacctgaattaagttgaacccaatctaggccagcttatgtgcaatatgcagttccaacctgtgattgacccattttttctgttgtttctttgcccgtgatgtgactgctctggaacttaagtgtgatactgttgtagttacactttactgccctgacaatcatgtcaaacggctggatatctttgaaactgtccttgatgaatctggacgtgtattttgtgtgcaaaaaaaaaaaaaaaaagcggtctgttgcttcaaaactgccatcattaaaaaatttgaaggacttc

SEQ ID NO: 3477 - DNA, 1875 bp, Zea mays
  Clone ID: TF_ZmC3282_1
ctcgaggccggccgggccgggcccacagcagctgcaagatcaccctggattcctggaggacggagagagagccgagcgagcagctgtcggcacttgggagtggcactgtggaatctggagaacctaggtagaaaatcaagcaaagcatctcccactccaagcagtagcaccaacaccgccctgcattcagcgctgccagctttcacataaacaagttggggaatcagttgaggttttctaattcttcttcttggaaggattgagatctccagttctgataatgggttcttttgggatgaactggaatcagaaggaccccatggtgtgggattgggaacatctagtaccgtctgtgtcgaatgcagttacaaggcacggatctgctaattcatctggtggtactcttacttctaactcagagctaggacatggttcatccaagagctctatttcagcgtccattgattcaccctctggagtagggaacagcttagagttcaacttcgccgctgtcgagaggcatgttaagaacacgggcacgaacggcagagtcgatgactcggggaattctccatcgtcaatgatagctttcaaccaaggagagccattaatcagcctgaaacttgggaagagggcttacttcgaaaacgcctgcggaggacaggatgccaaggtttctgcagcttcagacgttacttctgcagccaccgtggtcaagaagactaaggtgtctcagcagaatgcaaagaactggtactgtcaggttgaagggtgcaaagttgacctgtcttctgctaaagattacaatcgcaagcacaaggtctgtgtagtccattctaaagctaccaaggtggttgttgctggtctagagcgtcggttttgtcaacagtgtagccgttttcatggtttagcggagtttgatcagaacaaacgaagctgtcgtaggcgtctgatgcatcataatgcacggaggaggaaacctcaggcagacacaatttcattcaattcatcgacaatgttttatgatacaaggcagcggacaaatcttttctttagtcaaccactttatggccaagtgaggagcaatgcagggtcttcatgggataacttgggaggcttaaaattcatggagacgaaacatccgccagtgcatccaacaaaaacagcatcccctgatgaactgcatttctcagccctccagataactagtgctgcggctcacaccggacatcatcatgatctcgatgggttcatggcgttcaagggaaccagcacaaaggtccttaaccaaggcgtggaggcttgggcggccgcttccagctcgaacaacggaggcccagaaggtgggcgtgctctctctcttctgtcagacggctcgtggggctcgagttcagccgtcatccagcagcccacatctcacgcggacgccggtgcattgctgccgcccttcgccaccgttgctgtttccaacgccgccgccgccgccgccgggcatcctctggacccgtccccgggaaggttctggccgcaagacgatcatcccccgctcgtcgacggacccgccacgcagattccggagctggcgcacctccggatatggtgaaaggaaacgcatgtgatgcggtgacatgccagttcgagggcctggctgggaacacatctggttggttagtctgccgctctggcttgaatttgccggcgacgacagtctttgtttgtatcttttgatcagaacggacacagacatgtttgcccaatataatgtgacgagtccctctggggttgaggagtgaggagatggagaacgataggaggcaaaaaaaatatatatttgtttcgcgcgttttcccggaagtatttaaaatatttaggatc

SEQ ID NO: 3478 - DNA, 1346 bp, Zea mays
  Clone ID: TF_ZmC9712_1
agccaaaccaagcaagcagggaatccccacaaggcagcagatggaagcgaaaggtggcggtggcccgcgcgctgccaggtcgacggctgcaacgttgacctcaccgacgtcaagcccgcctactactgccgccacaaggtgtgcaaaatgcactccaaggagccccgcgtcctcgtcaacggcctcgagcagcgcttctgccagcagtgcagcaggttccaccagctgcctgaattcgaccagctaaagaagagctgccgcaaacgcctcgcaggccacaacgagcgccggaggaggccgccgcctggaccccttgcgtcacgatacggccgtcacgctgcgtcgctcggcgagcccggcaggctcagaagcttcatgctggatttctcgtacccgagggtctcaagcgccatgaggggtgggtttccggcggtgaggcccggtggtgaaagggtgcctggcggtatccagtggcaagcgggcttggatcctcgtcaccaccaaggcgcggtcgcgggatacggcgcccactatgggagcgagggtggtagctcgtcgtcggcgaggccgccggtgttccctggcccggagctgcccccaggtggatgccttgcaggagtccccgcggactccagctgtgctctctctcttctgtcaactcagccatgggatgctgcccacagccacagccacagccacgctgcgccaacagcgggtttcgacggcagccctgtggcgccctccctcatggcggcgagtagctacatcgcgccgagcccctggaccgagaccgactcctggggccacgaaggcgggcggagcgtgcctcagctgccacctgacgacgtccccctcggcgaggtgcactccggctcgagcagccaccacggccagttctcaggtgagctcgagctcgccctgcagggaaacagaccagcgccagggtcggcggcaccgccagcgccgcgcaataatcagggctccgcgggcacgttcgaccaggctggcaacacgatggactggtcgctctaggccgggggccgaaataaagcgcagcagatcctagccgcgcagggagatggaggaggctgaaagtttgatgctgcacgctgcttgcttagcttagagcatccagcatgataagagtgatgaactgatgcggtgtcaggagactagtttattctgtgcttcaccatgaactcgtctgtcgcggcgtctatgtagacagacggcacacgtccgtggttcgaagttaccagtatgcttgtcggggactttgctcgcgatgcattaatctcattgttcaccatccagaaaaaaaaaaaaaaaaaaaaaaaaactcgagg

SEQ ID NO: 3479 - DNA, 1106 bp, Zea mays
  Clone ID: TF_ZmC1835_47
aacctacttaacttcttttataattttagcggaaaccggcgagccgctgcaacatcttaattattacaggctcgtcatgctatccatgatccaagaaaaaaaaaatcctatccgattttgaagatccatggactttaggcactgatgattttcctctctctctctctctctgaataatgtaaaaaaaatggaactaagttcagtagcgcgagctgagcctgaaagtggctcgacgagcttcgggcgggcgcggggcttaccggctgcattgctggcagaagcgctggcggaggccggcgacgagcacgacgggggccttggagtgcgcctcgcacaccttgtgcctccggttgtacggcttctcctcggtcatcaggttcgcgttgcaccgctccgcctggcacctcggcccgccgccgccgccaccgccacctgccccagcgcgccgccgccgcagccaccatgggtcgcgtccgcaccaagaccgtgaagaagacctccaggcaggtgatcgagaagtactactcccgcatgaccctcgacttccacaccaacaagaaggtgctcgaggaggtctcgattctgccctcgaagcgcctccgcaacaaggtggctggcttcagtacccacctgatgcgccgcatccagcgcggcccagtccgcggcatctcgctcaagctgcaggaggaggagcgcgagcgccgcatggacttcgtgccggagaagtccgcgctcgaggtcgaagagatccgcgtcgacaaggagaccatggagatgctcgctgccctcggcatggccgacctgcccggcgttgagcgccaggctgaggtctccaacgcccccgcctacggccgcccgcagtacggtggtccccgccgtgaccgcgtttagacttcgcggtggttgcctcttgatcgcactgctattcgtagttgttgtcctactatgctaaacttcttttagatctttggttgcatctgtggcggttaagttttgaacttgcctgttatggtataaattctgaagtgtttggttctgcgtgtgatgaacatgataatttatattcttgcgctttataaggaaaaaaaaaaaaaaaaaaagcggcc

SEQ ID NO: 3480 - DNA, 1213 bp, Zea mays
  Clone ID: TF_ZmC39687_1
gcggcgtggatctgagcgccgtcaagcagtactactgccggcacaaggtgtgcaacatgcactccaaggagccgcgcgtcttcgtcgccggcatcgagcagcgcttctgccaacagtgcagcaggttccaccagctacatgaatttgaccaagggaaacgtagctgccgccgccgcctcatcggtcacaacgagcgccggaggaagccaccacctggacctctcacttcacgatatggccggctcgctgcatcacttcaagagcctggcaggttcagaagcttcctgctcgacttctcgtacccaagggttccaagcagcgtgagggatgcgtggccaggaatccagcacggtggcgacaggatgctgggcaccgtccagtggcatgggcaccaagaacctcctcacccacaccgcagtgcagctgctggctatggcaaccatgctgcatacaactgccatggcggcttggtagcaggcggggccccaatgctctcctctgccgcctttgagctcccgcctggcggatgtgtcgcgggagttgccgcgactccagcttgtgctctctctcttctgtcaactcagccatgggacacgaccttcccacgaccaccggtccccagcaatgcccgcggccggcgccttcgacggcaccccggtggcgccgtccgtcatggcgagcagctacgcggcgtcgagcgcctggacgggctcgcgggaccccgctgccgacggcgccaggaacgcgcagcgtctcgacgatgctctgcacctggtccacccaggctccgcggcggtccacttctccggcgagctcgagctcgccctgcagggaagcggcgggccgccacacctgccgcgcgtcgaccatggcggctccggcggcggcaccttcaaccattccaccaccagcgcgatgaactggtccctgtagcagcactgcctgccttcatccggtcgccacgccacgagatgtggagggagcacttttgcattggacaccaccctggttttgtgcgccttaccttgccgttctcgttttttcagggtggagaaactgggattcctaaccatagtagatctaccgtgaattcccttcccgtgtagtagcgcattgcgtccatgaactcatttgatcgatcgtcgtgtcaccgtgtgcgtaactgcgtatctgtttggcgtaaaaaaaaaaaaaaaaaaaaaaaaaatccgaa

SEQ ID NO: 3481 - DNA, 2972 bp, Zea mays
  Clone ID: TF_ZmC353_1
gaggaaaagggccgtggtcgttgatgatgatgatgatgatgaaacggaggatcaggacagggtcgtgaatggtggtgggtcgctcagcttgataatagggggtagtgctgctggtgctggagcgatggagaacggcgatgtaaatgaggatgagagaaatggaaagaagatcagggtgcaaggaggcggctcaagtgggccggcatgccaggttgagggctgcggagcagatctgactgcagcaaaggattatcaccgtcggcacaaggtctgcgagatgcatgctaaggccaccaccgccgtggtcggaaacactgtccagaggttctgccagcaatgcagtagatttcaccttcttcaagaatttgatgaacggaagcgaagttgccggcgacgcttagcaggccacaataaacggaggaggaaaacccgccctgatactgcaagttgtgggactgcttcaattgaggacaaaatcagcaattatctactgttgagccttattggaatctgtgctaatttgaactctgataatgttcagcattcaaatggccaggagttgctatccactcttttgaagaacctagggtctgttgccaaatcactggagccaaaagaactatgtaaactcctggaggcataccaaagcctgcaaaatggatcaaatgctggaacctctggaacagctaatgccacagaagaggctgcagggccatctaactctaagttgcctttcgtgaatggtagtcattgtggacatgcatcatcatctgttgtgccagtacagtcgaaggctaccatagtggtaactccagagcccgcatcatgcaagcttaaggattttgatctgaatgacacttgtaatgatatggaaggctttgaggatcgacaagaaggttcacctacacctgcctttaagacagctgactctcctaattgtgcatcatggatgcaacaagattctactcaaagtccaccgcagactagtggcaactcagattcaacatcaacacaatcattgtcaagctcaaatggagacgctcagtgccgaactgataagattgtcttcaagctttttgacaaagttcccagtgatttacccccagttttgcggtcacagattcttggttggttgtcaagtagccctactgatatagagagccatattagacctgggtgtattattctaacaatatatctacggttagttgagtctgcatggcaagagctttctgagaatatgagcctgcacctggataagcttttgagtagctccactgacaacttttgggcatctggcttggtatttgtgatggttcggcgtcgcttagcttttatgctcaatggtcaaattatgttggacagacccctggcacccagttctcatcattactgcaagattttatgtgtcaaacctgttgctgcaccttattctgcaacaataaatttcagagtcgaaggatctaatctactcagtacttcctcaaggctaatttgttcatttgaaggacgttgtatattccaggaagacacagactctgtagcagaaaatgatgagtatgaggatagggccatcgaatgcctcagtttttgttgttccgttcctggtccaagaggaagaggatttatagaggttgaagatagtggttttagcaatggcttcttccccttcataattgctgagaaagacatatgctttgaggtttctgagctggagagcatatttgagtcctccagtatcgaacatgcagatgctaacgataatgccagggaacaagctctggagtttctaaatgagctgggttggcttcttcacagagcgaacagaatgtctaaagagaatgtaactgatacatctgtagctacctttagcatgtggagattcaggaatcttggtgtatttgccatggagcgggagtggtgtgctgtgatcaaaatgctattagatttcttatttattggccttgtcgatgtgggatcccgatctccagaagaggtggtgctttcagaaaatttgttgcatgctgctgtacggaggaagtctgttaacatggttagatttctgctgagatacagaccaaacaaaaactccaagggaactgcacagacatacttatttagacctgatgctctgggcccttcaatgattacccccctccatatagcagctgccactagtgatgcagaggatgtgttggatgtgctgaccgatgatcctggactgattggaattagtgcttggagcaatgcacgggacggaacaggttttaccccagaagactatgctcggcagagaggcaatgatgcttacctgaatctggtccaaaagaagattgataagcatcttggcaaaggccgtgttgtcctcggtgttccgagcagtatatgctctgtaataactgatggtgttaagcctggcgatgttagcctcgagatctgcatgccaatgtctgcatcagtgccaggttgcctcctctgcagccgtcaggcacgggtgtatccgaattctacatcgaggaccttcctttacaggccagcaatgttgactgtgatgggagttgctgtggtctgtgtctgcgtgggcatactcctccacacctttcccagggtttatgccgcgcccacattcagatgggagttgctggagcgtggacccatgtaagttttaggatgagccttagctgttgtttgtaacttgtaagttgagagttttagcgttgtggctaagatcaaaggaacatgattaccgtgtgaagaagttcatctgtgtttaacgcaagatgctgttgcggctgtaagctttatatacatcgtcgatttcaactatatttacagcctatcatgctcccattccattcatccattttgttgtagaattcattccttgcggagaatttgtgaaccctcagaataaaaaacaggttcttgtatggaaaatcgtttagacataatatttcttggaatgatgctgg

SEQ ID NO: 3482 - DNA, 1462 bp, Zea mays
  Clone ID: TF_ZmC3704_1
aattcggcacgaggaatccttgactcggttctctccatgagcttactgccccatctccatttcttcaatcattactcgcctttccgttcaagggcgttgcttgcctggataaccacggcatcgttctacccgccgggcccgagctaagtcatacgtgcaaacaaagagcagcaaaagaagaacaagtggggcgacagggacagggaggaggggaaggcagaggaaatggaagcctctttcttgaggaaagatggcggtgatcaagccagtgcggcgacaatgtccggcgagcacaggaacaagggccttgactgggatttgaacgactggaggtgggacgccaacctgttcctggccacgccggcggccatcgcgccatccgagtccatcagcagggagctgagccgaggtcagggggagatcgatttcggcgtcgtcgttgacaagaggcggcggctctcaccagaggaggacggcagcggtgggtgcagcaattctgcggtagcagatggagacaacagtcacgtggtgtgtgttcagagagggcggaacactgaggagacgagacccaggaaaggtgccaattcgagcaccactccttcttgccaggttgacggctgccaagctgatcttagtggtgccagggactaccataagaggcacaaggtgtgtgaagcgcataccaggacaacagtggtctgcatcaataatgtagagcatcggttctgtcagcagtgcagcaggtttcaccttcttcacgaatttgatgatggtaagaagagctgccgatcacgtctggcacaacataatggaaggagaaggaaagttcaaccgcaacctgctgtgaacgggaattccatgaatgaagatcagtctctaagtagcaccttattccttctgttaaaacaactttccgggctcgagtctggtagctcttctgagcaaatcaaccatcctaattctttggttaaccttttgaagaaccttgctgctattgctagcacacatgcatatcaagatgttctaaagaatgcaacttcaatatcatcaaatgatggtaataatgctgcaaatggctctataatgcatgagcaaaccatacggtcaattcctgtcaggagagaatcattagcagaagagcctgcggtgaaaagacgagtacaggactttgatttgaacgattcatgcattgaagaagccgagagccgaacagataaaattgcgttcaaactctttggaaaagagccaaaagattttcctgtttatctacgggaacagatcctaaactggttgtggcattatccaactgatatgtaaagttatattagacctggctgagttattctaactatttaccttgacctccctaattggatgtgtgatgagtttaatgatgacccaagttcatggatagaaaatcttattagctcatccaatgatggattctggagaacaggatggt

SEQ ID NO: 3483 - DNA, 1987 bp, Zea mays
  Clone ID: TF_ZmC37965_1
gggcactcggtccacactccgaccctcagtcctcactcaaccactgcccgccagctagctccagcagctagatcaggtcgaccgtcctcccgatccacccccgtgctccgatccaccacacgagctggctagctagccagagcggcggcacgcaggagatgatgagcgggaggctgaacgcggccacgcccgcctcgccgggggacgacttctcgttcgcgcccatgcagatgccgccgccgccgccctacgtcgggttcgagcacggcggaggcggccagcgcggcgccggagcgatgcaggcgcagcagcaccacctctacgacggcctggacttcgcgtcggcgctccagttccagcaggaggcgtcgtcccactcccaccaccaccagctgctcacgttgccgtccagcctgggcccgatggcgccgtcgatgccgatgccgatgccgatgccgctgccgatgcagatgcccgtgcccggtgaccacgtgtaccacccggcgctcgggacgatggtgaagcgcgagggcggcggcgcggacggcgggaggatcggcctcaacctcggccgccgcacctacttctcccccggggacatgctggccgtggaccgcctcctgatgcggtcccgcctcggtggcgtgttcgggctcggcttcggcggcgcgcaccagcaccaggtcccgcgctgccaggccgagggctgcaaggccgacctctccggcgccaagcactaccaccgccgccacaaggtctgcgagtaccacgccaaggcatccgtcgtcgccgccaacggcaagcagcagcgcttctgccagcaatgcagcaggtttcacgtgctgtcggagttcgacgaggtcaagaggagctgcaggaagcggctggccgagcacaaccgccgccgccggaagccggccaccaccgcctcatccaaggacgccgcgtcgccgcctgctgccaacaagaagaccaacggcggctccatcacatgctcttactccactgaaaacaagaacgacgacctgagctgcagggccaagtcgaccatgtcgtccaacacgagcagcgtgatcagctgccagctggaccagcccggcaacaagcaccagctggcgaggccgacgctgactctcggcgcctcgcaggacaacaaggaccaccagcaacagctgagcaccatgctccatgtccaagcggccggcggctaccaccaccaggagcagcagcacttcataacctctctgcaggttcacaacaacggcggtagcggcaacaacaacaacaacaacataatactgtcgtgctcctcggtgtgctccagcttgccgccgcccccgtcggcgcccaacggagaggtctcggaccagaacaccgccgccaacaatggcaacgggaacatgcataacctgttcgaggtggacttcatgtagaccgtggagatcgatccaaagcaagctaagcaagcacacaggagtacgttcttctggcaagctaggtgtccttggtgtgtaaaaggaataggagagagagagcaaaaaaggtatgaagtgggtggagaaacaaggagagaaagagagagagaagggtgcaagtgcaaggattccacccatccatcacactccatatcagtagcagcaagctgcagcctgcaggtctagcaaaggtagctacgtaccctcttgtttgcaaggttccatggctatagcaaagccatgcatccgggccggatggatggaaggcccccattacagtggctagctgcctctctcaaccagtctacctcgatctactgcgctgctgctgcagctgcatccatcgcaagcctttctacctttccatttcaagcgggggggaatagttaacagtggctgtgtttcacttgtttttctccactagtttttcttttcttgttgcaaggtgcacgagggtgcagtgtgtgtcgtactaataccaaactacctgttcaaaaaaaaaaaaaaaaaaa

SEQ ID NO: 3484 - DNA, 1411 bp, Zea mays
  unsure (1)..(1411): unsure at all n locations
  Clone ID: TF_ZmC229717_2
ttnttttttttttttttttttttgcaatgatacaatctactgttttaactttgcctaaccatacagattattgattgtaaaatgcaataatttaaatttagatatatccaaatgctctagaattgaattttacaacgcgcgcagggcgcgcgccatccactagtaaataaataaaacgaggaaagaagagggaactggtgcgatgaccactagtacagctgaaacgatagactgctggacgcttgaattggaaagctagctactgccacgagaacgggagcgaaggggacgtcccgtcggaggagccgtcgccgccgacgtggaatatgccgtggtagttcatgttcatgtcgtggccgccaccgtcggagctcggcaccagcacggtgttgagctgctcgctctccacgcccggggggcaggcgaaaccgccggcggagacggcgctggagccggcctgggagcaggcgaaccaggcgggggagccgccgaacgggtggtgctgctgctgctgctggaggccgccggggacgaggggctgcgccatggggatgtgctccgcgggctggtggacgaccatccggcccacgtcgacgctggaggagttggcgggggatgacagaagagagagagcacaatccgagtcgagcacggcgggggcgagcccgtcggagaacatcttgttgctgctgctgctctctggcggcggcggtggggcggcggcggcggcggccttgaggaggggctggcacaccgtggacgtggaagagacctcgagctgctgcgcccccgcgcccgcgcccgcgttgaagccgccgacctgctgctggtcgcagccgtcctggaggaacgggaagcgccggccttccttggacgagtaggccggcggcgtggagcccccgccgccggcgaagtgcggcctgctgcttaggaccgggtggcgctggtgcgcgtagtatgagccgctgtcctcggatttgatgactccgggccagctcggctccggccttggaaccgggaacgacgagaacctagtccctgcatgagaagtcataaagctcccagagctcatggtatctggctgcggcttcctgcgacgccggttgtgcccatcgagcctctttctacagctgcgcttggcctcgtcaaactccgcgagcaagtgaaacgtatgcaacaacttgaaaagatggggcttgaagatttgagggttcttgtcaaagcaaaaaactactgcacagatcctgcgtcctctgtgttttgtactggcgcagagaagcaccaatttgatgactgattcagaacctcatcccagatacaagttccaattcatcgttttcacttttaaaacttagccgaagacgacgaaagctatacaggcgtgaggaggtaaggtcccggcccggccggc

SEQ ID NO: 3485 - DNA, 116 bp, Zea mays
  Clone ID: TF_700381372H1
cgctgccttatgggacccaggccctgaagctgcacgcctgcgtttccggtgcttccgctatgaggaggctacagggacccaacaggcactggctcagctccgatagctctgtcgcc

SEQ ID NO: 3486 - DNA, 1500 bp, Zea mays
  Clone ID: TF_ZmC1439_6
gaactactctcaccattaactataacaaattttgtcaccaaaatttggtggctggtggatctacttaagaatcaaaagtcagacaaggtggacatcaccatccaaccggaggagcaggaagccatgaatgatgttctagcagccagccatgaccgcgtccacgtcatcaactttgacatcaagcaggggctacagtggccgggcctcctccagaaaaagaggaattgaagcagtatctgactcgaacatttttgtagaaaacttggtagaaaaagaggaattcctgcatacattttcgaaggaatgtgaatatatcagaactgcagtgacaaatggtagtgccattaagcatgatggctcatatgaatcagatcctgcagttgagattgttcgagttgaactccaaggtgctgctgcatttcttttattctcgtctggtacctcttgtacttcttctggttgaaggttccacgcctatatatattggagaacatggatgggaaatgcttctggtagtaaaaaaggcaacacaagaggctggttcaaaatttgaactgctaggttttgcatctgtgcataacttctatcattatcctgagagtattcgcttacgaatcagccagatacttgtgttgccaccttatcagggtgaaggccatggtcttggtcttcttgaagcaatcaattatattgcacagtctgagaacatttacgatgttacaatagaaagcccttctgattacctgcagtatgtgagatcatccattgactgcctctgtttgctcatgtttgatccgatcaaacctgcacttggtgctattgtctcgtctctgaaggagaccaacctgtcaaaaagggcccaaagtttgagaatggttccaccggttgacctgatggagactgtccgttagaagctgaagataaagaagaaacagttcctccggtgctgggaaattctggtcttcctaagcctcgactctcaggatcataagagcatggacaacttcagggcctgcatatatgacctcatgaagggggagatccttggcagtgcctctggaactaacaggaagcgtctattgcagatgccaaccagtttcaataaggaggcatcttttgctgtgtattggacacatgagattggggatgtggatgaacaaactgtttagcagcagccagaggatctcaggacgcaggagcaacagctcaatgagctcgtggacatccaaatcgaggagattgatggggtcgccaagaacgtcacttcacgtggcaaggataagatggcagagctggcggttcaatgaatctgggtgaggttcctacttcaaacgatgttaaaatgttgtcgtagcttatctggtgaggtctcttttacgagttggcttcttggtagaaagggaatgtcacggcataggcactgagtagattgtcacgacagattattatatacttcaattctggaatatttgatggaaatgctattttagattgcttggt

SEQ ID NO: 3487 - DNA, 1036 bp, Zea mays
  Clone ID: TF_ZmC79675_1
gacccactcgtgcggtcggcccttttttttttcttttccatggataaagaacatcagtttctcatcgtgtattgaacattacattagtttcccgtgacaaaaaaggacatgagggaaaaaacgatgaagatacaacaagaaatcgaaaccttctcatgctgttagattggttaactgacctacacaatttgtcaaacaactcaaccaagcactacgtgagggccttattatacaagtgtgttcaagcacatataacagcttgagcgactagaagcatgcgcgagctcatctctaagctttgagctctttattcatctaccctccaccgtgtgtatgctatctatggccagcatatagtggcagtaccgtatgaatgtgcgtgcatgccagacaaccacggtattgggtggtatacgtatacgtacctctccgtctgccggcgcagcggaacgtggcgagcgcagcagactagcacttccagcaggaggcggcaatgacgggcttgcccttccagccgaggacgaggcaccccttctcctcagcaaccgtgtacccgccgccgccggcgttctcctccagccactcccgcgccctggccgccatcctgatcggcatggactggaacccggcgcggctcatgcggcggcgccactggtcagcgcgctcgtgccgctccacgcgcgccgcgccctcgcagccgaccacgttccggatctccgcgccgaagtggaactgctccacgcgcgcgcggcgcgcgtcgtagcgcgggagcgccgcgtccagcgcgtcgaacacggccgcgtagtagtggagcgcctccatgaaccggcccaggaagaagggcccgttgtggccggcgtcctgctccacgaggacgaacgccttgggcgacaacttgcggatggtctggagcacggagttgagcgccccgcggctctccttcaccacgcagtgcagctccaggacgctgttgatggccacggcctcgtcggcggcgatcccgaggtcgtcgatgtgcaggctctcgagactgcgg

SEQ ID NO: 3488 - DNA, 848 bp, Zea mays
  unsure (1)..(848): unsure at all n locations
  Clone ID: TF_LIB4976-049-A1-K1-B8
attcccttcaagctccagatcgtttctagctaaatacaaatcgactacagttacatagatctctgctcctcccactgaaatattccttgtacttgatggccttctgtcttctccattctcgctggtcgttcctctcccggccctttggttcccgaagttctaatggcatggggaaccacgtgtagggcgttgtagagcacagccctctatatatgcttagtacaagcaccaaatccgcacctcaaactactcaacgtgtacgagctctctgcctcaccgcgcgcttttctaatcccgccgccgctagctgcctcgctgctggtttgttgccttctactacgtacctcgccacgcctgcctcggccccccctacatgatgcagttcacgcacactgcgccaccgccgccgcctctgcaccctaacggacatgctggagggctagggctcgggctgttccttgacgtcggcgcgcccagggccgcacgcccctggccggggagcttcccgacgcctgcgtccaagatctcgctcggcaacctcaacagcaccagctgcatggagcagctgctggtgcactgcgccaacgccatcgaggccaacgacgccacgctcacgcagcagatcctgtgggtgctcaacaacatcgcgccgccggacggggactccaaccagcgcctcacggccgcgttcctctgcgcgctcgtcgcgcgcgcgtccgggaccggcncggtgcaaggggttcaccgccgccgtcgccgncgnncgtcgagtcggncgcgctcacgtgaccggcttcacggccgtcgagctcgccagcttcgtcgacctccgccctggcaccgcttcg

SEQ ID NO: 3489 - DNA, 919 bp, Zea mays
  Clone ID: TF_ZmC189640_1
tgacgcgcttcgccgccgacctcggcatctcgttcgagttcaacgccgtcgcgttcgaccccttggacccgttgccccccacggggctgtccgtcgcgcccggcgatgccgtcgccgttcacctctccgtcggctccggggtcccgtcggcagctactttccgcgtcgtgaaggagctccgccctgccgtcgtggtgtgcgtcgaccacggatgccaccgcggcgacctgccgctgtcgcaccacgcgctgagcgtcgtgcgctccagcgcggcgttcctcgagtcgctggacgcggccggggcgccggcggacgcggtggcgaggctggaggagtacgtcgtgcgtcccagggtggagcgcctgttgctaggcgacaggatgcctccatggcggaccatgcttgactccgccggattcgcgccggtgcagctcagcaacgccgccgaggcacaggccgaatgcctcgtcaggcgcacgcccacgccgggcttccatgtggagaagcggcaggcggcgctcgcgttgcggtggcaggactcggagctggtgatggtgtcggcgtggcggtgctgaatcggggcactgggacagttcctgtaaagattgaacctttttctgttctcatgtgcagtaaaattagctagtaacttgttgtcaagctgtttattttacaattttagttgcgatgatgtagcaattgggagcatgtgaattttcatcatctgtgatatgacagttttgaggaacgattggaagccacagatctgcagctaatagccccatttgccatgcccatattcctgcagttagttgctaggtccattaattgttagcattagttgggcatgcatgtggtccataatctacatttcagatcaaaaaagagcaagtacaaaaaaaaaaaaaaaaaaaaaaaa

SEQ ID NO: 3490 - DNA, 649 bp, Zea mays
  Clone ID: TF_LIB3918-030-Q2-N1-H7
ttttttttttttttttttttttttttttttttttttttttttttttttttttttttttttttttttttttttttttttaacggggcccctggggggcatcactataaaaaaacggggcaaaacatgctttaaaagttaaaaaaacacacccaacccaaactatatggggcaccccaaaaacaacccccccaagcatccaaaaaaacaaacgggcccccatccattaaaaggggagggctcgatctgaaaccatggaccccccctcgagggggagctaaaaaaacctgggatcgggcttccacggggaaagccccaaaacaaggcgtcctttccacccttgaaaaaaccaccgggggtttttgaaaaaaagaaaacccttggggaaacacctgaccttttgggaaacccccttaaaaaagccctggttgaacgggagctgcctaaacccaattttttgaaaccccacccgccactggttgaatgtttggggcctttccattctttcaaggccctggaaggaaaaaacggggatggcccttcaaccaaacaggggtgactcaaaaaacaccctttggtcggggcccctggggaaggtcccccccaacatgtaaaaaaggggggggaaggggaaaaaggccccccggaagcg

SEQ ID NO: 3491 - DNA, 299 bp, Zea mays
  Clone ID: TF_LIB3116-007-Q1-K1-E8
tcggtcaacctggtggcctgcgagggctttgagcgtctggagcgagacgaggtgctggggaagtggtaggcgctcctgaggatgcccgtgttcatagccgttccttctcagtatacttgttaatttcactattaatactctgctgcagagctactcggtctactacaagcttgactaaagggaatgcgtgctatacctccattggaagaacatgccccgtattgttttatcggtatgtgctttatgttgacttcgagagaatgatcgtctcttgcaaaatgattcttgtgactttctac

SEQ ID NO: 3492 - DNA, 1959 bp, Zea mays
  Clone ID: TF_ZmC1583_5
gcgccgtcccttctctgcatcccgccccgtcctcccaaccgctccaccgacagcctgccatccccgcgagccccgcatccctggatcaccgcgcccgcgcctttgatggaaggcgattcctcaatgcgcgtccgtaaaccccgccccgctccgccattcctgcgccgatcgcaggcgagggcgtgcccccaccccagtcgtgcgttacccggcgcccagcccccgcctcccgagcccccagatcacgtcgatccaccattcttgcgccctcacctccctagacctcgccccgtcctcggcgcctgttctccactgaatcgcatctgccaacgaggatttgcgccgccatgtcgtagatcccccaccccttctgaccccccatcttacaacgtggtggacgaggaggacgagccgacggcggtggcggaagtcggtcttgggccgcgatggcgtcgagcgccggcggcgcgtcgtcgtcgttggggaagaacttactataaattcaggatgagcttgcggcagaggcaaaagcggctgaggtcggcaactccatcagcgggcgcgagatattggtgcggctcaatcagcagcttcccccaatctggaagcctttcctccgctccgcttcctacctcaaggaggccctcctcctcgcgctcaccgacggccaccgaggctccactcacctatcctcccctctcgacgtcgccctcaagctcggtgcatacaagtccttctccgacctctcgcctgtgctccagttcgccaatttcacgaccacccaggcgctcctcgatgagatcacctcaacaacttcatcttgtatccacattattgatttcgaccttggtgttggcggccagtggacttccttcttgcaggatcttgcacactgccgtggaactgggaacgccccctgccaatgttgaagctcacagtcttcgtctcaagtgcttcccacaatccccttgagctgcatcttactcgggagaacctcacgcaatttgttgtggaccttggcattccatttgagttcactaacatcaatcttgatgtgtttgatcccacagaactcattgctcctagcccaatgaggttgtggttgtttgcctccctgttggttgctctgcacgcacgccaccgctccctatgttgcttcagttggtgaaacagcttgcgcctaagattgttgtggctattgaccatggcagttaccggggtgacctcccattttcacaacacttcatgaattgcttccagtcttgtatgttccttctcgactcacttgatgctgctggcaccaacgtggatgctgccagtaggattgagaggtttctgatccaaccgagagtagaggatgcagtacttggccgatggaaagctgaaaaagcaatggcttggtgggcagtgtttacatcggccgggtttgctccggtaccgctcaacaacctcgcagaagcacaagctgactgcctgttgaagcgcgtgcaggtctgaggattccatgtggagaagtgtggaatgggtctagcactctactggcagagtagcgagctcgtgtctgtctcggtatggtggtcctgatcatacggactccatccatcaaccatcatgacacctacaccaatttgcaggcatgtttagccctggtaatgtgcattttgtcttgcaatttcaaacatcgcgaagaaaactattgtattggttgttccacgcctctgattgctttgctgatgttggagtactgcataggcctaatgaatttagccagtatggtgtgggaatctctacaatgtaacatgttggtctcttaactctgttcttgctctcttcttggttagccagaggacaatttggcaaatctgtggcaatgatgttgttattttactaggtaattcagatgaaaactgaaatggactgaaatggttgggtatattaactttcttggcttcatattcc

SEQ ID NO: 3493 - DNA, 227 bp, Zea mays
  Clone ID: TF_700051838H1
acgatgacgttctcaactccgggcggttggatgcgcggttcgtctctcgcctcggcactacgccgcggcgttcgacgccgtggatgcggctgtgctggcggacgtcactcctcgatggtcaatgcgtatgagatgttctcgcgggatattcgcaacgctgttgcgtgcgaggccgcgtaccgcttcgagcgtcacgagatcttcacctggtggcttcacgcatgtag

SEQ ID NO: 3494 - DNA, 148 bp, Zea mays
  Clone ID: TF_LIB3069-022-Q1-K1-E10.R1
ccctgaagtcttacatgggcagttctaggagtcgtgaccgtacctgaagtttgagcatctgatcgcgaagcaggccatagtcgaagtctttgccggctgccgcgactcccacgtcgtcgacttcggcatcaaagaggggacgaagtgg

SEQ ID NO: 3495 - DNA, 328 bp, Zea mays
  Clone ID: TF_LIB3245-575-P1-K1-B1
cccacacccacagtcattgcacatagctgtatgaggactgtatgttgctgggcggtgggtggagaagtttgttgagcactgtgctgcccggttcgcattcaggacactggctgctaacattgaatattttactgctggaatgctacaccgacgtcccgtacaggccctgattgttaactctgcattgctgatacaccaccttcctgatgaaagtgtctcaattatgaaccaacacgatcgacttttctatatggcgaacgatcttctaccaaaactcgttacccttggggagcatgtctcaaatactaacacttcctcattctattcc

SEQ ID NO: 3496 - DNA, 783 bp, Zea mays
  Clone ID: TF_700205405_FLI
cgcagagctcattgctcctagcgccgatgaggttgtcgctgtttgcctccccgttggttgctctgcacgcacgccaccgctcccgatgttgcttcagttggtgaaacagcttgctcctaagattgttgtggctattgaccacggcagtgaccggggtgacctcccgttttcgcagcacttcatgaattgcttccagtcctgtatgttccttctcgactcactcgatgctgctggcaccaatgcggatgctgccagtaagatcgagaggtttctgatccaaccgagagtagaggatgcagtgcttggccgtcggaaggtgaaaaggcaatggcttggcgggcagtttttacatcggctgggtttgctccagtgccactcagcaaccttgcagaggcacaagctgactgcctcttgaagcgggtgcaggtccgaggattccatgtggagaagtgtggaatgggtctagcactgtactggcagcggggcgagctcgtgtctgtctcggcgtggcggtgctgatcatagcaacctcatccgtcaaccatcgtcgtcgtcgcgcctacactattcgcaggcatgtttaactccggtaatatgcgttttatcttgcaaacattgcaaagaaactattgtcatggttgttccacgcctctgattgctttactgctgtttttggagtattagctaggcctaatgaatgttgcaatcttggtgtgggtgtccccctacaatgtaacatgttggtactagggtctcaacgctgttcgtgctctcttcttggtt

SEQ ID NO: 3497 - DNA, 1005 bp, Zea mays
  Clone ID: TF_ZmC1583_2
gagagaaagaaagaaagaaagggaaggcggggggaggccggccaaggcaccaccacaccaccacccgacgaattcaagcatgaggccgcagagcgcagagcagggctgccgccgctgccgctgaggagcggctacagagtgctatacctattacacagcggcaacaggcacgcacgccaccgctcccgatgttgcttcagttggtgaaacagcttgctcctaagattgttgtggctattgaccacggcagtgaccggggtgacctcccgttttcgcagcacttcatgaattgcttccagtcctgtatgttccttctcgactcactcgatgctgctggcaccaatgcggatgctgccagtaagatcgagaggtttctgatccaaccgagagtagaggatgcagtgcttggccgtcggaaggctgaaaaggcaatggcttggcgggcagtttttacatcggctgggtttgctccagtgccactcagcaaccttgcagaggcacaagctgactgcctcttgaagcgggtgcaggtccgaggattccatgtggagaagtgtggaatgggtctagcactctactggcagcggggcgagctcgtgtctgtctcggcgtggcggtgctgatcatagcaacctcatccgtcaaccatcgtcgtcgtcgcgcctacactattcgcaggcatgtttaactccggtaatatgcgttttatcttgcaaacattgcaaagaaactattgtcatggttgttccacgcctctgattgctttactgctgtttttggagtattagctaggcctaatgaatgttgcaatcttggtgtgggtgtccccctacaatgtaacatgttggtactagggtctcaacgctgttcgtgctctcttcttggttagccggaggctactttggcatatttgtggcaatggtgttcgttattttactaggtaaatcagatgaagactgacatatgaactgaaatggttgggcattttttttctttcttggcttc

SEQ ID NO: 3498 - DNA, 180 bp, Zea mays
  Clone ID: TF_LIB3136-038-P1-K1-F6
gcggcgccgacgccgcgcagtgggtcgagctgctgcacctgctggccgcgcggcccgagggcccgccgcacctccgccttaccgccgtgcacgagcaccgggacgtgctgacgcagacggccgtggcgctgaccaaggaggcggagcggctggacgtgccgttccagttcaaccccgtgg

SEQ ID NO: 3499 - DNA, 2270 bp, Zea mays
  Clone ID: TF_ZmC3661_2
gccggccgggccggccggtcgcaacactggttcacgtccgtccacctctctccgcctttcctcttatcctcccgtctcgcgccgtcgcgcgtctcgggtctctcttctctctctcggctctcgcctccctcccggtccgggtcgctcgcaggtcgcagccaccagtgcatttttatgcgccgcgctggtggttttggggcgcggagtccatatccatggtcatggacgctggcctgcacgagccgtgcgcgctgctgccgggatccaagcgcgacagccacatgctagtctacccccaaatcgccgccgccgctaatgggttcacggcgcaggagctcgagtcgctgctgttcctgtcgcctgatgggattactttggctgcgggcagtggcggtggcggcggcggcggcagctatctgaatgtcgcgcctaccactgtggtcccgcccgccccgaccaaccgcgcgtcgccgccgagggatgtgtccgccgcgccgccctcggtggggcagccggatgattcggaggcgttctcggacatcgtcctgggctacatcaaccgcatgctcatggccgaggacatcgacgataagttcgagcactacccggagcaccccgcggtgctcgccgccgagaagccgttcctcgagatcctcgccgagcggccctcgagctccggtggcagcgcggtggagagcccgggcggcagcagtgtggggaactcttgctacagcgcgcgctcttgcacctgcgccaccgccacggcggcgtccgacgcctttggcgccgtgctgacgccggcgctcgacttcccgtcggccgcgttcctgcagccaccacagctgtaccaggatctaagccctgagggcagcgtggtggatgcaggcggcgcgtggccgtacgactcgacggaattctaccagctgcacagcaacccgtcgtcgttcgcgtcatccaacggcagctgtgctacaatatcagacggctttgagtcgttgctgagctcgcctggtgtcatgccagatgttggcttcgccgattttgcggtgcagagccagcaggctatgcagttctgccgtgggttcgaagaagcaagcaagtttctgcctgacgagagtaagcttgtgattgatcttgagaagccagcatctgttacaagcttggtggctaacatcaaaggggagaacaggtttgcagaggtcaaggcagagaaggccgatgttcaggcagaaattcacagaggaaagaagcatttctatggtgatgacttggatgcagaggaagggaggcgcagtaaacattcagcacccgctatcgacactgatcaccttgtgcgggagatgatggacaaggtcttgttgtgcaatggcgagacatgttcaaaaggcgtcaaggaactccgtgaagccctgcagcatgacgtggcaaagaattcacacggggttcatggaaaagggtccggacatggcaagggccgtggcaagaaacagccgaagaaggaggtggttgacttggagactctcctcgtccactgtgctcagtctgtggccaccgatgatcgacgtggtgcaactgagctcctgaagcagatcagacagcatgcatcgcccaatggcgacggtgaccagcgtttggcgcactgcttcgccaacggccttgaggcgaggcttgctggcaatggaagtcagatttacaagtctcttataatgacgaaagacaacaggtggttactgcaagggtggaaaggacgcatcgtgctggcgctctcaacgtggaagccagaccacaggtctccctagcttcctcgagggcggctacatggttgcagatcgagcactgcactgtagatggagaggcctgttcgtatctttggatgcttgggctggttgttcctgggctgcaacatatagctaggctaggcttgtgctattcgaactactaaagcatgttttgcactgtctttatatagtgatgccatcaatggtccctgcatgttaggttatggttcagttttggacaggaacagttagtgcattctttgatggaacagcaggctaggtatgttagggaaaaaaatttggtgcagcactgctgcaaaccagagtggttgcagcccctcacaaaaagaaggatagaccccacccgtattttttccgtatgttagttacgcacgcggtagaccctagtgttgtttcatgcatggatcagtcttatggattcttgtattatatctgttcccccattaaccagtgctgtcaaagttttgggct

SEQ ID NO: 3500 - DNA, 677 bp, Zea mays
  Clone ID: TF_ZmC5037_1
ccccctataaatacttcccaccaaacatggcatgtttccttgagttccttattatgcatagaaaataaaataaaataaaataaaaacatggcatcaggcttcttcctggattggccaaatggtcacagtgccatgccatgcaaacggcggtagaagctagctagccagaggaaagacgatgcatccgtacgtatatcttgttgtttgtctgaagctatagctcggccttgatgcttctagttggaatctgcgcagagagccctttgatttgatgatgacgtactgatcgtgtttcactctcgtggttgtatacttgtattccatgaaggtttttggaggccctgcactactactcggcgatcttcgactcgctggacgcgacgttcccggcggactcggcgcagcggatgaaggtggagcagtgcctcctggcgccggagatccgcaacgtggtggcgtgcgagggcgccgagcgggtggcgcggcacgagcggctggatcggtggaggcgcatcatggaaggccgtggatttgagcctgtgccgctcagcccggccgccgttgcccagagccaggtcttgctgggcctctacggcgccggcgacggctaccggctcaccgaggacaggggctgcctcctcctcggctggcaggaccgcgccaccatcgcggcctcc

SEQ ID NO: 3501 - DNA, 995 bp, Zea mays
  Clone ID: TF_ZmC5771_4
cggacgcgtgggcggacgcgtgggcggacgcgtgggcggacgcgtgggcggacgcgtgggcggacgcgtgggccaggctgtgctgcgagcccggggaggcggtggcagtcaacctcgccttcgcactctcccacgtgcccgacgagagcgtctctccggccaacccccgcgacgagctgctccggcgcgtgcgcgcgctgggcccgcaggtggtgaccctcgtcgagcaggaactgaacaccaacacggccccgctggcggcgcgcttcacggacgcgtgcgcgcactacggcgccatcctcgagtcgctggacgcgacgctggggcgggagactgcggagaaggccagggccgaggcggccctgtcgaggaaggcggcgaacgcggtcggccgggatggccccgaccggctggagcgtgcgaggtcttcggcaagtggcgcgccaggttcggcatggcgggcttccgcccggtgtcgctcggctcgagcattgcggaacagatggtcgccccccgcgtcggcccggtgcctcccgggttcacagtcaaggcggagaacggcgtgctccgcctctgttggatggggcgcgtggtgaccgtcgcctccgcgtggcgctagaccaccaccgggacggcgggcggccgggcgcgccattattgccgtcactaaatcgagaagatgacattctctctgattcattcatggtgatcctattcctggtgctggtaggaggagtatgtgctttgtacagtcgcggtgctgcctaactagtgggcgcggcgcgaaatgtgcagctgggcccgactcctttcttgtcgattaatgtttgtctgccacgtaggtagatgagggtttctttgtggcgtacaagtgtaaggtaggtggaggtgaatagcggttacggaaattgccacttggaagtagtttgtggttcggtgagttctttctttgcatccttggtggaatcgatccgttaaataaatattttgggatt

SEQ ID NO: 3502 - DNA, 830 bp, Zea mays
  Clone ID: TF_ZmC1310_2
cgaaagcccaagggacattgggctcaacaacatcagaaatatgcggcctcatacattcatacacgcaattgtgaatggctccttcagtgcgcctttcttcgtgacaaggttccgggaggctctgttcttctactcggccttgtttgatgcgctggacgcgaccaccccaagagacagcaaccagaggatgctgatcgaggagaacctcttcgggagggctgccctgaatgtcattgcgtgtgagggcacagaccgagtggagcgccctgagacgtacaaacaatggcaggtgcggaaccaacgagcaggcttgaagcagcagccattgaaccctgatgtcgtgcaggtagtgcggaacaaggtcaaggattgctaccacaaggactttgtgatcgacgtcgatcaccgctggctcttgcagggatggaaaggccgcatcctctatgccgtctcaacatgggtggcaaatgatgccccctcttacatctagctgttctgttgactcacttgtctacaaattttaggtttaggtatgtcatctggatatatctagtgacaagtgtgttcagtgggttacatggactcacttgtgattgatggtaatgcgaactagatgcttatcactcaaccatgttgttgcatagtgctaaacatgattagatctaggtcctgggtctgggcaatgtcctctgcagcatctgccgtgtttgatcaatccagtcagttgatcaggttgtaattgacacttggtcctctctgtttccggtgtgattactgcgctgtttcagacttcagaatcgttatcatgaactgatggattttgtctgtct

SEQ ID NO: 3503 - DNA, 2398 bp, Zea mays
  Clone ID: TF_ZmC5771_1
gaccctcgggctcattcctccctccctccctccctcctcggtagattcgtctcgtcaccttcctcctcctcctctctttctgctctccctgccccgacctgccccgccctgcatggagccaggcgcgccgtggcgcgatccgcgccagggttactcctacggggtcggatcggcgatgcagctccagctccagctgcagcagcgggccgacgcggcagccggtggaggagtgctcaagaggagcctcggcgagctggagaggtggcagcaccaccagcagcagcaggtggccgcgcaacaggcgctgtacctgcgcgccgtgaggcagcgcacggctgcggcggtcgatatcgccgccttgctgggaggcaccccggctcagcctctggttctacccgggtccagctttggagggggcctagcgtcgccttcgtcgacgctctcgtcgtcgctcaccaccgcgtccagggcggcggtgccgctgatgcagccgcagctgcagcggcaggtgccgctcacgacgtcctcaccgcagacgcagcccttcgggctgtcgacggcgccgctgcctcagccgtcggtttcgagcgagctgttcattttgcaggagctcgagaagcagctgctggacgacgacgacgacgacgagccggttgcggcgatgagcggcaccggttccgccgtcaccaactccgagtgggaggagacgatacagcagctcagctccatcgcagccgcgccgtcgcccgggccccctgcagcggcgaccccaaccaacaacaacaacaataacgtggggatgacgaggtcaccttcaaactcctcctcctccaccgcgtcttcatccgcgtcctgctcgccgccgacccccggggccgcgtcgaggcagctattgtctgaagccgcggtcgctatcgcggacggccgcgcacaggctcgggatgacgaggtcaccgtcaaactccttcacggcgtacttgatatcgtcctgctcgccgccgaccccaggggccgcgtcgagctggttatcccctggtctagctctggctatcgcggatctcattcatgaagcgtcggccagccatctggccgccctgaagcgcgcggctaaccagcacggcgatgcggaacagcggctgattgccatgatggtggccgccctgtcctcccgcattgctccggccgcctccgccccatctcaactcctcgccgacctctgcagcgtcgagcagcgcgccgggtcccaactcctacaggacctctccccgtgcttccgcgtcgccctccacgccgccagcgccgccatcgtcgaagcggtgggcgaccaccgcgccatccacctcgtcgacttcgacgtcagcttcccgcagcacgcggctctcatccagtacctcgccgaccgacgcgtgcagggcaggtccctgaaggtcaccgccgtcaccgacccgagctcgccgttcacgcagtctctaaccgcatcgctaccagccatcgaggagcggctgaagaagctcgccgagcgagctggcgtggagtaccgctttacagtggtcagctgcagagcagcagagctggatgcgtccaggctgtgctgcgagccgggggaggcggtcgcggtcaacctcgccttcgcactctcccacgtgcccgacgagagcgtctctccggccaacccccgcgacgagctgctccgccgcgtgcgcgcgctgggcccgcaggtggtgaccctcgtcgagcaggaactgaacaccaatacggcaccgctggcggcgcgcttcactgacgcgtgcgcgcactacggcgccatcctggagtcgctggacgcgacgctggcgcgggagattgcggagaaggccagggccgaggcggccctgtcgaagaaggcggcgaacgcggtcggccgggatggccccgaccggctggagcggtgcgaggtcttcggcaagtggcgcgccaggttcggcatggcgggcttccgcccggtgtcgctcggctcgagcattgccgaagagctggtcggcgcccgcgtcggccatgtaccgcccgggttcacagtcaaggcggagaacggcgtgctccggttctgttggatggggcgcgcggtgaccgtcgcctccgcgtggcgctagaccacggcgggcggccgaccgcccgcccgggccattattgccgtcactaaattgtcagttacataattcgagctattgctttcctcgttctcccttcttcctttttttttaccttgattgggtgaggagtgatgagtttgccatgatctggtaaaaatccttcctagctgtagcgactcataattcttataactgctcatagtagtatatggaaaagagtaagttatatcgcaatctcctcctaattttgtgtggcatgttggtagaag

SEQ ID NO: 3504 - DNA, 1672 bp, Zea mays
  Clone ID: TF_ZmC14418_1
cgccgcagccgaagcgaccacacccgatggccggggcgccggcgccgaagctgccgtctttccctgggcctgtcgcccaggcgggcggcgggttcgtgtcggccttgaagcccaaggcggaggcgggtaacgacgaggcggccgctgcggtggaccagcttgccgaggcggccagacttgccgaggccggcgacgccttcggcgcccgcgagatattggcgcggctcaattatcggctccccgccgtgcccacggccgggacgccgctgctccgctcggccttctacttcaaggaggccctgcgcgttgcgctctccccgaccggcgaggcccttgcgcccccggcggtgtcgacgccgtacgacgtggtcctgaagctcggcgcgtacaaggccttctccgaggtgtcccccgtgctccagttcgcgcacctgacctgcgtgcaggcggtgctggacgagctcggggccgccgggcgcatccacgtgctggacctggacatcggcatgggcgagcagtgggcgtcgctgatgcaggagctggcgcagcgcagccccgcggcgacgctcaaggtgaccgcattggtgtcgccggcgtcgcaccacccgctggagctgaacctcatccacgagaacctgtcgggcttcgcccgcgagctcggcgtgttcctccagttcgcggcgtacaacgtggacgccctggaccccgcggagctggtggccatcaccagcggcgacgccgtggccgtccacctccccgtggggtcggcccacgtggccgcaatgccggccgtgctccgcctcgtgaagcggctcggcgccaaggtggtggtgtccgtggaccgcggctgcgaccgcacggagctgtcgttcagcacgcacctgttacaggcgttccagtcctgcgtgtccctgctggactccatcgacgccgtggggggcgcggacgccgaggcggtcggcaggatcgagcgcttcatggtccagcccgacgtggagcggcgcgtagtgtcgcgccaccgcgcggcagtggccgtggacaagccgccgccgctgccgtggcggaccgtgctcgcgtcggcggggttcgtgccggtgcaggccagcacgttcgccgagtcgcaggccgaggccctactcaagcggatggcgctgatggggttccgcgtcgagaagcgcggcggcgcgctctgcctctactggcagcgcggcgagctggtctccgtgtcggcgtggcggtgctgaccgccgggagtacgccgccgccgccgcaaccaagagccagccgtgaatctaccacaagcccgggttagctaggactaatgatcctactactgcaagcaaaaaaatattttccaccgtcgtcgtttgtaacgatctcatctggtctggtctcgtctgtctgcttattagtgtgtcctacccgattaatcgtggagtacgtcgtccgttgcctggctttgcagcctcggtgggctctgctcatgttgatttgcggagcgcgccgtggtttgcaggttgtaaaacgtaggcgtggtgcagtgcagtgaccagcgcatcctaccgcccgtcgtgttgctactcttttttttccattgctgtgaaatcaattaatggttatggcgtttgaaaaaaaaaaaaaaaaagcggccaaaaaaaaaaaaaaagccagt

SEQ ID NO: 3505 - DNA, 291 bp, Zea mays
  Clone ID: TF_701163921H1
cgagcttcctcggcgccgtcaaccacaggctcaaaccaagcatcgttgtcgtgatggagcaggacgctgaccacaaacgcccggcggtctccggccggcttggttgaggcgttcggctactacgcagcgctcttcggacggctcgacgccgtggcggctgccactgccactgccagtgccgccggcgaccgggcgcaggtggagaggatgtgcctgggggaggagatcaagaacgtgctgctctgcgaaggagccggccggctcgagcggcacgagaggctcagccagtgg

SEQ ID NO: 3506 - DNA, 1324 bp, Zea mays
  unsure (1)..(1324): unsure at all n locations
  Clone ID: TF_ZmC586135_1
aacctccaccccacccattcctttccttcttcccatcctcttcctcctcccccgctccccctcccgctccatctccttccattcccgtcccgcctcccgccctctccgtccggtctccgcttccctgctcgcgccgcccggccggctaatcaccccgcatcaaagaaaattgcattggttttggatttaatctgaggttctgaagaaagaaggcctcaggatatttagcttggcaggcccgtaggtgcttgagaggagctatgtcttttgtcgggcgagtagacccatcaacgacatacgcggataatatttatgtacataaatttggcgcacccaactcaaactttgctgcaagaagatttggctctgacacgcagttgttccgttatggccctgaaccattcaattccgaggactatggacatatgggtttccctgaagcaccatctgctgcattccagagctccttttacaaccagcaagcttcactaacaccctgctctgatgcagcaaaagactcaccggtgtgctccaatatctctcaacagaactcccagtctatatcagataatcagagttctggacttgaagtagagttcgatgatgagatcaggctgaagcttcaagagctggagcatgctttacttgatgatggagatgacatcttgttcgaagtttcccaggcgggttgcatcagtgatgaatgggccgatcccatgaaggatgtctcgcttgcaaattctccgaaagaatcagaatcaagcattagttgtgcaggcagcaacagcggagaagcacggaccccaaagcagttgctctttgactgtgctacggcattagctgaatataatgtagatgaagcacaggcaatcataacggacctccggcagatggtctcaatccaaggggacccttctcacaggattgcagcttatctagtggagggccttgctgcaaggatagtagcttcagggacaggcatctacaaggcattgacatgcaaggaccctccaactctgtatcagctgtcagcaatgcaanatcctctttgagatctgtccatgcnntatcgatttggtttcatggcntgctaattatgccatacttgaagcctgcaaaggcgaagaaaggatgcatattatagactttgacatcaaccaaggcagccagtatanttacactgatgcagtttatgaaagatgatgccaacaaaacacgccatttgagaataactgggtgtggatgatcacgagacagtacagaggactgttggaggtctgaaggtcattgggcaacgcctggagaagcttgcggaggactgcgg

SEQ ID NO: 3507 - DNA, 558 bp, Zea mays
  Clone ID: TF_jC-zmshLIB3569P012b04b1
cccacgcgtccgcgtcgatatccaacccggagaggataggcagcgttggtggaagtggcgctgcggcggtgtcggttggagaggaggcggcgctacggcagtatcggtcgaagaggaggcagcgttcgaggaagcatcttcgtggtggccatccgctactactaggcgttgttcgactcgctggacacgagctacggcgcgagctacagcgaggacagccccgagcggcacgcggtggagcagctgctgctatcgcgggagatccgcaacctgttggtcgtgggcgggcccgcgcccaccgacgacgtcaagttcgacggctggcacagtacaggttccacgaggcctcgctcgccagtagccccgcggcgcaggcgtccctgctactcggcatgcccctctatgcctgctcaccgcgtcagcttcgtggcattaacagtcgtttgtgagttcagttgccacgcagggctaaatcatcagttgttttgcatctgtaactagctgctcgatttggtcaccagttgggagaaaagaaaaggcggagacatttcttctgat

SEQ ID NO: 3508 - DNA, 1551 bp, Zea mays
  Clone ID: TF_ZmC1310_1
gccaagcgcacgtccgcagccgacatactccaggcgtaccagctgtacatggccgccatctgcttcaagagagtcgtcttcgtgttctcgaataacaccatctacaatgccgctctgggcaagatgaagatacatatcgtcgattacgggatccattacggcttccagtggccgtgcttccttcgatggatagcggatagggagggcgggccaccggaggtgaggattactggcattgacctgccccagcctgggttccgccctactcagcgcattgaggagacagggcgccggctcagcaagtatgcccagcagtttggtgtgccattcaagtaccaggcgattgcagcatccaagatggagtccatccgcgtggaggatctgaatctcgatccagaggaggtgctcatcgtgaactgcctataccagtttaagaacttgatggatgagagcgttgtgattgaaagcccaagggacattgtgctcaataacatcagaaatatgcggcctcatacattcatacatgcaattgtgaatggctccttcagtgcgcctttcttcgtgacaaggttccgggaggctctgttcttctactcggccttgtttgatgcgctggacgcgaccaccccaagagacagcaaccagaggatgctgatcgaggagaacctcttcgggagggctgccctgaatgtcattgcgtgtgagggcacagaccgagtggagcgccctgagacgtacaagcaatggcaggtgcggaaccaacgagcaggcttgaagcagcagccattgaaccctgatgtcgtgcaggtagtgcggaacaaggtcaaggattgctaccacaaggactttgtgatcgatattgatcaccactggctcttgcagggatggaaaggccgcatcctctatgccatctcgacatgggtggcaaatgatgccccctcttacttttagctgtttttttgtgactcacttgtctacaactttaggggccagtttggtacggcgcgtgcggcgccacggcgcgcctaagctgcggcgcccgaatcggccgccacacctgcggcgggaaaactatggcgcgccgtggcggcttagtccacgcaccaaacaacccctaggtttaggtatgtcatctagatatatctagtgacaagcgtgttcttggcccagttaatagccatggttacttggactctgcagtatgcctagtgccctagtgagaattcaacatgtacctgttctttccaagggtacattcagcttctgtggaacatgagtgacacacgggggatccagaagtcagaaggcataccgaaatctgtcctttgatttaatgtggattatatagatgctcatcactcagtcatgctgttgcatggtgctaaatatgatctagatctaggtcctggtctggataatgctctccacagcatctgctgtgcgtgtgacctgtgatcagttcagtcagttgatcaggttgtaaatgacacttgttcctctgtttccggcgcttactgcgctgtttcagacttaaccatggctattatgaag

SEQ ID NO: 3509 - DNA, 489 bp, Zea mays
  Clone ID: TF_ZmC26211_1
ggcttaccacgcatcagtgatcaccgagtcactgacgccttgcccggaaccaaattattgaccgacaacgcgatgctccaaggggtgctgtcccgcgcgcccgccaccgacgctgcggcagcaatgaaggccaagcgggcgggcgcgtcccccggtgaagaggaggaaggggacggccgttctgcgcgggggaagcggcagcagctgctcgggcttggccccgccaccgctttggcgtcggcggcggcggcggaggaagggccggagacgcgaggcctgcggctgctcagcctgctgctgcggtgcgcggaggcggtggccatggaccagctgacggaggcgcgggagctgctccccgagatcgcggagctggcgtcgccgttcgggtcgtccccggagcgcgtggcggcctacttcggggacgcgctgtgcgcgcgcgtgctcagctcgtacctgggcgcctactcgccgctcgcgctccgcccgctg

SEQ ID NO: 3510 - DNA, 1688 bp, Zea mays
  Clone ID: TF_ZmC5786_1
gcggccggccaggaggtgacaaagcatggatgctcacaccactcacattgttgcaagaaagaacacttcgctttcattcacctcaaatgagctcatggatcattttcccttcgcttggttacccatggaccccttcacagccatggcgctcagcggtaccctctcaccctcattctctaccacatctaccaatgataccatgtacaaccttaacccagcgttgtatgcatccctcgtgccaccaataaggaaacctgcaaccccgaccacagtagaggtagggaggcaatgcaaggaggaggaggatgcatccattcgcctggtgcacctgcttatcacttgcaccagtgccattgagactggtgactactcgatcgcacaaggaaacttgtctgaggcacgcaagattcttggagaaatcccaacttcgaccgggatcggccgtgttgggaaacacttcatcgacgcactagttcaacgcctcttcccggcatatccgcatgcagcaccaccttctccatctccttctacatcgatcgatctgcacaacaatttttatgatgcaggtccctacctaaagttcgcctactccactgccaaccaagcaatcctcaaagcaatcaaaggatacaaccatgtacacatcattgacttttccctgatgcaaggtctccagtggccggcactcatggatgtcttctccgcccgtgagggtgggccaccaaagctccgaatcacaggcattggcccgaacccaataggtggccgtgacgagctccatgaagtgggaattcgcctcgccaagtatgcacactcggtgggtatcgacttcactttccagggagtctgtgtcgatcaacttgataggttgtgcgactggatgcttctcaaaccaatcaaaggagaggcagttgccataaactccatcctacaactccatcgcctcctcgttgacccagatgcaaacccagtggtgcccgcaccaatagatatcctcctcaaattggtcatcaagataaaccccatgatcttcacggtggttgagcatgaggcagatcacaacagaccaccactactagagaggttcactaatgccctcttccactatgcgaccatgtttgactctttggaggccatgcatcgttgtaccagtggtagagacatcaccgactcactcacagaggtgtaccttcgaggtgagatttttgacattgtctgcggcgagggcagtgcacgcaccgaacgtcatgagttgtttggtcactggagggagaggctcacctatgctgggctaactcaagtgtggttcgaccccgatgaggttgacacgctaaaagaccagttgatccatgtgacatccttatctggctctgggttcaacatcctagtgtgtgatggcagccttgcactagcgtggcataatcgcccgttatatgtggcaacagcttggtgtgtgacaggaggaaatgctgccagttccatggttggcaacatctgtaagggtacaaatgatagtagaagaaaggaaaaccgtaatggacccatggagtagcaggaagaataaccatgtcatgagcaaatcgatcaagtaataaaatgcactgatgacatgcatggtgatctaaagtttttttgcgtgaatgtgcaatgacgaattgttcaatttgaataacctaatcatgagactc

SEQ ID NO: 3511 - DNA, 708 bp, Zea mays
  Clone ID: TF_701163921_FLI
aaccacaacgccccgccgttctccgcccgcttcgctgaggcgctcggctactacgcagcgctcttcgacagcctcgacgccgtggcggctgccactgccactgccagtgccgccggcgaccgggcgcaggtggagaggatggtcctgggggaggagatcaagaacgtgctgctctgcgaaggagccggccggctcgagcggcacgagaggctcagccagtgggcgatgtacatggacgcgtcagggttccgccgcgtcccgctcagcttccgcgccattagggagagtgagctcaagctcgcgagcttcgggatgagtgggtgccgctaccaggtggaaagcgacggccttctgctggggtggggctccacgcgtctctactctgtatcggcgtggaggccaaacaagtctgggaccagagagtgtacgtttaggagttgatatgtctgaatgtctgatgctgtatctgagttacttaattcataacaagcatcagttttagattgttatctggaaagaaaggaataggagaatctttcaagggaaaatcagcttcttgttgcccttcctatctgagaggtttctctagtttttcttaaggttgctgtgtgttttcttctgtttcttcttttcagttttgttgtggctgtgctcccattagcttcgtggtggtttgtaattgttgtatgtgatgtgatctctttcttt

SEQ ID NO: 3512 - DNA, 1237 bp, Zea mays
  Clone ID: TF_ZmC10148_1
cacctcgcggtcctgaagaccgccgcgaacccgcgcggggacgcggagcagaggctggtggccatgatggcgggcgccctgtcgtctcgcatccgacgcccacccgcgtctcaccagcacctcgcgggcctatgcggcgccgagcagcgcgcggaatggcagctgctgcagcacgtctccccctgcttcggcctcgccctccacggcgccaacctcgccatcctcgacgccgtggccgaccagcgcgccatccacctgatcgacttcgacgtcagcgtcgcgcagcacaccgccctcatcgactccctcgccagccgccgcgtggccggcacgtgcctcaaggtcacggccgtcaccgacccgacgtcgccgttcacgccggctctggcgcaggcgctggcggccacgggccagcggctcaaggagcacgcccggcaggcaggggtggagttccggttcagagcggtcagctgcgtcgccggagaggtcgaggcgtccaggtcgaggctcgggtgcgacgagacaggggaggcgctggtggtgaacctggcgttcgccctctcgcgcgtcccggacgagagcgtgtccccggccaacccgcgcgacgcgctcctccggggcgtgcgcggcctgcgcccgcgcgtggtgacgctggtggagcaggagctcggcgcgaacacggcgcctctggcggcgcggttcgccgacgcgtgcgcgcactacggcgcggtgctggagtcgctggacgcgaccctggggcgcgacagcgcgcagagggcccgcgccgaggcggccctggcgagcaaggcggccaacgccgtggcgcgtgagggccccgaccgggtggagcggtgcgaggtgttcggcaagtggcgcgcccggttcggcatggccgggctgcggcccgtggcgatcggccagggcgtcgccgaccgcgtaaagggacggctaggtcccgcagcacgtccgggattcgacgtgaagctggacagcggccggctcgcgatcgggtggatggggcgcgtggtcaccgtcgcctccgcctggcgttagccgtacgtagcacccctagtgatgagctaatcatcagctcccggttatcgacgcctatcattcagagtacctcaggaacagccgttgtgcaaccacgaacgaatgcctagtagttgtaacaataatctctctaattttttacggcaactggtcgttggaaaaaaaaaaaaaaaaaagggcccgg

SEQ ID NO: 3513 - DNA, 1554 bp, Zea mays
  Clone ID: TF_ZmC5043_1
cccagcgtccggaaacacatgcaggatctgcgcatcgccatggatagcgagtctgagaagagtgtgaggagggtgagtgggaagggggcacgagggaagcagcatgggaatgagtttgttgacctgcacaccatgcttatccattgcgcacaggcaatggccaccggtgatcgccgaagtgcaaccgagatgctgaaacagatcaagcagcactcctctctcaggggggatgccacacagaggttggcctattgttttgcagaaggactggaggtgcgacttgctggcacagggagccaggtgtaccagtccctcatggcaaaacgcacatccgttgtggagttcctcaaggcatacaagctatttttggcggccatcagcctcaataaggtgcatatcatcttctccaatgggaacatcgtggatgccgtggcagggaggagcaagttgcacattgtagcatatggtgtacagtatggtttacagtggccaggcttgctacatttcctggcaggtagagaaggtgggcctccagaggtgagattcaccggcattgaccttccacagccagggttccgcccagcctaccagattgaagaaacaggccgccggcttagcaactgtgcccgtgaattcggtgtgccattcaagttccatgctatagcagcaaagtgggagatggtctctgccgaggacctgaacattgatccagatgaggtgcttgttgtgaacagcgattgccacttgagcaacttgatggatgagggtgttgacgctgacaccccaagcccccgagatttggtgcttaacaacattcggaagatgcgacctgatattttcatccagattgtcaatagtggcacatatggtgctccattcttcctcacacggttccgggaggcactgttctactactcagcactatttgacatgctggatgcaaccattccccgggataatgatgaacggctgctgatcgagcgggatattgttgggcgatctgccctgaatgttattgcttgtgagggtgcagacaggttggatcgccctgagacttataagcaatggcaggtgcggaaccaccgggctgggctcaagcagctaccgttgaatccagaggttgtaaagcttgccagggataaggtcaagaaatattaccacaaagactttctcatcgatgaggatcgccaatggttgttgcagggatggaaagggcgggtcctctttgccatgtcaacttgggttgctgaggataataactccaccttttagctgcttcactttgtcttgttttggattatgagtgatattgatgtttgatggatggtctgtgtctttattttaccaccaaactacgacccagcatctgtggcccgctggacttctgtttctagagggttttagtgctgaaactttgtaagctagtagaaaaataagtagatgcttagaggtacataggatgctgatatatttctggatatgttgcagaattgtgatgtgtacatcatctgtaactgataaaagcaattttattgattacttaatcgacctttt

SEQ ID NO: 3514 - DNA, 3567 bp, Zea mays
  Clone ID: TF_ZmC2910_1
cctcgaggccggccgagcagagcacaccatcctcgcattattcttttcggatttgctccacccctccacccccatgcccgtgtccatctcaggctgcgtcacatcatcgccgccacacccagcaccagcaccagcaccagcggcggcgcaccaccaccggtgccatcgccagcgccagcgctagcgccggcgcaagcggaggcccgggcgacgcggactgggcgaagttactggccttcttttcgtcagcggcgttccttgccatcaagctaaggtcttccagcaaggttacgtggagtttaccaatgggtctggataatacttatggcgacctatctggcatgttctatggaggcctgtcttatgatggctacacagaccacagcagcgcaaacgattacttcagatttgccgatccacttcctgccactgtgccccagatggcagcagaagcctgttcaaatccttcctccactgtgtcaagggccaatactgaaactgacaacccagaggattgggaattcatctcagatgagtccctcgactatatcagccggatgctcatggaggaggatattgatgagaaagttagcatgtaccaggcggagtcagcagcactgcgtgctgctgcaaagccgttctatgacattcttgggcacaagtttccaccgtctcctgaccgccagctgatctcttggtccatggacagccccagtgagagtagcagtagcatctgcacacaatctgtggcaagtactgtcactagcagcagtttcggcacgagagtggatagcaaccggcgctatgatgttggacttagtgagcagctggaagctttccgaggcttgtgtggtcaggcttcgaatccacttgttggtacatcaagtgatgcttccaatgcagtggatgagctagaagaccttttgatcacgaatggtgggatccctgagtatttgtttgagagccttccaacttgggatttcaggagaggtattgaggaagcccagaagagtcttcctgttagcgataaactagtaattgatttagaaactggtggtattgcaagaccccaagaagcaaggaaagatgttcctttgaatgccaaaaaggacgatgtattgaaggccaagaaaaatagacagagtgaagaccttgacctgatggaaggccggaacattaaacagtctgcattttgttccgatgaacctggttggattgagatgttcgatgatctgcttcgccaaactgagaagaaggctacagttctgcgagagctgatgcgtagtgaagcttccaagaattctcaggtcactcagacgaaaggaccaagtgggccacggccgcggggaaggaaaccaacaaagaatgatgtggtggaccttaggaccatcctcatccactgtgcacaggcggtggcagcagatgaccgcaggactgctaatgaattgttaaagcaaataaggcaccattccaagccaaatggtgatggaacccagaggttagcacattgttttgcagatggtctcgaggctcgcttggcaggcacagggagtcagctttaccgcaagcttatagcgaaacgtacaactgcctcagacatgcttaaagcctaccaccttttccttgcagcaagcccatttaagagactttcacattttctttccaatcaaacaatcttgagtttgactaaaaatgcatcaaaggtgcatatcattgactttggcatttattttggattccaatggccatgcctaatcaggcgtctctccaagagggaaggtggtccacctgttctgcgcatcactggaatcgacgtacctcagccaggtttccgccctaccgagagaattgaagagactggacaaaggcttgcagagtatgctgagaagttcaaggtgccttttgagtatcagggaatagcgtcaaagtgggaaagcatccgagttgaggatctcaaagttggcaaggacgaagttgtgattgttaattgcctatacagattcagaaacctgattgatgaaacagttgctgtagacagtcctaggaatagagtgctcaacaccataaggcaagtaaacccagcgattttcatccatggaattgtgaatgggtcatacagcgttcccttcttcatcactcgtttccgtgaggcgctgttccatttctctgcattgtttgacatgctagagacaactgtcccacgggatgatgcacagcgtgcactcatagagagggaaatgtttggccgagaggcactcaatgttattgcatgtgagggctcagacagagttgagagacccgagacatataaacagtggcaggtgaggaacctcagggctggatttgtccagtctccgttaaaccaagaaattgtgatgaaagccatggacaaagtaaaagacatttatcacaaggactttgtcatagatgaagacagcggatggctcctgcaaggctggaaaggaaggatactctatgcaatatctacctggaagcctaagaataactaggttcttggtctcacatgttacgtttcctattccattgatggtagcagctaattaaccagtcctgctatgttatagcatgtggaccttgacctgtgaacctgtctgatcaaggaaatggcttgaagacggataatgatcaacatggagctttgctagcttcacatctgtccagccagtactctgatagactgggtgtagacctctctaccttggtgttggtaccatcacttttattaaatttcgtagttttcttctttccatttacttctatgatcggcctggcgtcctattagcaataaccagatcactgcttctagttaattggttagccaaactacctactatcttgagcttagtatttttgacttgtatccatccatgttgaacattatttggttttcagcaccagcagataaaaaattccccaacgaggaagcatgaagcatctaaatttgttatacgagaatggacgctgctgtttgtgtggaatgtagtatctcatggagtgctttgcctttgaaataaaaaaaaaaaaaaaaaaaaggtcgaggggtcagaaacccattttttatttcatctctttgtagcaagtgatgcgtgctgtcacaaaatgactctttaaacttgagtggagcactagtttgagaatatcgctagaaagtggtgctacagattttcggagacgactagcgaatgcaccacaagggcatgatatcagtgcaatgcgaccactatcagtatcttcatttgataacgcattgttttaggcttttgatccttccagtccattctcttttatcgtacggttttcagatctgccatgtctaacatttatctaggaatatctggagtttgattatcataaaacttcatctcctatgaaactcactcttcattaaattacatgttaaaaggctgacgcgggctcaaaaaaagatggctcgactgtcagccaccgccgcgctcctcctcgtcgtcatctccctcctcaccgtcgcgcactgcggtggccctcgcagtcgcagcagagcacgacaccgggcccgaataacccgcg

SEQ ID NO: 3515 - DNA, 2636 bp, Zea mays
  Clone ID: TF_ZmC1155_3
aattcggcacgaggctttttatacacaaagaaagtaactgaccaaattctttcatccgggaaacaagatcatctggttttcgaacgggctctaatctttcttttgtacatcgatccgttcgttcgttcattcgtacacagcagcagctcacctcacacgatacagggaaagaaagatcctctggccgtatccagatagcacggagagaggcagtgaggagaggggaagtgggagtgaggagtgaatcggcagagaggaggaagacgaacaagacgacgaagacgaagccacagaggaggtcaggagggcagagcagaggagagtaggtctcttcttgccacaccgcttccggccgcgtctccgggatgttggctggttgctccttctcgtcgtcgaggcatcagatgagcaccgcgcagcgattcgacatcctcccctacggcttctccaagcgggcgagcaaccgcggcgatggctccggcgccgcgccgcgcgtcgcggcgcccgacgccaggagcggtggcggcggcggcacctgctccttccgcgcccacccggcgccgccagtcacgcaggccgtttcctggggcgccaagccggagcccggcggcaatggcgctgcgtgggagaggagcagggccgttaagcgggcccatgaggaagacgcaggcgaggagtacggcggccccgtcgttcgcgccaagcggacgaggatgggcggggacggggataaggtatggttccatcgatccattgcagggacagtgcaagcggccgggtccggcgacggacacgaagccgaggaagagaaggccttcctggtgccgagcgccgcggcgttcccccacggcatgtccgccgccgccgcgggcccgtcgctggccgtggccaagaaagaggagttcagcaagtcgccgtccaactcgccggcctcgtcgggcggcacggacggcggctcgtcggctgtcccgtggccggagcagctccacgcgcagaacggcgccgcggcgcgggtggaggccatggagctcgtcgtcgcgctcaccgcctgcgccgactccgtcgccgcctgcaaccacgacgccgccaactactatctggtggggcttggcgagatggtttcccccgcgggaatcacgccgagcaccgctgtctgcctactcctcggaagcgctcacgctgctgaggatgctcaaaggtccctgcgcctaagcgttgaagacgcagcgtcataacgcttaagtatcagtattaacatcttacaatgtccctatccttcgtatcataaaggaccttcatccgatcccgcccatcctgcacttcaacctgaacgagcggggtggccgcgcgttcgacggccacgaccgcgtccacgtcattgacttcgacatcaagcaggggctgcagtggccgggcctcctccagagcctcgccacgcgcgtggctcccccggcgcacgtgcggatcaccggcgtcggcgagtcaagacaggagctgcaggaagtaccggcgcgcggctggggcgcgtggtcgccgcgctcgggctcgcattcgagttccacgccgtggtggaccgcctcgaggacgtccgcctgtggatgctccacgtgaagcgcggcgagtgcgtcgccgtgaactgcgtcctcggggcgcaccgcccgctccgcgacgagaccggcgccggggtggccgaacttcgtcggggtcacgcgcagcacgggcgccgccatcctcctcctgggcgagcacgaggacgccctcaactccgggcggtgggaggcgcggttcgcgcgcgcgctgcggtactacgccgcggcgttcgacgccgtggaggcggctgggctggcggacgccagccccgcgagggccaaggcggaggagatgttcgcgcgggagatccgcaacgcggtggcgttcgaggccgcggaccgcttcgagcggcacgagaccttcaccgggtggcggcagcgcatgcaggaaggcgggttccagaacgccggcatcggcgaccgggaggcgttgcaggggcgcatgatcgcgaggatgttcgcgccgggcaactacagcgtgcaggtgcagggcgacggcgaggggctcacgctccggtggatggaccaggccatgtacaccgtgtccgcgtggacgccggtcagcgacgggggcagcacggtgtctgcgtctgtctccaccacagcatcccattctcagcatagctgaatggggggaagacacaaggtgaagtgaagaagaaaagaacatggtttttcagtggttcttttgctgttactgaaaacttagttcattatacagtctgacaattcttttatacaatcagaagaacaaaaaaaaagaagcaaaggagtaagaaagatttgtttgtagctttgtttttataggtgataggataaaagattcaattgttagtagttgtaattctttattctttatgtacacttgtcattctttcaccatgtctgtttagcttgtaatctctgttccgagttagaaggaaatggaataaacaagtatggttttcattcatctgaacattttgtcaggtgggaaatcggctatgccctctctattagtgatcttgctgtaatagtgaaagcaaaggattttttagaccaatactc

SEQ ID NO: 3516 - DNA, 1195 bp, Zea mays
  Clone ID: TF_ZmC5780_1
gcagagccgccgcgtggcggtggcgttccaggcgtacaacgcgctgtcgccgctcgtcaagttctcgcacttcacggccaaccaggccatcctgcaggcgctcgacggcgaggactgcctccacgtgatcgacctggacatcatgcagggcctgcagtggccggggctcttccacatcctcgcgtcccgcccgcgcaagccgcggtcgctccggatcaccgggctcggcgcgtcgctcgacgtcctcgaggccactggccgccgcctcgccgacttcgcggcctcgctcggcctcccgttcgagttccgacccatcgaggggaagatcgggcacgtcgccgacgccgcggcgctcctcggctcgcgccagcggcggcgggatgacgaggccaccgtggtgcactggatgcaccactgcctctatgacgtgacggggtcggacgtgggcacggtgcggctgctccggagcctgcgcccgaagctgatcaccatcgtggaacaggacctgggccacagcggcgatttcctgggccggttcgtggaggcgctgcactactactcggcgctgttcgacgcgctgggagacggcgccggcgcggccgaggaggagtcggccgagcggtacgcggttgagcgacagctcctgggcgcggagatacgcaacatcgtggccgtaggggggcccaagcggaccggggaggtgcgcgtggagcggtggagccacgagctgcggcaggccgggttccggccagtgtccctggccgggagccctgccgcgcaggccaggctgctcctcggcatgtatccgtggaaggggtacacgctggtggaggaggacgcgtgccttaagctgggctggaaggacctctccctgctcaccgcgtcggcgtgggagccggcggacgacgctgccgcttctgcgcccaccggttaacgagtacaagacaagatttttgcagcaggtagattatgattttggaattccatttcatgcctgctgccagcctcgcagccatccttggtggactggtcgtcttctcttcttgctgccgccctgctcgtgtaggcgtcttgtgagtttgtttttgtgatataatcgtataggcttcggcattcctttcgttctcctacctccagtatcaattaccaaatcaactttggattttgaatatttagtatactgcagctttgagtc

SEQ ID NO: 3517 - DNA, 1178 bp, Zea mays
  Clone ID: TF_ZmC3644_1
cccctacctcaagttcgcgcacttcacggccaaccaggccatcctggaggccgtccagggctgcaagcacgtgcacatcatcgacttcagcatcatgcagggcctccagtggccagcgctgatccaggccctcgcgctccgccccggcgggccgccgtcgctccgcctcacgggcattgggccgccgtccccgccagggcgcgacgacctccgcgacgtcggggtccgcctcgccgacctggcgcgctccgtgcgcgtccacttctccttccgcggcgtggccgccaaccgcctcgacgaggtgcggccctggatgctgcaggtctcgcagggcgaggccgtggccgtgaactccgtgctccagctgcaccgcctcctcgccgacgctccctcgtcgggcgacgcccgggcgcccatcgacgccgtgctggagtgcgtcgcgtccgtgcgccccagggtgttcacggtggtggagcaggaggcggaccacaacaagccggggttcctggaccggttcacggaggcgctcttctactactcggcggtgttcgactccctggacgcggcgagcggcggcgcgggcgacgcggcggcggaggcctacctggagcgcgagatctgcgacatcgtgtgcggcgagggcgcggggcgcagggagcggcacgagccgctgtggcggtggcgtgacaggctgggtcgcacggggctggccgccgtgccgctgggggccaacgcgctgcggcaggcgaggatgctggttgggctcttctccggggaaggacactgcgtggaggaggccgaggggtgcctgacactgggctggcacgggcggccgctcttctcggcgtccgcgtggcgcgcggaagagaacaatcagagtgacagcaggagcaggagcagcggcagtgaggagagcaatatcagctgcagcagctagagcgtcgctactttactgtaaattccttcggtgagaggctagtagcggggtttactgtaaaatcgcggtgcccgcgatccaaatggttcgattgagagagcgtcggcatcggtcgtaaatggcagactgaaaaaaaatgacatggaattctgttaggcatgtcgtcgttagctgaataaacggcactgaaacagcgtccctggaaaaacgccattgcaatgcagtcgtagaagctctaaaa

SEQ ID NO: 3518 - DNA, 1039 bp, Zea mays
  Clone ID: TF_ZmC3871_1
gttctccaacctggccatctgcaaggccgtcggcggcggcgggaggaagaaggtgcacatcgtggactacggcgaccactactacgggctccagtggccgtcgttgctgggctactggggtagcctggaggctgggccgcccgaggtgaggatcaccgccatcgacttccccgagcccgggttccggccggatgctcggctccaggcgaccgggcggcggctcacatgcttcgctcggcggcatggcgtccccttgaggttccacggcatcgcggccaggtgggacgcggtttcggtggacgagctgagcatcgagcgcgacgaggtgctcgtcgtgaacggcctgttcagtctcggtaggatgcaggagcaggagcaggacgacgtggatagggatagccggccgagccctagggacacagtcctcggtaacgtccggaagatgcggcccgacgtgttcgtcctgtgcgtggagaacagctcgtacggcgcgcccttgttcgtgacgcggttccgggaggcgctcttctactactcggcgctgttcgacatgatggacgcggtggcggcgcgggacgacgacgaccgcgtgctggtggagcagcacctgtttgggcagcgcgccttgaacgccatcgcgtgcgagggctcggacagggtggagcggccggagacgtaccggcagtggcaggtgcggaacgaacgggcagggctgaggcagctcccgttggatcctgatgcggttcgggccatcagaaggaaggtgaaggacaagtaccacagggacttgttcatcgatgaggatcagcagtggctcctgcaagggtggaagggacgagtactctacgccatgtctgcgtgggctgcaaaatgatacgtacactagtttaacaaagttcaaagaaaacaccattaatatctatggctcatgttcaaaaaacgtttgattccgagaattgtaatctttcttcttcttttttatgaagggacgtagaaagagtatataattaattttatggattacttgtttgactgtcct

SEQ ID NO: 3519 - DNA, 1536 bp, Zea mays
  Clone ID: TF_ZmC6882_1
cacagaggctggctcattgtttcgccatgggactggaggcacggcttgcaggcacggggagccaggcgtaccagtcgctcatggcacaacacacttcggtcgtggaatttctcaaggcatatagcctttacatggcagccagctgcttcatgaaggtgaggttcatcttctccaacatgaccatttgcaatgccgtggcagggaggagcaagttgcacattgtggagtatggtgtgcagcatggattccagtatccaggtctgttccatctactagcaaggagggaaggtggaccgccagaggtgagggtcaccgcgattgctgtcccacaacccgggtttcgcccagcacaccagattgaagaaacaggccgccgtctcagcaacattgcccgtgagatgggtgtgccattcaagttccgcggtattgcagcaaagtgggaggccgtccgtgctaaggatctcaatattgatccagatgaggtgcttgctgtcaacagtgagtgctatatcggcaacttgatggacgagagtgttttggtggacagcccgagccctagggatacggtcctcaacaacatccgcgagatgcggcccaatgtgttcgtccacactgtcgtaaatggaacatatggtgcaccgttctttttgacacggttccgagaggcactcttcttcttctcggcacagtttgacatgatcgatgcaaccatccctagggacaataatgaacggctgctgatcgagcgggatatctttgggacatttgccctgaatgtgattgcttgtgagggtgcagacagggtggaacggcctgaaacttataagcaatggcaagtgcgaaaccacagggctgggctgaggcagctgccactgaatccagaggttgtcaaggcttccagggacaaggtcaagaactattatcacagagactttctcatcgatgaggataaccgttggttgctgcttgggtggaagggacgggtgctctatgccatgtcgacatgggttgctgaggataataagcccatcttttagtgtgcctgaatccaactgtagattatattgatattttgatcgaagggttatgttgaaccatgatccaccacatgttgtggttcagtggacttatgtttctagagagtttattgctgaaacctgtgaggtagaagcaattagatgcttagagctacataggctgtagatatagttcttgatatattcctgcagagttgtaatcatgtgccatgtacactagaattaaaaccctgcagctgacaagtggttacacgtttgacctctgaaggcttaaaccctgaaaagtatctaatgatgcatggtatgaaggtagatgatatatgttcaaactatgtttctagagggtttagtgcagaaacttgtcaggcagaaataagtagatgcttacagctagctacaaaggttgtggatatagttcttgatatattgcagagttgtaatattatatactatgtacaccagaacttgtaatagtatagtatactatgcacacagaatt

SEQ ID NO: 3520 - DNA, 743 bp, Zea mays
  Clone ID: TF_ZmC5784_2
cccaaggtggtgacgatggtggagcagaacttgaggcagtcggggtcgttcctggcacgcttcgtggacgccatccattactactgggcgctgttcgactcgctggacgcgagctacggcgaggacagccccgagcggcacgtggtggagcagcagctgctggcgcgggagatccgcaacgtgctggccgtgggcgggccggcccgcgccggcgccggcggcgccaggttcggcagctggcgcgaagagctcgcgcggtctgggttccgcgccgcctcgctcgccggcggcgccgccgcgcaggcgtcgctgctgctcggcatgttcccctccgacgggtacacgctggtggaggagaagggcgcgctcaggctcgggtggaaggacctctgcctgctcaccgcgtcggcgtggcggcccgtccagacgccgccgtgccgttgagagctgaaatcgttgttggttacccagccagtggtagatcttcttcgtactatactcctgcttgagtttcttgtgccacttcttttgcatctgtagctagctagctggctgctcgatttggtcgtcagttccgagatgggaaaacgaaaacatctcttctcgtcactaatcgctagatccattcacagtgatagttactgatgtaagcctactaattagtttaatggcagatcaaccttgtttagcctaattagttacttggtactactgttctttaaaaaaaaaaaaaaaaagcggcc

SEQ ID NO: 3521 - DNA, 1888 bp, Zea mays
  Clone ID: TF_UC-ZMFLB73073F08_FLI
aatttgaactgatctttgagaaaaatgtgatagtttttgttagcaacttttatgtatattgatagtcacttgtgttccaaaagaagctgcttccttcagctgagtatccatgtggaagatgaggtccatagatgacgtcttcagaatgtgggagatgaggtccataaacaacgttcccattcataagtgtcatttggttcacctgcggtgttgcttgataagcatttggagcattaacttgattgggggcgttaacatggggatgaatatttgcattggtatccttctggttagcctttggcttgctcctagcagtccgtttgttctccacaggactgtctgcagtcagcctgcccatttgctgctggatttcattcagtggactactggacagttttgacctgacgcttcttttggagctagaggacttgtactcaagacggtacaaggcgagggcatcagacttttgatgttccaattggctaatcccatgcaggttattgaactgatcttcattagttcagaaatatttattttgtaatcatcaccacaaagaaaatcatcaatacaaagttcacggtctatatctatatagtacatctgatgagttggcgactggaaccagaagcgccaggagcagctcggcggcagctacagcctgcagcccgacctctttggcttgcccgcgtcacctgggccagtgcctgggcccgcacagccaccaccgcctatattgctgctggggcgacacctgctgcgcagcctgcgacggcgacctctcatatgttgattggctttatcctctcccattcaatatagtttgcctggtctttatctgtcttccacatttgaaatcagtgttcgatgtatccaaacccacattttggacctaccatattgtactcatccagccatttctcttcctcgcaagccagcagccacttgtttatcttctccatgatttctctcctggacggctcctccctggctttccgctatctgttcgtcaatgctggtcaggagcttagaaggattcacgagacctggtaaattttgtcagcgttaaaaatatcaagccatctgaaccagagtcgatcagtaagtacatgtactgtaaacaggaatgtcagattctgcagagaccatgtcacgacaggtagggaaaaccacatgatggctcatcagattcgcaaattcatttcttggtactgagattgaatcgaaccgatgtacttgaaaaaagaagaaggaaagaacaatcagggcccatgtaggcttgcagatcccatttcaccctcgcatggcacccgacaaggaggatgtacgccgtctccactcctttgcctcatcctcctcactgctgccagccactatttccacttcaccgttcccttcctcgttgccggcaaggaggttggtgtgcgcgctgactgacagcgtgatgttacggttggacatcgcgcccctcatgcgcagcctcagcgccgatgctgtggagctaccagcgcgctggtacgcatagtggaagcggtcggacccggactccgcatatgcgccgtggtagtacggttgctgcccccgcgacgtcgccggggaggcggggaggacgagccaacggccaacgcacagcttgtagtgccagtttctgcttctcccggacgaagtcaaggtacattcctgaagtgggttaaatccatgaaccccgccgtggtgaccatcgttgagaaggaagccaacagcaccggcagcgacgactgctccgatgacctgccatagcgggtgaccgcggcgatgggctactactcgacggtgttcgatgccctagaggcgacggtgccgtcgggcagcgctgaccgcctcttggtggagagcgaggtcctcggcagag

SEQ ID NO: 3522 - DNA, 720 bp, Zea mays
  Clone ID: TF_ZmC12034_1
cccacgcgtccgcgcgcgtcgagcgctggctcctcggggaggaggtgaagaacatcgtggcctgcgacggcgcggaccggcgggagcggcacgagcgcctggaccgctgggcggcgcggatggagggcgccggcttcgcccgcgtcccgctcagctactacgcgctgctgcaggcccggcgggcggcgcaggggctgggctgcgacgggttcaaggtgcgggaggagaagggcgccttcttcctctgctggcaggagcgcgccatcttctccgtctccgcctggcgcggccgtcgcttcgactgatggaggaacgcgtcgacgccttcccgtatttgtgcggaggaggagacgggccgcccgtcgtggcgttgcgcgtcaggtggccgtcacgcacgttggggcttcttttggtcgttttgtgtgttcagtttacgccgtatctagttagatttcaatcaggtttgttcatagtgtacccctgccgctctccaatttggatggatggaatctcatgcttgtttggatcagtcagtccttttagatctgttaatgtaacaactagagctgcttaacagctactatctcactcggtcccggtcccggtcctataacaagcgtggtaatgtacttgtggagtttcaaattttctgacaattatggacatttgtaacaaacacttctggagtttaaaatttgatgcatggattagatttgtttt

SEQ ID NO: 3523 - DNA, 760 bp, Zea mays
  unsure (1)..(760): unsure at all n locations
  Clone ID: TF_LIB4766-041-R1-K1-G12
attgggacctcgagccggcctatctccgatccctcgagcaccaagccgagggaaggtgaggagcgatggcgcgcggcgtggtgtcgccctccacgccgccagcgccgccatcgtcgaagcggtgggcgaccaccgcgccatccacctcgtcgacttcgacgtcagcttcccgcagcacgcggctctcatccagtacctcgccgaccgacgcgtgcagggcaggtccctgaaggtcaccgccgtcaccgacccgagctcgccgttcacgcagtctctaaccgcatcgctaccagccatcgaggagcggctgaagaagctcgccgagcgagctggcgtggagtaccgctttacagtggtcagctgcagagcagcagagctggatgcgtccaggctgtgctgcgagccgggggaggcggtcgcggtcaacctcgccttcgcactctcccacgtgcccgacgagagcgtctctccggccaacccccgcgacgagctgctccgccgcgtgcgcgcgctgggcccgcaggtggtgaccctcgtcgagcaggaactgaacaccaatacggcaccgctggcgacgcgcttcactgacgcgtgcgcgcactacggcgccatcctggagtcgctggacgcgacgctggcgcgggagattgcggagaaggccagggccgaggcggccctgtcgaaaangcggcgaacgcggtcggccgtgatggccccgaccggctggagcggtgcgaggtcttcggcaagtggcgcgcca

SEQ ID NO: 3524 - DNA, 349 bp, Zea mays
  Clone ID: TF_LIB3205-014-P1-N1-C1
atagagtaaataactcttttcacaataagagttattcatacagtgacggtatttaattatgaaagttggctaagtagctgaccgccggcggcgcgggccggcccgcccacggccagcacgttgcggatctcccgcgccagcagctgctgctccaccacgtgccgctcggggctgtcctcgccgtagctcgcgtccagcgagtcgaacagcgccaagtagtagtggatggcgtccatgaagcgcgccagcaacgaccccgactggctcaggtcctgctccaccatcgtcaccaccttgggggccagcctttggatgagccagagcgtgttggagtcggagccggtgacgt

SEQ ID NO: 3525 - DNA, 323 bp, Zea mays
  Clone ID: TF_LIB3591-101-Q1-K6-E2
ggtccgacattcccgggccgcgccgaagccggcagcgcttcatggtcgagcgcggattcttcaggcagtgcgccctgaacgtcgtcgcctgcgagggcgtggacagggtggagcgccctgagacgtacaggcagtggcaggcgcggaaccggcgggcggggctcaggcagcttccgctggatccggacaccgtgagggcgttgagggagaaggtgagggagcagtatcacagggactttgtaatagatacggatcgagattggatcctgcaaggatggaaggtacgcatactatacaccatgaagacatgggttgtggatgac

SEQ ID NO: 3526 - DNA, 1252 bp, Zea mays
  Clone ID: TF_ZmC1420_1
ggcggcactcctcgcccacgggcgacgctgcgcagaggctggcgcactgcttcgccgacggcctggaggcgcgcctcgccggcacgggcagccgcttgtaccagtcgctcatgctccgccgcacctccgtcgccgacttcctcagggcgtaccgcctctacatgaccacctgctgctgcaagagggtggcgttcgccttcgccaacaagaccatccacgacgctttcgcgctcgccggcaggcgccgccggctgcacatcgtcgactacggcctcggctacggcttccagtggcccgggctgctgcgcggcctcgccgccagggagggcggaccgccggagctggtcaggatcaccggcattgacctgccgcagcctggctttcgccccgcacagcagatcgaggacaccgggcgccgcctcagcgattgcgcacgtcagctgggcgtgccgttcgagttccggggcatcgcggccaagcgagaggcggtgtctccagaggacctgggcatcgacccagctgccgaggtgctcgtcgtgatcagcctctgccatttcaggctgctcacggacgagatcgaggtcgagatcagctcctccgccgccgccgccgggcctagtgggcgtcgtcgtcccaccgccagggaccaggtgctctgcaacatccgccggatgcggcctgacgtgttcatccacggcgtcgtcagtggcggctacggcacgacctacttcccgacaattcggcacgaggcgatgttccactactcggcgcagttcgacctgctggacgccaccgtgcctcgggacagcccggagaggctgctgctggagagggacatcttcggccgcgccgccatgaacgtcatcgcgtgtgagggcgccgaccgagtggagcgccccgagacttaccggcagtggcaggcgcggaaccgtcgggcggggctcaagcagctccagctgcaggctgacgtcgtgaaggtggtgagggacaaggtgaaggacaagtaccatagggacttcggcatcgacgaggaccaggggtggttgctacacacgtggaagggacgtgttctctatggcctatccacatgggttgcacaacatgctgacccatgactaaaggccctctatggtgggcctccaacagctcctagaaaaatctaataacggggaagcttcttgatgggctttttctagaaatggagaggagctcctaaaaaaactaatagaaggggcctaaaatctctgtcacc

SEQ ID NO: 3527 - DNA, 812 bp, Zea mays
  unsure (1)..(812): unsure at all n locations
  Clone ID: TF_LIB4767-051-R1-K1-A11
cattgggaccctcgaggccggccgggataacaattttgtcccagtgaggattacatgattactgctcttttgggtgactatagttactggccaccctgatatttgatacaattgatctttttttatctcatgctaaagaaatttggtggctggtggatctacttaagaatcaaaagtcagacaaggtggacatcaccatccaaccggaggagcaggaagccatgaatgatgttctagcagccaggtgacgcctgatgtctttgttcagttgatatagttgtctgattttttccttcttccaagttagaacggtctttcttgtacgtgtatttctacttcaccctcaacgaccgggtgctccgcgcgttcggcagccatgaccgcgtccacgtcatcaactttgacatcaagcaggggctacagtggccgggcctcctccagaaaaagaggaattgaagcagtatctgactcgaacatttttgtagaaaacttggtagaaaaagaggaattcctgcatacattttcgaaggaatgtgaatatatcagaactgcagtgacaaatggtagtgccattaagcatgatggctcatatgaatcagatcctgcagttgagattgttcgagttgaactccaaggtgctgctgcatttcttttattctcgtctggtacctcttgtacttcttctggttgaaggttccacgcctatatatattggagaacatggatggggaatgcttctggtagtnaaaagggcacacaagaggctggttcaaaattgaactgctaggtttgcatctgtgcataactctatc

SEQ ID NO: 3528 - DNA, 1593 bp, Zea mays
  Clone ID: TF_ZmC1439_7
gaactactctcaccattaactataacaaattttgtcaccaaaatttggtggctggtggatctacttaagaatcaaaagtcagacaaggtggacatcaccatccaaccggaggagcaggaagccatgaatgatgttctagcagccaggtgacgcctgatgtctttgttcagttgatatagttgtctgattttttccttcttccaagttagaacggtctttcttgtacgtgtatttctacttcaccctcaacgaccgggtgctccgcgcgttcggcagccatgaccgcgtccacgtcatcaactttgacatcaagcaggggctacagtggccgggcctcctccagaaaaagaggaattgaagcagtatctgactcgaaaacttggtagaaaaagaggaattcctgcatacattttcgaaggaatgtgaatatatcagaactgcagtgacaaatggtagtgccattaagcatgatggctcatatgaatcagatcctgcagttgagattgttcgagttgaactccaaggtgctgctgcatttcttttattctcgtctggtacctcttgtacttcttctggttgaaggttccacgcctatatatattggagaacatggatgggaaatgcttctggtagtaaaaaaggcaacacaagaggctggttcaaaatttgaactgctaggttttgcatctgtgcataacttctatcattatcctgagagtattcgcttacgaatcagccagatacttgtgttgccaccttatcagggtgaaggccatggtcttggtcttcttgaagcaatcaattatattgcacagtctgagaacatttacgatgttacaatagaaagcccttctgattacctgcagtatgtgagatcatccattgactgcctctgtttgctcatgtttgatccgatcaaacctgcacttggtgctattgtctcgtctctgaaggagaccaacctgtcaaaaagggcccaaagtttgagaatggttccaccggttgacctgatggagactgtccgttagaagctgaagataaagaagaaacagttcctccggtgctgggaaattctggtcttcctaagcctcgactctcaggatcataagagcatggacaacttcagggcctgcatatatgacctcatgaagggggagatccttggcagtgcctctggaactaacaggaagcgtctattgcagatgccaaccagtttcaataaggaggcatcttttgctgtgtattggacacatgagattggggatgtggatgaacaaactgtttagcagcagccagaggatctcaggacgcaggagcaacagctcaatgagctcgtggacatccaaatcgaggagattgatggggtcgccaagaacgtcacttcacgtggcaaggataagatggcagagctggcggttcaatgaatctgggtgaggttcctacttcaaacgatgttaaaatgttgtcgtagcttatctggtgaggtctcttttacgagttggcttcttggtagaaagggaatgtcacggcataggcactgagtagattgtcacgacagattattatatacttcaattctggaatatttgatgg

SEQ ID NO: 3529 - DNA, 778 bp, Zea mays
  Clone ID: TF_ZmC490712_1
attgctcagtcatgttgtctgccctttgagttcaacgccgtaaatgcagctagtcatgaggttacacttgaacatctcgatataagaaagggagaggctattgctgtcaactttgcatatcagctgcatcatactcctgatgagagtgtctgcatagaaaaccaccgggataggatattgagaatggttaagagcctttctcctagggtggtaacccttgtagagcaggaggctaacacaaacactgccccattcttcagtagatacatggagacccttgactactacacagccatgttcgaggcaatagatgttgcttgccccagggatgacaaggtgaggatgagcactgagcagcactgtgttgcaagagatattgtcaatttaattgcatgtgaaggtgcagaaagagtggagaggcatggaccatttggaaagtggcggtctaggtttgcaatggctggctttagaccataccccctaagtgcattggtgaacaatactatcagaacactgttaaatgattacaacagttactacaagctagaggagaaagatggtgtcatttatcttggatggaagaacagaaagctggttgtatcttctgcatggcagtgagattcctgaatatggaagaagcttgtttaggttctttcatggctttgtcttcggcacatagatccaagggtggaacctaatcagcgaatgtgagttccataatccaaaggactgtggctgcttgcttcttggcgcccagctgtcaaccctccgctgcgca

SEQ ID NO: 3530 - DNA, 308 bp, Zea mays
  Clone ID: TF_LIB3069-022-Q1-K1-E10
agctgacctcttacacgcgcagttatgcgagtcctgacggtacctgaaattcgtgcactggatcgcgaaccaggccatactagaggtctttgccggctgtcggcgcgtgcacatcatctacttgagaatctaacaggggatgcagtggccggctcttctgcaggcgctcgcgctgcagcctggctgcccaatgtcgttccggctcacccgcgtcagaccaccgtagcccgacgagaccgacgccttgcagctagtgggctgtaaactggcccagttggagcacaccatgctcgtggacttgcagtacc

SEQ ID NO: 3531 - DNA, 553 bp, Zea mays
  Clone ID: TF_LIB4729-117-A1-K1-F2
cgcccacggccagcacgttgcggatctcccgcgacagcagctgctgctccacgacgtgccgctcggggctgtcctcgccgtagctcgcgtccagcgagtcgaacagcgccgagtagtagtggatgagccagagcgtgttggagtcggagccagtgacgtcgtagagcgagtggtgcagccagtggacggcgacggcctcccgcctcgtgactcctagcttctccgggtcaacattgccagccttctcggcgacggcgcagaactcgaagggcaggccgagcgtgtcggcgaaatcggagaggcgcttccccgtggcctcgagcgcctccatggacgccccgaggccggtgagcctcaccctgggcgggcccccggggcgggaggcaaggatgtggaagagccccggccactgcagcccctgcatgatgtcgaggtcgatgatgtgcacgcgctcctcccgctcgaacgcctcctggatggcctggttggcggtgaagtgcgagaacttgacgaaggggctgatgccgttgaacacctggaacgcggcggcgac

SEQ ID NO: 3532 - DNA, 469 bp, Zea mays
  Clone ID: TF_LIB4738-094-Q1-K1-E4
cacgctcggcctgcccttcgagttctgcgccgtcgccgagaaggccgacaatgttgacccgcagaagctgggcgtcacgaggcgggaggccgtcgccgtccactggctgcaccactcgctttacgacgtcaccggctccgactccaacacgctctggctcatccaaaggctggcccccaaggtggtgacgatggtggagcaggacctgagccagtcggggtcgttcctggcgcgcttcgtggacgccatccactactactcggcgctgttcgactcgctggacgcgagctacggcgaggacagccccgagcggcacgtggtggagcagcagctgctggcgcgggagatccgcaacgtgctggccgtgggagatccacgacgccggcggtcagctacttagccaactttcataattaaataccgtcactgtatgaataactcttattgtgaaaagagttatttactctat

SEQ ID NO: 3533 - DNA, 1556 bp, Zea mays
  Clone ID: TF_ZmC5045_1
cgcgtgactaggacatggagatggaggggaggaagagcaaacagtcggcactgtgtgacgaagagactgtccgggagatgtttgacaaggtgctgttgtgtaccgacaagaactgtgagttccactcaccaatgccagccgatgcacagatcagcgggggatatgtgaaaggatctagaaataagcgagggcgaaggagggggagatcaggtcctggtgcagaggaggagccagttgatctcacaaccctactcatacattgtgctcaggccgcggctatcgacgaccacaggaactcaagcgagctgctgaaacagatcaggaagcattcctctgctactggagatgctggccagagattggcacactacttcgccgatgggctggaggctcgcctagctggctctggcagcagcatctaccgttcgcttgctgcaaagagaacttccactggtgatatactgaaggcgttcagtttgtatgtcaaagcatgtccgtttaggatactatcacactatgtcgcaaacacgaccatcttaaacgctacgaagagcgccacaaggctgcacatcatagactacgggataatgtatggtttccagtggccagtcctcatgcagcggctctcaaagagacctggtggccccccgtaccttcggatcactggtatagactttcccctgtcaggattccgccctgcagagcgtgttgaggcgacagggcggcggttgcatgagtatgcccgtatgttcaatgtcccatttgaataccaagccattgctgccaagtgggatactatccaagttaaagatctcaacatgaagagcgatgagttcgtcgtcgttaactgcctctaccggatgaggagcatggtggggcggacggtggcggatgacagcccgagaacgcgggttttgaacacaatcagaaagctgaatccccatctgttcgttcatgggatcgtcaatggtacttacaatgcacccttcttcgtgacgcggtttaaggaggctatgttcttcttctcttcgatctttgatatgctcgaagcgaatgccttacggatggatgagcataggctgctgatagagagagagttctttggccgggaagctgtcaatgtgattgcctgtgagggcacagagaggattgaaaggccagagacctacaaacaatggcagatgagaaacctcagggcaggcttccggcagttagctctggacagggagataatgaagagagcaaggtacaaggtaagcaagagctatcagggggatttcctcgtggacgaagataacaagtggatgctacaaggttggaagggtcgtatcatatatgcactttcagcatggactagctagacttgtaaatattagtgagctactgagctgcttagctgacctcttccattaatttcttgattaatcaccatttcattttgctgtattatgtttacgttgttgaatctagccctcttttagaaaccaaagttttgtatgtttgaattggctgcaataatagaatcttgtccgtgtctgcctgaaaaacttgtgtaa

SEQ ID NO: 3534 - DNA, 1928 bp, Zea mays
  Clone ID: TF_ZmC1583_1
cgggctggagctgatgggcacgcagcagcggcagcagcagtaaggccacttccactttcggcctcctacgaaccgaggcagtttttcagccgccgccgccggccacgaccatgcctttccacgacggtgccgacataaagcccgctcaccttggagtcccgtcggcaagtctactcctcaatcaacaccaagcgttgtcagcagcctccttcatgccgctcccctccttccctgaccatcagcaccagccacatctcccgcccccgccgaagcgccaccactctatgcccgaaaacctgttcctcctccaaaaccaactccagccgccgccgccgccgccgcagggtctacgattcccaccactgcataccaccgcgcccttccagctccaaccatcgctgcaaccaccgcgaggttcgatgaaaacaaccccggcggcgcagcaacatcaacagcttctggatgagcttgcggcggcggcaaaagcggctgaggtcggcaactccatcggcgggcgcgagatattggcgcggctcaatcagcagcttccccctatcgggaagcctttcctccgctccgcttcctacctcaaggaggccctcctcctcgcgctcaccgacggccaccaaggctccactcacctatcctcccctctcgacgtcgccctcaagctcggtgcatacaagtccttctccgacctctcgcctgtgctccagttcgccaatttcacggccactcaggcgctcctcgacgagatcgcctcaacaacttcatcttgtatccacattattgatttcgaccttggtgttggcggccagtgggcttccttcttgcaggagtttgcacaccgccgtggaactgggaacgcccccctgccaatgttgaagctcacagccttcgtctcaagtgcttcccaccatccccttgagctgcatcttactcgggagaacctcacgcaatttgctgtggaccttggcattccatttgagttcactgacatcaatcttgatgcgtttgatccggcagaattcattgctcctagccccaatgaggttgtggctgtttgcatccctgttggttgctctgcacgcacgccaccgctccctatgttgcttcagttggtgaaacagcttgcgcctaagattgctgtggctattgaccatggcagtgaccggggtgacctcccattttcacagcacttcatgaactgcttccagtcttgtatgttccttctcgactcacttgatgctgctggcactaacgcggatgctgccagtaagattgagaggtttctgattcaaccgagagtagaggatgcagtacttggccggcggaaagctgaaaacgcaatggcttggcgggcagtgtttacatcggccgggtttgctccggtaccgctcagcaacctcgcagaagcacaagctgactgcctgttgaagcgcgtgcaggtccgaggattccatgtggagaagtgtggaatgggtctagcactctactggcagagcggcgagctcgtgtctgtctcggcatggcggtgctgatcatacggaccccatccatcaaccatcatgacacctacaccaatttgcaggcatgtttaaccctggtaatgtgcattttgtcttgcaatttcaaacatcgtgaagaaaactattgtatttgttgttacacgcctctgattgctttgctgatgttggagtaccgcctctctaaaatgtaacatgttggtctagggtctcataactctgttcttgctctcttcttggttagccagaggataatttggcaaatctgtggcaatgatgttgttattttactaggtaattcagatgaaaactgacatggactgaaatggttgggtatattaactttcttggcctcatattccaagattgatgtatagatttctaaagcgtggatcatggttt

SEQ ID NO: 3535 - DNA, 2602 bp, Zea mays
  Clone ID: TF_ZmC3661_1
gccggccgggctggggaaaggatggagaggcccgagacatacaagcagtggcaggtgacgcggcacggcgccgggcccggcggcgcccgttcacccggggcctctcctcgcccgctcggctcaggctctggtgctaccacaaggacttcctcatcgacgaagacaacaggtggttactgcaagggtggaaaggacgcatcgtgctggcgctctcaacgtggaagccagatcacaggtctccctagctcctcctcgagggcggctacatggttgcagatcgagccctgagggcagcgtggtggatgcaggcggcgcgtggccgtacgattcgacggaattctaccagctgcacagcaacccgtcgtcgttcgcgtcatccaacggcagctgtgctacaatatcagacggctttgagtcgttgctgagctcgcctggtgtcatgccagatgttggcttcgccgattttgcggtgcagagccagcaggctatgcagttctgccgtgggttcgaagaagcaagcaagtttctgcctgacgagagtaagcttgtgattgatcttgagaagccagcatctgttacaagcttggtggctaacatcaaaggggagaacaggtttgcagaggtcaaggcagagaaggccgatgttcaggcagaaattcacagaggaaagaagcatttctatggtgatgacttggatgcagaggaagggaggcgcagtaaacattcagcacccgctatcgacactgatcaccttgtgcgggagatgatggacaaggtcttgttgtgcaatggcgagacatgttcaaaaggcgtcaaggaactccgtgaagccctgcagcatgacgtggcaaagaattcacacggggttcatggaaaagggtccggacatggcaagggccgtggcaagaaacagccgaagaaggaggtggttgacttggagactctcctcgtccactgtgctcagtctgtggccaccgatgatcgacgtggtgcaactgagctcctgaagcagatcagacagcatgcatcgcccaatggcgacggtgaccagcgtttggcgcactgcttcgccaacggccttgaggcgaggcttgctggcaatggaagtcagatttacaagtctcttataatgacgaggtttccctgcaccgatgtgctgaaagcctaccagctttacttggcagcttgcccattcaagaagatctcccatttctttgccaatcaaaccattatgaatgctgtggagaaggcgaagaaagtccacatcgtggactatggtatatactacggctttcagtggccgtgcctcattcaacggctctctaccaggcctggtggccctccgagactccggatcacggcaatcgacacaccgcaccctggttttcgcccagcagagcgcatagaggagaccggaaggtatctaaaagattatgctgagaccttcaatgtgcccttcgagttccgagccattccatctaggttcgaggcggtgcagatagaggatctccacattgccaaggacgagctgctgatcgtcaacagcatgttcaaattcaagacactgatggacgagagcgtggtggctgagagtccaaggaacatggtcttgagcacaatcaggaagatgaacccacatctgttcattcatgggatcatcaatggctcctacaacgcaccgttctttgcgtctcgcttccgggaggccttataccactactccgccatctttgacatgctggagacgaacatcccgagggacaacgagcagaggctgctcatcgagtcagcactgttcggtcgagaggcaatcaacgtaatctcctgcgagggcctggaaaggatggagaggcccgagacatacaagcagtggcaggtgaggtatcagagagctgggttcaggcagctcccgatcaaccaggacatcatgaagcgtgctcgggagaaggtcaggtgctaccacaaggacttcctcatcgacgaagacaacaggtggttactgcaagggtggaaaggacgcatcgtgctggcgctctcaacgtggaagccagatcacaggtcttcctagctcctcctcgagggcggctacatggttgcagatcgagcactgcactgtagatggatggaggcctgttcgtatctttggatgcttgggctggttgttcctgggatgcaacatatagctaggctaggctgtgctattcgaactactaaagcatgttttgcactgtctttatatagtgatgccatcaagggtccctgtatgtcatgttaggttatggttcagttttggacaggaacagttagtgcattctttgatggaacagcaggctaggtatgttagttacgcacgcggtagaccctagggttgtttcatgcatggatcagtcttatggattcttgtattatatttcttcccccattaaccagtgctgtcaaagttttgggcttctttggtaggtaggtagtaggtactacaaactttcttgcacctccatccgagataggcaagcaagtgataccatcgtggcccgattaagtttccagtcctctgagcgagaaggtgagcagagctagctaaccgcttctgtatcttgcttgt

SEQ ID NO: 3536 - DNA, 356 bp, Zea mays
  Clone ID: TF_LIB3152-020-P1-K1-F10
gacagagagaaaaccttgactttttttaaggccgcaacattaaactgtgggcggtttgttccgattaacctgattggatagaaatgtttgatgatctgcttcttcaaaccgagaagaaggccacagatctgctagagctgatgcggaatgaagctttcaagaattctcaggtcacccagactaaaggaccaagtggaccacggccactgtgaaggaaaccaacaaagaaggatgtggtggaccttaggaccatcctcatccactgtgcacaggctgtggcagcagatgaccgtatgactgctaatgaattgttaaagcatataatgcaccattccaagccaaatggtgttggaacc

SEQ ID NO: 3537 - DNA, 830 bp, Zea mays
  unsure (1)..(830): unsure at all n locations
  Clone ID: TF_LIB4766-127-A1-K1-C3
cattgggtacctcgaggccggccgggagctaactttcttcgcgtatcagcctggcccgtgctcgcccactgcgctagggttcacttgcctctcgagttcactcgcagccgcagccgccgcggctctcgcctctccggttcactcgcagtcgccatcgcggaggcgttccagagcggcagccaccatcgccggcacctccacgtggtcgacctcgacgtgtcgtacgacttccagtggccctccttgatctagtccctgtcggccgccgccgcgagcacgagcgcgagaacgagcagcgcataacacgacggcgacggcgacgagccagtttccctgcgaatcaccggctccggcacgagccacgacgagctgcggcgaaccaaggcgcggctggcgcggctgctgcttccacctttcacggccagtctccggtacttctccgtggtgttcgactcgctgcacaagtgcctccccgccgacagcgccgagaggatcgccatcgagagcggccacctggggcgtggagatcagcgacgggtnntgggttttggtttgttaattagtttttttatgcttctttaatttcttctttgattgattacatatatagattgattgattacatatatagatatatacacccatgtaaagtagatgtcaaaccagttattgcacacgattgatacgaagtagtcccaagagtcgtttcaaaatttcacaatctaaattatcatttggagagtcatttttccataaaataccactatctatatattttccatcttcaaaagtctttttatattttagagagtcaatcacgtttttatatc

SEQ ID NO: 3538 - DNA, 1014 bp, Zea mays
  Clone ID: TF_ZmC3528_1
cgcgcttcgcccccgacgagctcacgctctgctacaagacgctcaatgacgcctgcccctactccaagttcgcgcacctcaccgccaaccaggccatcctggaggctacgggcgcggcgaccaagattcacatcgttgacttcgggatcgtgcagggtatccaatgggcggcgctgctgcaggcactcgccactcgcccgggggagaagccatcccgggtacgtatctccggcgtgccttcgccgtacctggggccaaagcctgcggcgtccctcgccgcaaccagtgcccgtctccgcgacttcgccaagcttctcggagtggacttcgagttcgtcccgttgctgcggccggtgcacgagctggatcggtcggatttcttggttgagcctgacgagaccgtagccgtcaatttcatgctccagttgtaccacctccttggcgactccgatgagcccgtgcgacgtgtcctccggctggttaagtcactcgatccatcggtggttacccttggggaatacgaggtcagcctgaaccgggctgggttcgtcgaccggttttccaatgcactgttgtattacaagccagtgttcgagtcacttgatgtggcgatgccacgggactcaccggagagggtgagggtggagcgatgcatgtttggggagcgcattagaagggccattgggccagaggaaggagcagagaggactgataggatggcggctagtagggagtggcagacgctgatggagtggtgtggctttgagcccgtcagactcagcaactacgccatgagccaggctgatcttttgctttggaattacgattcgaagtacaagtattcgcttgttgagctaccaccagcgttcttatctctggcttgggagaagcagccgctgctcaccgtgtccgcttggcggtgagtccctttttgtgtgtgtgtattggtgctgttgtatgtagcattgtcataggaccagggaagaaatgaatagactggttttgcattgtctt

SEQ ID NO: 3539 - DNA, 299 bp, Zea mays
  Clone ID: TF_LIB3067-053-Q1-K1-C4
gatgtgtcccgtccattcctttaggaggagccggatccggcgccgcagtcgcgcaaggtcgcgaccgccgcggcctcggccgccgccgccaaggagcggaaggaggtgcagcggcggaagcagcgcgacgaggaaggccttcacctgctgacgctgctgctgcagtgcgcggaggccgtgaacgcggacaacctcgacgacgcgcaccaaacgctgcttgagatcgccgagctggccacgccgttcggcacctcgacccaacgcgtggccggctacttcgcggaggccatgtcggctcg

SEQ ID NO: 3540 - DNA, 1183 bp, Zea mays
  Clone ID: TF_ZmC5771_2
tatggcgcttcaggcgatgtacctgcgcgccgtgaggcagggcaccactgtggtggttgatatcgccgccttgctgggagggatcccgtctcagcagcctctggttgtccccgggtctagctctggtcaccttcaaactcctccgttgcgtcttcatccgcgtcctgctcgccgccgaccccggggccgcgtcgaggcaactattgtctgaagccgcggtcgctatctcggacaacaaccatgacacggcggccagccatctggccgccctgaagcgcgcggctaaccagcacggcgatgcggaacagcggctgattgccatgatggtggccgccctgtcctcccgcattgctccggccgcctccgccccatctcaactcctcgccgacctctgcagcgtcgagcagcgcgccgggtcccaactcctacaggacctctccccgtgcttccgcgtcgccctccacgccgccagcgccgccatcgtcgaagcggtgggcgaccaccgcgccatccacctcgtcgacttcgacgtcagcttcccgcagcacgcggctctcatccagtacctcgccgaccgacgcgtgcagggcaggtccctgaaggtcaccgccgtcaccgacccgagctcgccgttcacgcagtctctaaccgcatcgctaccagccatcgaggagcggctgaagaagctcgccgagcgagctggcgtggagtaccgctttacagtggtcagctgcagagcagcagagctggatgcgtccaggctgtgctgcgagccgggggaggcggtcgcggtcaacctcgccttcgcactctcccacgtgcccgacgagagcgtctctccggccaacccccgcgacgagctgctccgccgcgtgcgcgcgctgggcccgcaggtggtgaccctcgtcgagcaggaactgaacaccaatacggcaccgctggcggcgcgcttcactgacgcgtgcgcgcactacggcgccatcctggagtcgctggacgcgacgctggcgcgggagattgcggagaaggccagggccgaggcggccctgtcgaagaaggcggcgaacgcggtgccgtattggtgttcagttcctgctcgacgagggtcaccacctgcgggcccagcgcgcgcacgcggcggagcagctcgtcgcgggggttggccggagagacgctctcgtcg

SEQ ID NO: 3541 - DNA, 379 bp, Zea mays
  Clone ID: TF_LIB4767-027-Q2-K1-H11
gggaccctcgaggccggccgggagaggacgaaacctccggccgcatcctgctgatgttgccgaggaccatgtccctagggctcgggcagtctccgtcgacgccctcgtcgtacgtccatgagtttcccgaagtagaagagaccactgacgacgagcacctcatctggctctatctcgaggtcctcggcaaaaatcatctcccacttggtggcgacgatgctgcggaacttgaacgggacgccgcactggcgggcgaagtcgctgagccggcgcccagccccctcggtccgggtagccgagcggaacccaggctgggggaagtcgatgccggtgatcctcacctccggcggcccacccacccgggtggaccaggaaccca

SEQ ID NO: 3542 - DNA, 787 bp, Zea mays
  Clone ID: TF_ZmC1155_7
ccccctcgggtcgaccccgcgtccggccttcccgtccttttcctttcataaaccccaagccgcgccgcaatagctcgccccctcgttcgccgcctctcctgctcctaccgcagctctccctcaggtttagtgttcgcgcgggagatccgcaacgcggtggcgttcgaggccgcggaccgcttcgagcggcacgagaccttcgccgggtggcggcagcgcatgcaggaaggcgggttccagaacgccggcatcggcgaccgggaggcgttgcaggggcgcatgatcgcgaggatgttcgcgccgggcaactacagcgtgcaggtgcagggcgacggcgaggggctcacgctccggtggatggaccaggccatgtacaccgtgtccgcgtggacgccggtcagcgacgggggcagcacggtgtctgcgtctgtctccaccacagcatcccattctcagcatagctgaatggggggaagacacaaggtgaaagtgaagaagaaaagaacatggtttttcagtggttcttttgctgttactgaaaacttagttcattatacagtctgacaattcttttatacaatcagaagaacaaaaaaagaagcaaaggagtaagaaagatttgtttgtagctttgtttttataggtgataggataaaatattcaattgttagtagttgtaattctttattctttatgtacacttgtcattctttcaccatgtctgtttagcttgtaatctctgttccgagttagaaggaaatggaataaacaagtatggttttcattc

SEQ ID NO: 3543 - DNA, 594 bp, Zea mays
  unsure (1)..(594): unsure at all n locations
  Clone ID: TF_ZmC10887_1
cggncgcgtgggcggncgcgtgggcggacgcgtgggcggacgcgtgggccgacatggacatgttccaggaggacacgctgtcgtcggccacgtcgtctccggcgtcgtcgctgtgcacgccgtcgccgcacccgcacgggtcgtcgtgggtgcaggagctgagccacgaccagcagggcctgcgcctcatcagcctgctgtaccagtgcgcggcggaggtggcggcgggcgccttcgaccgcgccaacttgtacctggagcagatcacgcagctggcgtcgctggacgcgccgcacacgctgcagcgcctcgccgccgtcttcgccgacgcgctggcgcggaagctgctcaacctggtgcccggcctgtcgcgggcgctgctgcccacggggcccggcagccccgcggaggcgcacctggtgcccgccgcgcggcgccacctcttcgacgtgctgcccttcatgaagctggcgtacctcaccaccaaccacgccgtcctggaggccatggagggggagaggttcgtgcacgtcgtcgacctctccggccccgccgccaacccggtgcagtggatcgcgctgttccacgccttcc

SEQ ID NO: 3544 - DNA, 2015 bp, Zea mays
  unsure (1)..(2015): unsure at all n locations
  Clone ID: TF_ZmC5027_1
cggaaaaaaattcgccgccgcttccggtgctgttccaagaaggcatcgacacaaagccccctcttgatacgcagtcgcccggcctcctccaccagtaccagcaccagccgagccccgccacaaccttcctcatgtccatcccctccttccccagctacaatcagcactcgccactcatccatccaccgcccaaacgtcatcaatccataggaggcgacctctatctcgcccgaactcggcttctgccgccgccgccgacggggcaaggtcatgcctttccaccactaaatggtcctgctccattccagctccagccttcgccgccactgccccacggggcgatgaagaggacggctgcggaggcggcgcagcagcagttgctggacgagctggcggcggcggcaaaggccgccgaagctggcaattccattggcgcgcgagagatattggcgcggctcaatcaccagcttcccttgctcgggaagccgttcctccgctccgcctcctacctcaaggaggccctcctcctcgcgctcgccgaaggccaccacggcggctgccacctcacatcgcccctcgacgttgccctcaagctcgcggcgtacaagactttctctgaccactcgcccgtgctccagttcaccaacttcaccgcgacacaggcacttatcgacgaaattgcccgcagcacatcgtcctgcatccatgtcatcgattttgatcttggtgttggaggccagtgggcttctttcttgcaggagctcgcacaccgccgtggcgcaggcggtgcggctctgccgtccgtgaagctcactgcctttgtatcagctgcttcccaccatccactggagctgcgtctcacgcgtgacaacattgcacagtttgctgcagaccttgggattccctttgagttcagtgctatcagcgctgatacgatcaaccctgcagagctcgtttctgccaccgctgatgaagttgtagctgttgtcctcccggttggttgctctgctcgtgcaccaccgctgccagcgatccttcggttggtgaaacagctggctcctaagattgtgatagccatagaccatggcgctgatcgtgctgaccttcccttctcgcagcacttcttgaattgcttccagtcctgcatgttcctccttgattcgcttgatgctgctggcattgatgctgattctacctgcaagattgagaagttcctgattcagccaagaattgaggatgcggtgcttgggcggggcaaggtggacaagccaattgcatggagaagtgcatttgcagctgctgggttcgcacctgttccacccagcaatttggcggaggcacaggccgactgcctcctgaagcgggtgcaggtccgcggtttccacgtggagaaatgcggggtcgggctcacactatactggcagtgtggcgagcttgtcactgtatcagcatggcggtgctgatcagcgatccacgcctgtgcgcaccatgttccaccaacatttgctggcatcttcaaccccagtaatgtgtattttgtcttgcaattaaatgctgctaaggaaactgatatattgctgttgaaccctccatgttcatcatctttgcaacttacgagctagaactagtggatttttagcaatgttggtgccaatgtctctagtgtaatgatgttggtctaagattttaccctgcttgctctcgggtcactagacattctaatgtgacttgaaacactgcttgtgaggagagggtataattaacctatcaaatgtctgtggtacagtactaatacgtgtttcatgttcttttatatcagttcttcttcttatggtatttcattgtgcagtttcatccctgctggccctccggccacttgtcttgctaccgtgtctgctgcctgcgcctgtgtggtggggccatactgcccccctccatcgtcgctcctccagtataatccgtttttcatgttcttttntntccctttttctttggatcttttaaaaaaacccaaa

SEQ ID NO: 3545 - DNA, 1493 bp, Zea mays
  unsure (1)..(1493): unsure at all n locations
  Clone ID: TF_ZmC5784_1
tacccttgtggtccggccgggncgatgcgtcccgtccattcctttaggaggagccggatccggtgccgcagtcgcccaaggtcccgaccgccgaggagaccgccgcggcctcggccgccgccgccaaggagcggaaggaggtgcagcggcggaagcagcgcgacgaggagggcctccacctgctgacgctgctgctgcagtgcgcggaggccgtgaacgcggacaacctcgacgacgcgcaccagacgctgctggagatcgcggagctggccacgccgttcggcacctcgacgcagcgcgtggccgcctacttcgcggaggccatgtcggcgcgcgtcgtcagctcctgcctaggcctgtacgcgccgctgccgccgggctcccccgccgcggcgcgcctccacggccgcgtggccgccgcgttccaggtgttcaacggcatcagccccttcgtcaagttctcgcacttcaccgccaaccaggccatccaggaggcgttcgagcgggaggagcgcgtgcacatcatcgacctcgacatcatgcaggggctgcagtggccgggcctcttccacatcctcgcctcccgccccggcggcccgcccagggtcaggctcaccggcctgggggcgtccatggaggcgctcgaggcgacggggaagcgcctctccgacttcgccgacacgctcggcctgcccttcgagttctgcgccgtcgacgagaaggtcggcaacgttgacccgcagaagctgggcgtcacgcggcgggaggccgtcgccgtccactggctgcaccactcgctttacgacgtgaccggctccgactccaacacgctccggctcatccaaaggctggcccccaaggtggtgacgatggtggagcaggacctgagccagtcggggtcgttcctggcgcgcttcgtggacgccatccactactactcggcgctgttcgactcgctggacgcgagctacggcgaggacagccccgagcggcacgtggtggagcagcagctgctggcgcgggagatccgcaacgtgctggccgtgggcgggccggcccgcaccggcgacggcaagttcggcagctggcgcgagaagctggcgcagtccgggttccgcgccgcctcgctcgccggcagcgccgcggcgcaggcgtccctgctgctcggcatgttcccctccgacgggtacacgctggtggaggagaacggcgcgctgaagctcgggtggaaggacctctgcctgctcaccgcgtcggcctggcgccccatccaggtgccgccgtgccgttgatgagacctctgcctgctcctgcttgcgttgagaggccgccactccacttgttttgcatctgtagctgctcggtttggtcatcagctgggagataagaaaagcggaaacgtactaattgctctggagtagatccatccattcacagtgatagttactgatgtactaagctttaattagttcaatgctagatcgttcttgttc

SEQ ID NO: 3546 - DNA, 1283 bp, Zea mays
  unsure (1)..(1283): unsure at all n locations
  Clone ID: TF_ZmC12356_2
gcacgagatgaagtgccacaccatttcacatataccactcaggtcgaacacttgaaaccactcagttctgtgaagcctttacagggttgcagatgccttagtgtttgtctgcctggtgatgccaactgctgctgtgcacagcgtaatggaggcagcttaccttacagctcatcaggactgcttgtatgccgcaagactatggtttatgaatgtggtgaatcctgtcggtgttctttcaattgtcgtaacagagtgacccagaaaggagttaggatccactttgaggtctttaagacgggaaatcgaggctggggtcttcgttcgtgggacgctatacgggctggttcatttatatgcgagtatgttggtgaggttattgatgatgctaacattaatttgaatgatattgaagatgattatatatttcagatgtcgtgtcctggtgagangacattaaaatggaattttggacctgaattgataagggagcaaagcacaaatgtttccgctgatagctttgagactctanccattaagataagtgctaaaagataggaacatatcacgttcagaccaagtgngctcnaacgattttgcagcagtcagttgaccagagtgacacgccacaacagtcctgcctgagcaatccccagacgatgactagaaagggctgacgtcaggggaggcctaacaaacgcctggagccatgcggtctacgcggaagaatcacacactcaccacacagccaaaggactgactttgtgaatcctcaaattgtcggggattctttatctgaccgtggaaaatgcatattctatctatcaacattcaaccctaccagctagatcctttttggtggcacctgaagaaaaagtaggactgttcgaacagcttgcatcactctgtcgttgtggaaccattatattaattaatgtcaatcttttagatgaccattcagcaactaatgcacaaacgtttcttttgtgggggaagaatgttggtcttggaagatcaattttgtgtagtttgtagacttgtagagcatttagtgctgctaaacttgtgcaccttaagtcttttggctgtaaaagagcctcgaggctccagctgaattggttaggcagtctaagtagcatttctttgatcctgaatttgactccacgtgagtcaatttcaagctggagttaaaaaaaacattcttatgttctatactaaagtacagttctaaggctcaaccatgatcatagtcgttctcacaaaaaaaaaaaaaaaaaaggccccta

SEQ ID NO: 3547 - DNA, 255 bp, Zea mays
  Clone ID: TF_700432452H1
gtaatgcggagatgcaggaagttggtgttggcctatatcccagtatctctttgctcaatcacagctgtgaccccaactgttcgattgtgttcaatgggccccacctcttactacgagcagtccgagacatcgaggtgggagaggagctcaccatctgctacctggatatgctgatgaccagtgaggagcgccggaagcagctgagggaccagtactgctttgaatgtgactgtttccgttgccaaacccaggaca

SEQ ID NO: 3548 - DNA, 1377 bp, Zea mays
  Clone ID: TF_ZmC3525_2
agtacatccattacaagcagttaaaagggtggaagcatttggttgtttacaaatctggcatacatggacttggtctctacacatcagtctttattccacgcggctctatggtaattcaactgataatggaatttagtaaaaagtcaagttactgccaccaagtttggcatatgtttagataaccctgaaaactagcctttcatttggtttagtcccttcaactattccggttattccaatttacccgttaacaacattttttacttttgtttgtccacattcaagttgattttttaatttcaaaatttgtgaggtgatagtcgacaccataatttatgatatatatatataaaatattttttataattattttgaccagttaggacatttaataataaattaactctagaatacaaaattgcataaaatataattatgaaacaattataatatattttaaaaaataaatcatgacatctattaccacttcacaaaatccgaaatttaaactcaacttttccttggagaaacaaaaagacaaatcttgttaaggggcaaattggccaattgaaatggttgaggtagtaaatcagaccaaatgttagtttaggaagttatccggactttggccaaaattcaagggaataatttcaacattttctagcaaataaaaccattctcaggttttgcataaaaatgtttcaggttgtagaatatgtgggtgaaattgttgggcaacgggttgctgacagaagagagatcgaataccagtccgggaaacggcaacaatataagagtgcatgttatttctttaagattgacagggagcatattattgatgccacccgcaaaggtgggattgcaagattcgtcaatcattcatgccaggtaataacttgtgcttgaagccttgaacattctttagataccccttggaacaagagggatgagacttcttttgagattctagtgtgcttattattctaatgtacggttttatattcattcaattcgttcattcttggttgaatcagccaaactgcgttgcgaaaataatctcagtcaggaatgagaagaaggtaatgttctttgcagaacggcacataaacccaggggaggaaattacgtacgattaccacttcaaccgggaagatgaaggccagaggatcctttgcttttgtagatcaagatactgcaggcggtacctcaattagtttccggtgggcgtaacatgtctatatataacttatatatctatatgtatatcttatatatttacaaattacaattgcgattcatgcctgctgtatatgtaggaacttgcatctagaactgcctgtttatcttttgtgaagtcaaatgagttatcagctgttc

SEQ ID NO: 3549 - DNA, 240 bp, Zea mays
  Clone ID: TF_uC-zmflb73150d09b1
cttacgcgtgcggctacgcgtccgacgcagcagctggtgtcagcttcatgtcattaagcgtgtgatatcatttgccaggttagggactcaatatatgagtacccctgatcatggagttgggaccgatgctgccgcgataaagtgttgcagaaaggactgcttgttaagttggaactctgcagaactgttaataagggctgggctagtagagctgccgaacctattccacagggtaccttt

SEQ ID NO: 3550 - DNA, 271 bp, Zea mays
  Clone ID: TF_jC-zmX700049670a1
cactcatctaaccccaactgctatgcaaaggttattctgatgtctaccaaccctccacttgtatctatgctaaagagcatattgaggctagtgaggaactcttctatgattatccttatggtcctgaccaggctccatcttgggctaatataccctaacgtataaagaaagactaatcattcctctctcaccatcgagcacacatacttgctctatatcttaatatcatctccggatgatacaatatgccttaaattatatatttaataca

SEQ ID NO: 3551 - DNA, 610 bp, Zea mays
  unsure (1)..(610): unsure at all n locations
  Clone ID: TF_LIB3606-016-Q6-K6-B5
anaaaggtaaacataagcatcaagtactcctggatgctggttggggttcaggtgtattgagggatgaagatgcccttagccttgatggttcattttatgggaacgttgggcgatttatcaaccacagatgctatgatgcgaatttagttcagatccctgttgaagttgagacgcctgatcatcattattaccatctggcatttttcacgaacaagaaagtagaggcatttgaagagctaacatgggattatggcattggttttgatgatacggaagggcccagtaaaccattcagatgcatgtgtggaagtagatattgccgcgatccgaataatctgagtatgttgccattttcaatgcataaaagtatgaaacggggaatcatgtatgtatgattgtgttttggcagggaggatggctagagcagctgcaaagcggaagtaggcggggaagctgaacttggttggagattagcacatcaacttttgctgtggtatttggttccgtatttgatgtgcagcagcatcacatcagttagtacttagtattagtgtagatagaatggagatgagggcggatgttttggacccttgcccgtggctgagcaaca

SEQ ID NO: 3552 - DNA, 631 bp, Zea mays
  Clone ID: TF_LIB3689-220-Q1-K6-A12
gctcttgcaatctgtttgctatcgagtttctcctaactcctgggattttctgatggtacaggttgattactgaaatattttctttaatattctactccataccttccaaattataaattgttttagatacacagatcttgttatgcacctagatatatataatatatttacaatttcgaatggaggtagtaaaacattgaatatttcctcatttcctaaacaagaccggagagctgtcatatgttagaagtaaaagttatgtcttatccacgtgtgcacaattgaaatggtatgctttacgtagttggtttacatgaaaaaattgtattaatgacaaggctagatttgtgatcaagttatatttcctttttaatgtcattgtttattataatccacatcatatttcgtattttaccgttaacatctctcttcagttacagatgatgcaatatgtaaagataggcttcagcatatgagacaacatagagattagaatttctacatgtgtaaagtcagcaaggactttgtaattgatgcagcttttacagaacacgcttctcgcttttttaaccacagttgtcaacctaactgtcggctggagaaatggaatcagagggtctgctttgggccc

SEQ ID NO: 3553 - DNA, 2316 bp, Zea mays
  Clone ID: TF_ZmC3614_2
cctgcaggctccggtgcggaactcccgggaaagaaacacatttagcagtccagactctaatatcatccaacgattcatggcctgttggcatgttgctggaccgtcactggttcacaggcctctagaggatacttggccagagcgggtgcgccgtgcgcgtgcgcggcggcggagtgcggtggtatccagcgcgtgtgcgccgatgtggaggccgatgcagcgggcccgggctttgaggccgggatggggagcctcagggagtgcggcgacggctgcgcgtctgcgccgtcatgtgggaaccgacggactcagcgcggcgtcgctgtgcggctgtgcgtcgtgtgccacctgcacaaggggtgggggctgcacgctgcggaggcctcaactgcgggcagtttgtgtgcaagtacgccggtaaagaagcaggttctgttccatgacggacgaaatgattccggatgaagctgtgcgcccgtgccgcattccaaactgcaaaaattgctggacgcggctccgtaccatgttgaacaaactgattttatatcgagcgatgaggcgatccaaacatgctgttaaactcctacttaccaaacaaagccactgatcaatggctctgtgaagtcgtctgccaaacgagcactataaccacattctattataagctacacagtactaaacaacaagacacattaagaaggacatttgggtagatttttaaccatgtttggtctcgccggatatcatagacatattcgtataatttgttcacttgtgtttccagttagttgttcatctatgcctagctttgctttggttctgttcttgtcatagctgaaaaaagaagcgaattcattgggcaaagccttatatatagttgatacataaggattcatgtaaaatacatttgcagtccggtacagtttttagccttgtgccctttgcaaaaaggactacaagaaccatgcctttttccagcgtaagctgctgttgacttgttgaatagtttattcacagggagtttagactaatgttaatgtggtactccatctgtcccataatataaggcgtaaccactttttgttcttgtcccataatataaggcgtgctttctctagacacacgcacatcgacgcagtgtcatagaaaaaattaaatacatttcttagtctttaaaccagaggtagttacgccttatatactgagacagagggagtaatagagtttaggcgcgtcagctctaaacagtaaactgatagtacattaacgtttatgattagttttgcgccacattctatccaaaagatccagtgagtagattagcttgtggaataatttaacttcttgcccctgcatcattttaagcttatcaagtttcaggaattctccacacaactgttgatttagtgatcttttatcatcagtttataaggttgcatcagaatgaaagattggattttgtttagcctgacattcttgtgtttggctcatacaatcatataagaggtgctttatgactggatcagttattatccagaatagtgtgttgagcttgtgcgctgatgtatatatttttgaacgcattatgtgatgatatttgaatatataatattacagattgttggtattatttagaaactttaactaatacatattgtctttaaaaaaattacattattttttatttgttccccacagtttcaggtcacgttgagttctgactgttgactagcgaacctatagtcactgttgctttcttttgtggtcatctttgtatttaaactgcagggagtttttgacaactgaagaagcgcggagacagcacaagctgtatgatgaacttgcctctggtggcaagctctgtcccgcgcagattgtcataagagagcacatcccttctagtaaagcatgcttaagagtcaacattgatgcaaccatagtgggaaatgtggctcgttttatcatacagttgccttcatgtgatggaggcaacctgcaccccatgctggtgaggagctctgattcgttgctcccaaggctctgcttctttgctgccaaggatatcgtggagggagaagagctcaccttcagttgctgctaagggtttgccatgcttttgtggaagctcgggttgttctggtgtgcttccttcagaagaaacttaagaactgatgccatctcctaggatgtcttacaaatgagttcgattctatttctgacttcgcaaataacattggcttcatgaggaattgtctggcccattctttagccatactgtaatgtgtgcaaaaaaaaacaagcagtcattttttggtg

SEQ ID NO: 3554 - DNA, 1848 bp, Zea mays
  Clone ID: TF_ZmC2220_1
atgagacttcgattgtggaggtggacgttgcttcctcagccaatggtgaggtgaagatgtcactgaaatgcagcgtgggttcttcaaatttcagcattagtatggaggaggtttttaaaatggtggaggaaaagtgccttcactcatacaagatgctaccttcagatctttctattggcaagctgctgagtgaggtatgccaatctgttgtgcagttgggcactatgcattctgaggttaatagggacagtggcagcttgcataatgaagtagttgctccatttgtgaagccaatctcttgtgaggctgctgtgggcataagtgatgatgtggctggtgggtcatcagtgcttgaatcctcagaaccttgtttgcagaattcgcttgttgcttggtatcctgagttggctcattgtaagcaaaagacaacccatgataccactgatatatccaaaggggaagagcgggtaagaatacctttagtaaatgaatttggcagcgagtaatgtcctccatccttttattacgtgccaagaaatcttgtcttccaaaatgcttatgttaacatctcgattgctcgaattggtgatgaagattgttgtgctgattgttctggcaactgtttgtcatccttagttccatgtggctgtgcaagagtgacggggggcgaattcccctatacaccagagggcctgcttaagacagaattccttgatgaatgcacctcagttaatcatttcccacaagagcatcataggttctactgtacagtttgccctcttgaaagatctaagaataaagcctcacctggtccgtgtaaaggccatcttatgagaaaattcattaaagaatgctggagtaaatgtggatgtggcatgcagtgtggaaatcgtgtgattcagcgtggtataacatgcaaattgcaggtgttctttacacgcgagggcaaaggctggggagtacgcacagtagaggatctcccaaaaggttcctttgtctgtgaatatgttggagaggtactaacaagttctgaattgcacgaaagagcaattgaaaatgcaagaaatggtaaacataagcatcaagtactcctggatgctggttggggttcaggtgtattgagggatgaagatgcccttagccttgatggttcattttatgggaacgttgggcgatttatcaaccacagatgctatgatgcgaatttagttcagatccctgttgaagttgagacgcctgatcatcattattaccatctggcatttttcacgaacaagaaagtagaggcatttgaagagctaacatgggattatggcattggttttgatgatacggaagggcccagtaaaccattcagatgcatgtgtggaagtagatattgccgcgatccgaataatctgaggaggatggctagagcagctgcaaagcggaagtaggcggggaagctgaacttggttggagattagcacatcaacttttgctgtggtatttggttccgtatttgatgtgcagcagcatcacatcagttagtacttagtattagtgtagatagatggagatgagggcggatgttttggacccttgcccgtggctgagcaacacgattgcgaccttaacctacggcatattggcatgtaaattagcctgggattgagtaggcgtagaaagaacgcgtaatagtacttagttatgtcatgtcatcttggtagagggcaagttaaattacatgccatgtcgttgcatcatctatgccatgctgggttggatgcttgtgctgaatgatttgttgaagcgactagcctaggcacttgtttttggcggtatcttctaaaaaaatttcttccctat

SEQ ID NO: 3555 - DNA, 2140 bp, Zea mays
  Clone ID: TF_ZmC3477_2
ccgccggccgccgccgacctacgtgccaaggtccgcatattcggaaccttcgccggcgagcacccaccaggatttttttgtacatctaagatgtacagggcctcgaatttatacctgatcctaatcaggtgctcctagatgccaaaccattaagatcgttagctccaatgttccctgcccccatgggagtcaatgttaatcagtcaagtacaccaccattggtctgtgtcactccggttggtcaattttcagcagggtttggtgcaggtaaccttcctgcctttggatcgttcactactttcagtgccacttcaaatggtgtttcttatgcaggcattgattacatgactagtaaatttggaaacgatgaggattctgtagccatatgtatcgtttccgcaggaggttatgagaatgatgatgatgacacagatgtgctggtgtacagtggtcaagggggaaatagtaggaataccgaggagaggcatgaccagaagcttgagaggggcaaccttgctctcgagaggagtttgcacaggaagaatgggataagggttgtgcggggattcaaagatccagctatggtagctggcaaaatctacatatatgatggcctttataagatccaagagtcctggacggagagaacaaaatttggcgtcaattgcttcaagtacaggttgcagcgtgaacctggacagcgtgatggagctgcaatatggaagatgactcagcgatggatagatgatcctgctaccagaggcagggttatactagctgatctatcatctgaggctgaatcgattccagtgtgtctcgtcaatgaggttgaccatgagaaaggacctgggcagttcacctatactaatcaggtcaaatacgtgaggcctctcagttctatgacacccctgcagggctgtggatgccagagtgtttgcctgcccggtgatgccagttgtgcttgtggacaacataatggaggtgatttaccctacagttcattaggattattgtcatgccgcaaaccgatgatctatgaatgtggtgaatcttgcaactgttctacaaattgccggaacagagtgacccaaaaagggcccaggctacattttgaggtcttcaggaccaccaatcgaggctggggtcttcgttgctgggaacctgttcgtgctggttcatttatatgtgagtatgctggtgaggtcattgatgaactcaaagttaatttgaatgacaccgaagatgattacatttttcaaactgtatgccctggtgagaagactttaaaatggaattgtggacctgaactgttaggtgaagctagcacatatgtatcggctgatgaatttgagccactgcctatcaagataagtgcaaaaaacatgggaaatgtctcccgtttcatgaaccacagttgctcacccaatgtcttctggcaacctgttcaatatgatcatggagatgatggacacccacatataatgttctttgcactgaaacatattccacccatgacagaactgacttatgactatggtgttgctggagctgaatctagtggttcaggctctcgtagaacgaagaactgcatgtgtggatcacaaaactgccgtggactattttgatgggttaagatccttgctctttgtggttaatcatacaaaccactttcagctagatcctttcttagtctccggatgatatgagtatgactgatgattccaattgctgccatgtgtactgtgaagacagcaagttgttgtcaaactgtagaatttctgttgccctgcacggcatggtggccgttctcccaccatttgttcaaatatttatgggggtgtggattgatgtatttcttctgctaatcttgtccacctgctgcaccggtttgtgtaaacttgttatgatccctgtttgctctggacgcctggttgtttaaccgtgactccttggatctggtcatgtaaattatcctggtttaggattatattgcttttgactctcatgtccacctgctgcaccggtttgtgtaaacttgttatgatccctgtttgctctggacgcctggttgtttaaccgtgactccttggatctggtcatgtaaattatcctggtttaggattatgttgcttttgactcg

SEQ ID NO: 3556 - DNA, 657 bp, Zea mays
  unsure (1)..(657): unsure at all n locations
  Clone ID: TF_21211472
gtccttttgtaatttatcacatcttcaaactcaggtttcaatggttgtatcttatattatgttcgtggagcttatattttccatgtccatatttgcttgtgatatctgtcaacagggtttgctgcaaagtgagcctgaaggcgagcacaatgaaaatattggcttttatgggcgatgcgtgtctcacgccattgttttttctagtcacgttaatcctaagaaagaatactttagaaacaacaattggacatgtgcacgtacagagggttttaaaggccgaaagggagaaggcttttctgatagtagccataaaaaatatgaagagtacagtggcgagttcggtgtttcccaagaacagataaatgcttggttacgcataaatggttcaaagccctgcggacgaggacagaaggagtacatccattacaagcagttaaaagggtggaagcatttggttgtttacaaatctggcatacatggacttggtctctacacatcagtctttattccacgcggctctatggttgtagaatatntgggtgaaattgttgggcaacgggttgctgacanaagagagatcgaatancagtcnggggaaacggcaacaatataagantgcatgttatttctttaagattgacagggagcatattattg

SEQ ID NO: 3557 - DNA, 566 bp, Zea mays
  Clone ID: TF_700196512_FLI
tgctactggcaaaggaaacatagcgcgcctgattaatcactcgtgtatgccaagctgctatgctaggatcgtgaccgtcagtggtgacaggagccagatcattcttattgcgaagagagacgtctctgccggagaagagctgacgtagttcctcagccctgccagtataactacctgtttgaccctgacgagtccgaagactgcaaggttccatgcctgtgcaaagctcctaactgccgtggatacatgaactagggtgctgctagaagagtaaaaaccaatctaacaaacaaggactgaggctaactccttacagaagccaaaagccggccattttttttcctggaattctttcggtagtttctcgttttcttatattactcaccagaagcttacaattcgtgggctgcacaaggtttggaccattttgttcagaaattgcgatttagggcagccgtaggcagtcatccatttgtatattcttccattgctgtgataagatggtaagaatgctcaaatttttttttttttggttaaatgaaaataagaaaaactcagtttgattc

SEQ ID NO: 3558 - DNA, 1964 bp, Zea mays
  Clone ID: TF_ZmC3767_1
ccggccggatagccgctttctctgcacgcctcacacactcacgtgagggccctggttgaccctctcttcctccctccctccccctcctcctccccctcttgcctcaccttgcctcacgcttctccctcagcaccatccgcctgcccaccgtgcccctgctcgcccttcccgtcgcggtgctcgtccgccctgccgcgccctgcccgccgcgtcgtgaggggatgtgtctagggttattgggagagcaccccttcctatggcgtccacgacaagcactagggcgtcgccatagacgcctcgcggatgccatacacccagttggcaaggcgtggactgtggcgttcggcctggagcaccgcttaagagacactgtacggacgccataacaattaacaagcatggctctagtgcaggtgcgatttactcgtgcagaagctccgacaactatttccgaattacccgggctggtttgtgatgacatctctggagggcaagaaaatattcctattcctgctactaacttggttgatgatccacctgttcctccatctggtttcaagtacttgaaatctctacaaattccaaaggacatcaagattccgtctagtattattggctgtgattgtgaaggaggttgtgctagcaacaaaaaatgtttgtgtgctcagcgcaatggttctgatctgccttatgtatcatataagaacattggcaggttggtggagccgaaagcagttgtatttgaatgtggggctaactgcagctgcaaccatgattgtgtaaacagaacatctcaacaaggtttgcagtaccgcttagaggtatttaagacagcttcaaaaggatggggagtcaggacttgggacactatcctccctggggctcccatctgtgagtacacaggggtgttgaggaggaccgaagatttggatggttcacagaacaactattgttttgacattgactgtcttcaaaccatgaagggtttggatggaagggagaaaagggctggatccgaaatgcacctgcctaatcttcatcctgagaatgattcagatgcacaacctgcacctgagtactgcatagacgctcactctattggcaactttgcaagatttataaatcacagctgccaacctaaccttttcgtccagtgcgtcttgagctcacacaatgatgttaaactggcgaaagtgatgcttttcgctgctgacaccatacttcctcttcaggagctatcctatgactacggttatcgattggacagtgttgttgggcctgatggaaaaattgtgaagctggcctgccactgtggtgctcctgattgccggaagcgcctctactaacctgcagtgtgtttatttctatttggatttttgaggaaacagcttatattgtaggaaaaacagtcatggtacctatgtagttgacatgctcttgatcatatatagcaaaagaggagcaatttatggggtgttcggtttaagaatgagttagtatatcatcttctcatttactatttttgcttggtttatgtaataaaatgagtcgatctatcaccaccttattcctcatagttagttagttagcactaacattagaaatgaagtcatcttatcaaatttaaggaatgagcttatgatgtaccaccttaatttggatgaagtgattcatcaaacaaacaccctattgatataatatagcattcttgttttgtgataattagagatttaaagcggctggtggtcatggtagcatattttgccacgattaactgataggacctgcaacactggataaatatatatacgttacatgttcttatgaggtgtttactttgaggaatgaggcagtggatcatcttctcactactcattatctatgtttggcggatggaattaagtgatttgttccctcgctggatgtccgctggtcctgcagggatgtggtgctgtacagcgtgc

SEQ ID NO: 3559 - DNA, 2023 bp, Zea mays
  Clone ID: TF_ZmC10178_1
cacagcttcttcacacacacagtgcgagaagggcctacaggggccgtacttaatccggactcacgcagcactgaccagtcccccacgcccaccgaacagctcccggcggaagaggagaggtttctgcagagaaaggcgtcaagcctgaccagccaggactggtctgttttgacgtgttctgctcatacctacccgcctgcgaattcattttgtggcagttggacgcttgcaaccgtccgaaagctttgttgcttgaatgcgagcggcattctggctgtagaagtaaaaattggagatccagtattaagcttaagggctcgttgatgccatttgggaaatggatagatcgacatcagccaggcgtgtgccctactaatcctccaaaacgctcatctcgtttgatgtagttacagaagttaattgatttactaaatgacccatatgatcctgttcatgtaacattgctaacaggatattatgcagtctgtgtcttggttgtttcagaaaacagcaaatggtagagtatgctttggtagatcgggattccagtggagcaggaatgttatggtgtgaaggggtaagcaagactttacttcatgggtttgtcgggcttgtgaaaaacctgagcaaaagagggagtgctgtctttgccctgtaaaaggtggtgctttgaagccaacaaatgttgataacttgtgggttcacgtgacatgtgcatggtttcagtcacaggttgcttttgctagtgatgagctcatggaacctgctattgggatattgaacattcaacctttgttatttatgaagatgtgtgtggtttgtaagcaaatacatggttcatgtactcaatgctacaggtgctctacttactaccatgccatttgtgcatcaagggcaggctatcgaatggagcttcactgcttggaaaaaaatggcagacagacaacaaagaagatttcttactgtgcccaacatcggagccctaaccctgataatgttttgataattcaaactcctgctgggactttctcatcaaaaaagcttgttcatagcaatggcaaggtagctgcatcgaggctgatcaggaaagatattcccttggatttgccatcagaagttaaaatttcagagaacttatcagcggcgagatgtcgggtttatgttaggaaagatctaaagagatctagagagggaacaattgtacatcatgttagaggaccttgtcaacaccgctgggaagaaattgataatctgaatccaccaagggaagagagggatccagaatctttttgtactttcaaggagcgtttgtgttacttacagaaaacagagcatggtagagtatgttttggtagatcaggaattcataggtggggactttttgctcggagggacattcaagaaggagaaatggtccttgagtatcgtggtgagcaggtcagacgaagtgtagctgatttacgtgaagaaaaatatcgtgtgcagggcaaagattgctatcttttcaaaatcagcgaggaagtggttgttgatgccacagacaaaggaaacgtggcacgactgatcaatcattcctgcacaccaaactgctatgcaaggattatgagtgttggacatgatgaaagtcgtattgttctaatagcgaagaaaaaagtttgcgctggtgatgagctaacgtatgactacctgttcgatccagacgaggccgatgaacgcaaagtgccatgcctttgtcagactgctaactgccggaagttcatgaattagttcgcttagatgtcagaggatcactgatataattttttcccccttatttacccccgggttttctccctctcgatgattcatttcctggtatatgttagagctcaatttttgcttacattcgtttttagaataagtatagttagagctctcaaaaagtggagcttccattcctgtaaataccacagctgtaatcactagggacagttcatttttcaaataaaacatttttgtgctaaaaaaaaaaaaaaagggcggc

SEQ ID NO: 3560 - DNA, 2452 bp, Zea mays
  Clone ID: TF_ZmC4118_3
tcggaattcggctcgggccagcggccagcaaaagcagcggcggcgcggccagggaccgacgtacccgccgcgagaagctccggttggcaccccaacggcatggatgctagcagcgtcagcccgtgcgatctagacagggagtttgcgctccaaatcgctcagctcctcgccacgcctcctctccaatcagcccaggaatactatggtgaactcatacggtccaagaagcttgatggcattagagtgagctacagtggcaagcatgggaaaggtgtttatgcaaatagggactttggtgaagacgaccttgttctgaaggaccaaatgttggtcggtgctcaggacagccttaacaagattgactgtgttgtgtgtagttactgcttccacttcattggttctatagagtaccaaattgggcgtagattgtatttgcaaagccttggtggtagtggtgatggcactaccgagagacactgccatgggagtgatgttgggtcaagtactggctgttccggtgcatcaaatggaaatagcaatgctgtgccacaagaggtcctgttgtcacttatggatggtaatacgctgttgcctttaaccgatcagttctgtttgccaccagttgttgcttgccctggtggatgtgagggagaactctactgcagccaatcatgtgcggattccgattgggattcttatcactctttgctgtgtgctggatccaagactgaaccattgcggaaatctgcccttcagaaatttgtggggcatgctaatgaaaccaatgatatttttttggttgctgccaaggctatcacttccaccttgttgagatataggaaactcaaaagacagcatgtgtctcatgaatcaagctcttcgctcctcttggaagcatggaaaccactttcaatgggcttcaaaaagagatggtgggagtgtgttgctttgcctgaagatgttgattccagtgaagaagaattgtttagacagcagataagggatctggcgtttacgtcactgcagcttctcaaggatgcaatctttgatcctgagtgtgcgcctttgttttcgcttgacatctatggccatataattggcatgtttgagctgaacaatcttgatttagttgtcgcatcaccagttgaagactatttcatatacattgacggtcttccagagagcgacaaggaggaagcagagaaggtgacagggccattcctagatgctttaggagaagactacttagttccgtgcgagggaacggcattctttcctctgcagagctgcatgaaccattcatgccgtccaaatgctaaagcatttaagagagacgaggacaaggatggccatgcagtgataattgcccttaggcccatcagcaaggacgaagagattaccatcgcctacatcgatgaagaccttccttacgaggagaggcaggcgcagcttgcagattacgggttcacgtgtacatgcttgaaatgccaagaagagcgaccggtctgaaaggacaaatatgtttgaattttgcggcattcagcctatgtcactgggtagttttgaaagctcgcgagaagtgagtgcacaaaatgatgtttgttttcggctgtaacttgcaaaagttttgttgttgtccaatgaatatgaatagtgacgaacagacgatcagtcgtcgtaaccagcagcctcatgggactaacacaaccacaagagcgaatggcaatagcagcaggttgacacttgcaactattttggttatacttgtacattaacacaactggctgattcgccaagtatgctagtattacatttgtcatctccctgcatagattatgggggcactgcatatcgcacaacgacgtgtacatcatagcacaggcttttacacatggtacaggaaaaatgagttccatcactcgagccgagctgacgaaagggaaaaaaaaaacaatgatgtcctccgttctcactaagccgctgccaacacttggatggatggcagtttgacctgcaggtaaagaaactctatctctggtctaggcctccaaatattgttccaaattcggcgcgcggaaacattggttgctattctttcaggtcgctgcggggagatgtgcagttgatatttgataaacctagcaaccaatgttttattcgctccaagcttggaacagtattttggaggcctagaccagagataaagaggtcaaactccatccaggaaattggcggcggcggcggattagtgagaagggaggacgtcattgttttttcttttctctgctcgaatgatggaactcgttttttttcctgtatcatgtgtaaaagcctgtgctatgtaccagtaatccattgttgtgcgatatgtagtgcctcagaatctattcaagggaaaacatatgtagtagcatacttgtcgaatcagttgtgttaatgtacaactccaccc

SEQ ID NO: 3561 - DNA, 1091 bp, Zea mays
  Clone ID: TF_ZmC2742_2
aagacgaggatccttgtattcgtttactctcgtactgcaaaaagcatagacagccttctgctgctgaacgtccatctttagaaagtgatcctcctgaacccattcaggtagttcagacagatatggcttcatcatctggttgtgcaaggaccgaaccctataatttacacaggagaaggggccaaaagcagccacaagttgtcgctactgcttctctgaaacgtttatatgtggagaatagacctcatattgtcagtggctactgccaaaacagagtaggcaatacatgcggagaatcaattcaaccgtttggtttgtcagatgctgtgcagcaagaagctattggcaatgtgtcttctatggttgaaaaatatacaatcgtgaaggctacatttaggaagagactaacttttggaaaatcaaaaattcatggatatggtgtctttgccaaggttgcacacaaggccggagatatgatggttgaatacataggggagattgttagaccaccgatatcagacactagagagcggcgaatttacaactcactagtgggtgctgggacatatatgttcaggatagatgatgaacgtgttatagatgccactcgggttggaagtatagcccgtctgatcaatcactcatgcgagcctaattgctattcacgtgccataactattcttggagatgaacacatcatcatttttgcgaaacgggacatagatccatgggaagagctgacatatgattataggttacatcatattggttgggatatgacatgcttgtgtgatatgcttgccagtgcctaaaggcaaattctaaaaaatggttgagtttcattcttgaatcctgataattcttctcattatttgagtggaagacgaatctaattgtataggtacccaatataggatcggcaatccaatttggggacataagttgaatcaattgtcgtgtaccattgaaatgttagttgttacacatatttcggccatttgagatggcctgccatgtgtaatgtaatcgaagtacatggttgcacttttcggtgttgcccatatattatccataacaatatgtagtttcca

SEQ ID NO: 3562 - DNA, 771 bp, Zea mays
  unsure (1)..(771): unsure at all n locations
  Clone ID: TF_LIB4704-006-R1-M1-C10
agaaaattcgggtcaaaagtaacattaatcctaaaccaggataatttacatgaccagatccaaggagtcactgttaaacaaccaggcgtccagagcaaacagggatgataacaagtttacacaaaccggtgcagctggtggacaggattagcagaagaaatacatcaatccacacacccataaatatttgaacaaatggtgggataacggccaccatgccgtgcagggcaacagaaattctacagttgaaattctacagtttgacaacaacttgctgtcttcacagtacacatggcagcaattggaatcatcagtcatactcatatcatccggagactaagaaaggatctagctggaagtggtttgcatgattaaccacaaagagcaaggctcttaacccatcaaaatagtccacggcagttttgtgatccacacatgcagttcttcgttctacgagagcctgaaccactagattcagctccagcaacaccatagtcataagtcagttctgtcatgggtggaatatgtttcagtgcaaagaacattantatgtgggtgtccatcatccccatgatcatattgaaccggttgccagaagacattgggtgagcaactgtggttcatgaaacgggagacatttcccatgttttttgcacttatcttgataggcagtggctcaaattcatcagccgatacatatgtgctatcttcacctatcagttcaggtccacaattccattttaaagtcttctcaccagggcatacagtttg

SEQ ID NO: 3563 - DNA, 3064 bp, Zea mays
  Clone ID: TF_ZmC3517_1
gaaatcctccacaacccccatcccggaaccgttccgccgcaccgcgggccgcttccatctccaggggcaggggatcttggagggggtctgctggtgggtccgagcagggcagcggcggcgttggatggagactggggcggcggcggcaccggcatcgagggcggacggcgtgcggaggtgcaaaatactcgtgccctggcgtttccagcccggcttcgtcaggcagccgctcaagcaggccgccaatgacgcagcggtcaacggcgacggaggtaataccgccggcgcgcctgatgctaaaagttgccgagcggatggggcggcgagcgacggcggtgagaccaacgttttccgagacgcaaaaaaattcggatcgggtagggctacccgcgggaagaatggggaagttgacggaggagaggagcattcggagagatgcactagcagtcagagtttgaagagtcctgatgtagaaaatggcggtcgccctggacccggagatgcatgcaatctgggcgagtctgtaaggggaggctgggtgaagagctccccattggaaggtactggaaatagcaggggtgcaaatggtggcgtcgaggctggagaggactacaatctggggagctctaactgtgatgctagttggaaggacgctcgcacccaggaattcaggggtgctggtgatggagcagcttgcgatcctgaggtgattgagagcaatgtaggagcagagaagtgctttgccaagggtttgaagaagccgtttatggatcagaccgggtcaaagagcaatggttcttctgctccaggactcgagtcagaggaccctgagggaaatgttggcttggaagattcctcttatcaagccgcaaaggggtgtagcatgggagatggagcagccaaggagaatgaagcaacagccaatggttgcagctcggcgactcctggcagcattggtaatggaacgtacgtccgcaagggacggaaggcagctgtaccatggagatttcaggccaggtacaagcgatcgttctctgatgcttttggctccaataatgaatctcctgatcttccagcatacatgtttgacagtagttcaacacagtgcaccccagcaactagaagcaccgtgcggtgttatgcgagtgctcattctggtgttagagtttcggctatgaataacttctcagtgaaaggtgatactgaatgtaagaagaggaaaactaataatgattatcaggatgaatcaatgctaaataatggaggtgtcgttgttagagaacgcatcatgcggtctctacaggatctccgtttaatttatcgggaccttttagatgaagaagataattctagggaaaaagtgcttaatgtgcggcctgatctaaaggcttacagaatcttcagggagcggttctgcacagattttgatgatgagaaatatattggcagtgtgcctggaatatatcctggtgatatcttccatctgagggtagagctttgtgttgttggtctccatcgcccacatagggtaggtattgattgtaccaagaaggatgatggtacaactgtggctgttagtatcgtgtcatgcgcacaatctcatgacatcaagtataatctggatgccttcgtatatactggactggtggctgttgcagtcaatcagaggatagagggtaccaacttggctcttaaaaagagcatggatactaatacaccagtccgtgttatccatgggttcaccacttttaatggaaaaaagaaatttcctgcatatatatatggtggtttataccttgttgagaagtactggagggagaaagagcatggagaccgttatgtgtatatgttccgactgagaagaatggaaggacaaaagcacattgacatccaagaaattctgcaaacagggaactctggatcaaacgacaatgttattatcaaagatctatcacgtggattggagagagttcctctacctgttgttaacaaaatatctgatgagcgtccaatgccctattgctacatttcacaccttcgatatccccgtaactaccggccaactcctccagccggttgtaattgtgtaggtgggtgctcagactcaaacaagtgtgcatgtgcagtgaaaaatggtggagaaatccctttcaatgataaaggccgtattgtagaagcaaaacctctcgtttatgagtgtggtccttcttgcaagtgccctcctacatgtcacaacagagttggccaacatgggctcaagtttcggctgcaaatcttcaaaacaaaatcaatgggttggggtgtgagaactcttgaattcataccatctggaagctttgtgtgtgaatatataggtgaagtgttggaggatgaagaagcacaaaaaaggacgaatgatgagtatttatttgctattgggcacaattattatgataagtctctttgggagggcctatcaagatctataccgtcacttcagaagggtccgggcaaagatgatgaaaatgaaactggatttgctgttgatgcttcagagatggggaactttgcaaaatttatcaatcacaattgcaccccaaacatatatgcacaaaacgtcctttatgatcacgaagatatcagtgtgcctcatatcatgttctttgcttgcgatgatattcgacccaatcaagaactagcataccactacaattataaaatagatcaggttcatgatgccaatgggaacatcaagaagaagaaatgcctttgtggctcggttgagtgtgatggctggctgtattgattttttaaaaacttgctgtattacgtttagaatctgcagtttttttaagcataactgaacttgaacttgtttcattttgccttcatctagatcatgttgtgacaaaatgtaaaataagacatcagtgtttttagttgccaatgggggtcaagttttttcctttctcattctattcgttattttatatgtctagctttcaatatgtagaataatgtgtgaatatacatggcaataagttcaagtgaatttgctatatttgacaatttacataaaaaaaaa

SEQ ID NO: 3564 - DNA, 1048 bp, Zea mays
  unsure (1)..(1048): unsure at all n locations
  Clone ID: TF_ZmC2220_2
gcagtgtggaaaccgtgtgattcagcgtggtataacatgcaaactacaggtgttctttacacgtgagggtaaaggctggggagtacgcacagtggaagatctcccaagaggtgcctttgtctgtgaatatgttggagagatactaacaagtgctgaattgcacgaaagagcaattgagaatgcaagaaatggtaagcatatgcatcaagtgctcctggacgctggttggggttcaggtgtagtattgagggatgaggacgcttgtagccttgatggttcattttatgggaacgtcgggcggtttatcaaccaccggtatgtaggatacttgctcgtttttttttgctgtaaatatcttgccatagtttgtgtattacagtcttttgtctgctactccgctatgtttttggtaacgaacatatgctatgactagatgctacaatgcaaatttagttcagatccctgtagaagttgagacgcccgatcatcattatcaccatctggcatttttcacgaacaagaaagtggaggcatttgaagagttaacttgggattatggcatcgattttgatgacatggaagggcccagtaaaccgttcagatgcatgtgtgggtgtagatactgccgcgatccgaacaatccaaggaggatgggtagagcagctgctaagcgaaagtaggcagggagcgcggacttggttggagttgagcacaccaacttttgctgtgggggggtctggtttcgtgtttgatgtggagtaatgcagtaccatcacctcagctagtattaagtgtagataggtgtggatgattttggtgaatggtgttatggacggaaatgctgcaggctgagcgacctagtaacctatgccatgtagtggcatctaaattagcctgggattgtgtatgcgtaaaaagaacgcctaagacttaaccatgttattatgtcagcttggtacatggtgataaaaagaatctgaccatttcatgtcatgncttttgtcaaaaaacatgaagtactctgcgcttgttccactgcttatgggcg

SEQ ID NO: 3565 - DNA, 259 bp, Zea mays
  Clone ID: TF_700456152H1
ctcgatttatgaatcacaacagccagcccaaatgtgagaccctcaagtggacagtgaatggggacactcgtgtgggcctgtttgccgtctgtgacattcctgcagggacggagctgacttttaactacaacctcgattgtctgggcaatgaaaaaacggtctgccggtgtggagcctccaattgcagtggattcctcggggatagaccaaagacctcgacgaccctttcatcagaggaaaagggcaaaaagaccaaaaa

SEQ ID NO: 3566 - DNA, 3060 bp, Zea mays
  Clone ID: TF_UC-ZMFLB73179F11_FLI
gcgacttcgcgtgtgagggcgggagagcgcgcggggctagggtttccacgggtgatggaagcagaggctgccgcggcggtagtggcgtcgtccgcatctgcctcggcttccgcgggccggtctcgcccatctagcagcgccgcccaggtcaccagtaattcggctgtgcgagctggagaagaaaatgctgcctccctctatgttttatctgttattgactcgttaaaaaagaggattaccgcagatcgtttgacttacattaagaataggataggggagaacaagactaatatcagcagctatacacagaggacttacaatttatcaaaaaataggcaaattagtacatcaaagggtactgattcagcatcaaatttgctcacaaaaaggcaagatgatgcgctatgcaccctgcatagtcttgatattattccggttgacaaagatggtggtacttttcaagacgaaagtcctttctcttcatctaatgttatgtttggtggaaatcttggtcccaagaatgctattattagaccaattaaactaccagaagtgccaaagcttccaccttatacaacatggatatttttggacaggaaccaaaggatgacagaagaccaatctgtacttggtcgacggaggatttactatgataccagttgtggtgaagctctaatttgcagtgatagtgaagatgaagccattgaagatgaggaggaaaaaaaggaatttaaacattctgaagatcacattattcggatgacagttcaagaatgtggcatgtctgatgctgtactgcaaacgctagctcgacacatggagcgggctgctgatgacataaaggccaggtatgaaattctgcatggtgagaaaactaaggattcttgcaagaaagggactgagcataatgtcaaagtggaagatttgtactgtgacaaagatttggatgcagcattggattcttttgacaatctcttctgtcgacgatgtctagtacgcttgactgtaactttcagatattcttttctaggacctgtgtgctgatggacatttctgctcattggtgatgctgataggtgtttgattgcaagctacatgggtgttctcaagatttagtatttcctacagaaaaacaaccagcttggagtggcgttgatgacagtgtaccctgtggtattcattgccataaactggcatctgaaccagatgctgctgctggtgctgatcacatgctttttgatgttgaggagccaactcactcatcagacaatgtgatgaaccagccaggttcaaataggaaaaagaacggctccagtggaaggaagactaaatctcaacaaagtgaaagctcttcaactgcaagagttatctcagaaagcagtgattcggaagtacatccaataagcaataaatctccacaacactcccctagtccctcaaaagttaaaattgggccgaaaggtggaatcagaaagattaccaatagacgaatcgctgagagaattcttatgagtgtgaagaaaggacaaagggaaatggcatcatctgattctaattttgttagtggatatcttttggcaagggacatgaagcttaggtctgatacacgaaatggaaataaggaattaattgtatcctcacaacagagttctccaagcacaagaagttccaaaaagaagagtacacctcaaattgggaacagctcagcttttgctgaggctcataatgattcaacagaggaagcaaataaccgtcattcagcaacagatggttacgatagttcaaggaaagaagaattcgtcaatgagaatttatgcaagcaggaggtgtacttgagatcatggaaggcaattgagcagggacttcttgtgaaaggattagagatttttggaaggaacagttgtttaattgctcggaaccttcttggtggaatgaagacgtgcaaagatgtttttcaatatatgaattatattgaaaacaacagtgcctctggagctcttagtggtgttgattctcttgttaaaggatatattaagggtactgagttgcgcacaagatcaagatattttagaaggcgaggtaaagtccgtcgtttgaagtacacctggaaatctgcaggttacaatttcaaaaggattaccgaaaggaaggatcagccttgtcgacaatataatccttgtggttgtcaatctacatgcggaaagcagtgtccatgtctttcaaatgggacatgttgtgagaaatactgtgggtgtccaaaaatttgcaagaatcgttttcgaggatgtcactgtgcaaagagccagtgtcgcagccgccaatgtccatgttttgcagctgacagggaatgcgatccggatgtttgcagaaactgttgggttgggtgtggtgatggtacattgggagttccaaaccagagaggagataattatgaatgccggaacatgaaactgcttcttaaacaacaacaaagggtcttacttggaagatcagatgtctctggctggggagcattcctcaagaatagtgttagcaaacatgaataccttggtgagtacactggggaactaatctcacacaaagaagcagataagcgtggaaagatatatgatcgtgagaactcatcgttccttttcaacctgaacaatgagtatgttcttgacgcatacagaatgggtgacaagctgaaatttgccaaccatgcccctgacccgaattgctatgccaaggttatcatggtaactggtgatcatagagtgggcatattcgccaaagaaagaatcctcgctggtgaagagttattctacgattaccgctatgagcctgacagagctcctgcttgggcccgtaagcctgaggcgtcgggagcaaaggatgatgggcaaccgttcaatgggcgtgcaaagaagctcgcccaaaacaaccgaggctgaatctgatttgattctttcattgttaggacaaatttggcagccattcaactaatacaaggaacctgtcattcataggccccaatttatttgaactcgtcattgtaactcgtatgtgcttgaattctcc

SEQ ID NO: 3567 - DNA, 3193 bp, Zea mays
  Clone ID: TF_ZmC12902_2
cgcgtgtgagggcgggagagcgcgcggggctagggtttccacgaggggtgatggaagcagaggctgccgcggcggtagtggcgtcgtccgcatctgcctcggcttccgcgggccggtctcgcccatctagcagcgccgcccaggtcaccagtaattcggctgtgcgagctggagaagaaaatgctgcctccctctatgttttatctgttattgactcgttaaaaaagaggattaccgcagatcgtttgacttacattaagaataggataggggagaacaagactaatatcagcagctatacacagaggacttacaatttatcaaaaaataggcaaattagtacatcaaagggtactgattcagcatcaaatttgctcacaaaaaggcaagatgatgcgctatgcaccctgcatagtcttgatattattccggttgacaaagatggtggtacttttcaagacgaaagtcctttctcttcatctaatgttatgtttggtggaaatcttggtcccaagaatgctattattagaccaattaaactaccagaagtgccaaagcttccaccttatacaacatggatatttttggacaggaaccaaaggatgacagaagaccaatctgtacttggtcgacggaggatttactatgataccagttgtggtgaagctctaatttgcagtgatagtgaagatgaagccattgaagatgaggaggaaaaaaaggaatttaaacattctgaagatcacattattcggatgacagttcaagaatgtggcatgtctgatgctgtactgcaaacgctagctcgacacatggagcgggctgctgatgacataaaggccaggtatgaaattctgcatggtgagaaaactaaggattcttgcaagaaagggactgagcataatgtcaaagtggaagatttgtactgtgacaaagatttggatgcagcattggattcttttgacaatctcttctgtcgacgatgtctagtgtttgattgcaagctacatgggtgttctcaagatttagtatttcctacagaaaaacaaccagcttggagtggcgttgatgacagtgtaccctgtggtattcattgccataaactggcatctgaaccagatgctgctgctggtgctgatcacatgctttttgatgttgaggagccaactcactcatcagacaatgtgatgaaccagccaggttcaaataggaaaaagaacggctccagtggaaggaagactaaatctcaacaaagtgaaagctcttcaactgcaagagttatctcagaaagcagtgattcggaagtacatccaataagcaataaatctccacaacactcccctagtccctcaaaagttaaaattgggccgaaaggtggaatcagaaagattaccaatagacgaatcgctgagagaattcttatgagtgtgaagaaaggacaaagggaaatggcatcatctgattctaattttgttagtggatatcttttggcaagggacatgaagcttaggtctgatacacgaaatggaaataaggaattaattgtatcctcacaacagagttctccaagcacaagaagttccaaaaagaagagtacacctcaaattgggaacagctcagcttttgctgaggctcataatgattcaacagaggaagcaaataaccgtcattcagcaacagatggttacgatagttcaaggaaagaagaattcgtcaatgagaatttatgcaagcaggaggtgtacttgagatcatggaaggcaattgagcagggacttcttgtgaaaggattagagatttttggaaggaacagttgtttaattgctcggaaccttcttggtggaatgaagacgtgcaaagatgtttttcaatatatgaattatattgaaaacaacagtgcctctggagctcttagtggtgttgattctcttgttaaaggatatattaagggtactgagttgcgcacaagatcaagatattttagaaggcgaggtaaagtccgtcgtttgaagtacacctggaaatctgcaggttacaatttcaaaaggattaccgaaaggaaggatcagccttgtcgacaatataatccttgtggttgtcaatctacatgcggaaagcagtgtccatgtctttcaaatgggacatgttgtgagaaatactgtgggtgtccaaaaatttgcaagaatcgttttcgaggatgtcactgtgcaaagagccagtgtcgcagccgccaatgtccatgttttgcagctgacagggaatgcgatccggatgtttgcagaaactgttgggttgggtgtggtgatggtacattgggagttccaaaccagagaggagataattatgaatgccggaacatgaaactgcttcttaaacaacaacaaagggtcttacttggaagatcagatgtctctggctggggagcattcctcaagaatagtgttagcaaacatgaataccttggtgagtacactggggaactaatctcacacaaagaagcagataagcgtggaaagatatatgatcgtgagaactcatcgttccttttcaacctgaacaatgagtatgttcttgacgcatacagaatgggtgacaagctgaaatttgccaaccatgcccctgacccgaattgctatgccaaggttatcatggtaactggtgatcatagagtgggcatattcgccaaagaaagaatcctcgctggtgaagagttattctacgattaccgctatgagcctgacagagctcctgcttgggcccgtaagcctgaggcgtcgggagcaaaggatgatgggcaaccgttcaatgggcgtgcaaagaagctcgcccaaaacaaccgaggctgaatctgatttgattctttcattgttaggacaaatttggcagccattcaactaatacaaggaacctgtcattcataggccccaatttatttgaactcgtcattgtaactcgtatgtgcttgaattctccatggcatctggtcctgccatccgtagagttaggtcccgtttgttttgaggaactaaaaattaatccctctattttagtcacattgagtctctagattgtcaaacggcgggactaaaacaaagactaaactatttgtctctagtacctcaagccatgactaaaagggaataaatcatataaattttatttttatccttcctttaaaaaaaaaaaaaaaaaa

SEQ ID NO: 3568 - DNA, 1273 bp, Zea mays
  unsure (1)..(1273): unsure at all n locations
  Clone ID: TF_ZmC3767_6
attgggacctcgagccggccggaaaaaaattcaaaaaaaaaaaaaaaaaaaaccttccgcctgcccaccgtgcccctgctcgcccttcccgtcgcggtgctcgtccgccctgccgcgccctgcccgccgcgtcgtgaggggatgtgtctagggttattgggagagcaccccttcctatggcgtccacgacaagcactagggcgtcgccatagacgcctcgcggatgccatacacccagttggcaaggcgtggactgtggcgttcggcctggagcaccgcttaagagacactgtacggacgccataacaattaacaagcatggctctagtgcaggtgcgatttactcgtgcagaagctccgacaactatttccgaattacccgggctggtttgtgatgacatctctggagggcaagaaaatattcctattcctgctactaacttggttgatgatccacctgttcctccatctggtttcaagtacttgaaatctctacaaattccaaaggacatcaagattccgtctagtattattaagacagcttcaaaaggatggggagtcaggacttgggacactatcctccctggggctcccatctgtgagtacacagggggtgttgaggaggaccgaagatttggatggttcacagaacaactattgttttgacattgactgtcttcaacccatgagggttttggatggaagggaganaagggctggatccgaaatgcacctgcctaatcttcatcctgagaatgattcagatgcacaccctgcacctgagtactgcatagacgctcactctattggcaactttgcaagatttataaatcacagctgccaacctaaccttttcgtccagtgcgtcttgagctcacacaatgatgttaaactggcgaaagtgatgcttttcgctgctgacaccatacttcctcttcaggagctatcctatgactacggttatcgattggacagtgttgttgggcctgatggaaaaattgtgaagctggcctgccactgtggtgctcctgattgccggaagcgcctctactaacctgcagtgtgtttctttctatttggattttggaggaaacagcttatattgtaggaaaagcagtcatggtacctatgtagttgacatgctctgataatatatagcaaaagaggagcaacttacttatgaggtgtttactttgaggaatgagctagtgtatcatcttctcactactcaatatttttgtttggtttatggaataaaatgatttgatccatc

SEQ ID NO: 3569 - DNA, 1628 bp, Zea mays
  Clone ID: TF_700203210_FLI
ctcgtctgttcagtcttcagagctgggttcggtctattcctcatcctctcttgttgatccggagtgccttaagttttggccgtcttgttactgtctgctgttccacagtcgacgaatcacgaatgctaatggaggaagaatgcgtagaggcaccgtcgtacatccacattgacagcaacgctttctcctacagaaagcataagagtcagacagaggaggacatagctgtgtgtgagtgccagtatgatatcttggatccagagagtccatgtggagaccggtgtttaaatttattgactaacacagaatgcacgcctggctattgccgttgtggtgtgtactgcaagaatcagcggttccaaaaatgtcaatatgccaggacaagacttgtaagaactggagggcgtggatggggccttgtggctgatgagaatattatggctggtcaatttgttatcgaatattgtggagaagtaatatcatggaaggaagccaaacggagagctcaagcttatgaaacccagtgtttaaaggatgcctatatcatttacctcaatgctgatgagtcaattgatgcaacaagaaaagggaaccttgcgagattcatcaaccattcatggaggccacgtacctgtgggaagatgatgatgacaggttttctgttgagaatatccctctttacgattctgctgatgacgaacctacaagcattaacaaggaaatcctcgtatcaagtgatggcatggttacccaatacagcaacatcagcagagtacagagtaccgaaaatcctggaaacactggaacaaatgaatttgcgccaattatcgtcgacgaactgacaacaagctcaaatggattagcaccaatgaacgttgaaccattgactgtaagctcaaatgagttcacgccatcgaacgccatgccaatggtagctcgtctagtcgagaatgggtcaactggatacagcgcacaggacactcacgacgcttctcagaattcagcgcccaaagctgcaaatcacgcgaaccaaactggacctcagaacaacagcaaccattcaacgttggtccctgtgaagcccgcgccgaaacgccgtggcaggaaaccgaaacgcgttgtgcacaagcagctggacatcccagatatctgcgaccggcttacatcgtctgtggcgtgcgaagaaatactgtactgtgaggaagtgaagaaccatgccgtttctgaaatcgatgccctgtacgatgagataaggcctgcggttgaagagcacgagagggacagccaagatagcgtctccacaagcctcgcggagaagtggatcgaggctagctgccgcaagtacaaggccgaattcgacctgtatgctgcagtactcaagaacgttgcctccactccactacggtcgaaggatgatgtgggcccaagagagcagaacgggttgaagtatctggagaacggctcatgatttcttttagctagaagcgtggaatattacgtacgccttcaatttgtagtatagggattgcattttttttaactgtggttggtcttgtatttaggtagaggcattgtaaggttacatgattttaaatagcgtggaatcatgtcaaacgcacatttgatct

SEQ ID NO: 3570 - DNA, 2720 bp, Zea mays
  unsure (1)..(2720): unsure at all n locations
  Clone ID: TF_ZmC3767_4
ggtgagctcctcgtctctcttgctgagctcgacgcggcggtccggtgctcgctgcgaagctggtggatggcgaatatggattcggttgttgtgatggaggtggcgccggtgccgatcccgacgttcatggacgccactcccctgaaccccccactgccgcttgtggtggaggagctcgtgctgcgccgcagtgctcgttacctcaacaggccaacccggcctaactacgcggaccaggagcctccaaaaaaccccggcggccggggccggggcaagcgaaagagggatgaggagaagccggagctggcggcgcagcagggtaccaagaccccaggcaggaatgactccaatgttgaggcgggtgagaggaagccgatgcccgtgactgcggcggtgccggcctgttgcgctggcgttgctgcggaagacgatgcgacgccgactgggaagagcgccaagctgagggtgaaggagacactgagggcgttcaacagccactacctccactttgtccaggaggagcagaaaagagctcaggctgcgatacaggagattgaggctaagggtggcctcaaacgtcagaccaaggggggtaaaaagaagagcagtaagcaagaggctgaagctgaggagaaagagaaacgcccatcaaagcgacctgacctgaaggcaatcaccaagatgcaagaaatgaatgccgtgctttatcaggagaagacgattgggcatctaccagggctcgatgtcggagatcagttttattctcgcgctgaaatggtagtgttgggcatccacagccattggctcaatggcattgactatatggggatgaaataccaaggaaagaaggagtatgccaacttaactttcccattggccacatgtattgtaatgtcggggatatatgaagatgatctagacaaggctgatgaaattatttatactggtcaaggaggaaatgatttacttggtaaccaccgccaaattggctctcaacagttgaaacgtgggaatttagcattgaagaatagcaggaagaatggtaatcctgtccgagttattcgaggtcatttatcaaagaatagctatactggaaaggtctacacctacgatgggctttacaaggttgtagatgactgggtgcagaacggtgtgcaaggccatgttgttttcaaatttaagttgaagcggcttgagggtcagccatcattgacaacttctgaggtgcgatttactcgtgcagaagctccgacaactatttctgaattacctggactggtttgtgacgatatctctggagggcaagaaaacattccgattcctgccactaacttggttgatgatccacctgttcctccatctggtttcacatacttgaagtctctaaaaattccaaaggacatcaagatcccatctagtattattggctgtgattgtgaaggagattgtgctagcaacaaaaattgttcatgtgctcagcgcaatggttctgatctgccttatgtatcatataagaacattggcaggttggtggagcccaaagcagttgtatttgaatgcggggctaactgcagctgcaaccatgattgtgtaaacagaacatctcaacagggtttgcagtatcacttagaggtatttaagacagcttcaaaaggttggggagtcaggacttgggacactatcctccctggggctcccatctgtgagtacacgggggtgttgaggaggactgaagatctggatggttcacagaacaactattgttttgacattgattgtcttcaaaccatgaaaggtttggatggaagggagaaaagagctggatctgaaatgcacctgcctaatctttatccagagaatgactcagatgcaccacctgcacctgagtactgcatagacggcagttccattggcaattttgcaagatttataaatcatagttgccaacctaaccttttcgtccagtgcgtcatgagctcacacaacgatgttaaactagcaaaagtgatgctttttgctgctgacacaatacttcctcttcaggagctatcctatgactacggttatcgcttggacagtgttgttgggcctgatggtaaaattgtgaagctgccatgccactgtggtgctccagattgccggaagcgcctctactagacctgcagtgtgtttccattttgattttgcaggaaacaacctatattgtaggaaagcattcatgttatttatgtagttggcatgctctgatatatagcgaaagaggagcaacttaatctccttttagagcattcttattttgtgataattggaggacatgctggtcatggtagcatattttgcaggaaatcaattaactgatatgtctgggcatggaacacttaaactatgtactgtcgtgtttttttaatcacattaattgaatcaagagcatgtcacagcggggccatcattgacaacctctgaggtatacttgaacaaatacaacaaactgagttgttgtattgatagtgcccaccgtcttcttatgatttggatgggtggacttcgcgtgaaaataatatgacacatctcatatttgctatcaattgtcaaaacatttctagttctagtcatggttggtatggcgctaaggtgacctacgagtgatctaggtcctttntatattttaaatgtctaagagtttgtttagaagcactcagttttttaaaaactggtttatg

SEQ ID NO: 3571 - DNA, 456 bp, Zea mays
  Clone ID: TF_jC-zmXLIB3526P036bd01b1
ttaacttttggaaaatcaaaaattcatggttttggggtctttgccaaggttgcccacaaggccggaaatttgatggttgaatacttaggggaaattgttaaaccaccgttttcaaacactaaaaagcggcaaatttacaactcattagtgggtgctgggacatatttgttcaggataaataataaacgtgttttaaatgccattcgggttgaaagtttagcccgtttgatcaataattaatgcaagcctaattgcttttaacgtgccataactatttttggaaataaacacataatcatttttgcaaaacgggacataaatccatgggaaaagctgacatataattataggtttttttcaagtgataaacaacttccatgtttttggggattccccaaatgccggggagtatttaatgattttaaggcaaagaaacatccggttaaaatacaagtt

SEQ ID NO: 3572 - DNA, 2976 bp, Zea mays
  unsure (1)..(2976): unsure at all n locations
  Clone ID: TF_ZmC7397_2
ggtatcctttagccgttagcctcttccttccgtctgccaccggcacgttctctgccctcgggtacctcgtctgttcagtcttcagagctgggttcggtctattcctcatcctctcttgttgatccggagtgccttaagttttggccgtcttgttactgtctgctgttccacagtcgacgaatcacgagagtgcttatggaggaagaatgcgtagaggcaccgtcgtacatccacattgacagcaacgctttctcctacagaaagtgagcagttctgcgttagttctttctcaatctgtccaatgtgggttgaactttgatgggactgggtcgcaacatttcctctcgttttctgttgttntgggaatgttatacttcctggctacctgtgttatcttttggaggccttagagtctgacagaggaggacatagctgtgtgtgagtgcccgcctgatttcttgggtcccgagagtccatgtggagaccggcggttggatttaaacccacccaatcccactcaatccacatggattgagagctaaccgaacaaggcctaaaaagaaatctgttaggtttagcttttggtttttgccccctaaaagccaaaagctaaaccaaaaagctggatctagaaagcagctttttttaaaagccgattttctcgcagtgtaaaactgaaagcacctctagacctgcttttagcggcttttggatggaactgtaaaaatatatgtggaatattttttagctttttagtggttttcactaaacggttttagctttttagcacttcactgtccacatcagcttttttcacagatcacaacccacaacagcttttttcactgccacagcccaaccaaagagaccctaagtcttgcatgttgcttattctttacgttacagtttaatagcaattatgctgacacttaatctcttttgatagcggttccaaaaatgtcaatatgccaggacaagacttgtaagaactggagggcgtggatggggccttgtggctgatgagaatattatggctggtcaatttgttatcgaatattgtggagaagtaatatcatggaaggaagccaaacggagagctcaagcttatgaaaccccgtccgccagtgtctgcagatattctctcgcttctcatatttgaattgtggcaaactggcacttttttagctagctataacatctagcttctgtaactgcaggtttaaaggatgcctatatcatttacctcaatgctgatgagtcaattgatgcaacaagaaaagggaaccttgcgagattcatcaaccattcatggtaagtttgtattaaaggcacagcatacttgaatttcatcttgcttcttatgtgtgtgatttgatcattgattttttctgtcattgacttgtaagtaattaagtctaatagttcactattgaagcatacagccaaccgaattgtgagacaaggaaatggaatgtccttggggaagtaagagttggaatttttgctaagcaaaacattccttttggcacggaattatcctatgactacaattttgagtggtatggtggtgtgatggtgcggtgcctctgtggagccgccagctgttctgggtttcttggggctaaatcacgtggtttccaggtgggcgaacaaatttatgttgtgcatgtgacttcctatttcatgcttgacacttgacagtagtgttcgacagaaggaatcaccgctaccttttagttgttatatgtcaatcctctttgtcagacattggaatgactgattgcactctggttttctgcatttgcttatttgctgacataacgttttgagccttcatgctatctacttattgcttggaagattgacattctgcatcattatctggtcatttttgcatttccttgtaagttgatatttgatatgttcattatgttcctaatgtagctttattgattggtatgttgcaggaggccacgtacctgtgggaagatgatgatgacaggttttctgttgagaatatccctctttacgattctgctgatgacgaacctacaagcattaacaaggaaatcctcgtatcaagtgatggcatggttacccaatacagcaacatcagcagagtacagagtaccgaaaatcctggaaacactggaacaaatgaatttgcgccaattatcgtcgacgaactgacaacaagctcaaatggattagcaccaatgaacgttgaaccattgactgtaagctcaaatgagttcacgccatcgaacgccatgccaatggtagctcgtctagtcgagaatgggtcaactggatacagcgcacaggacactcacgacgcttctcagaattcagcgcccaaagctgcaaatcacgcgaaccaaactggacctcagaacaacagcaaccattcaacgttggtccctgtgaagcccgcgccgaaacgccgtggcaggaaaccgaaacgcgttgtgcacaagcagctggacatcccagatatctgcgaccggcttacatcgtctgtggcgtgcgaagaaatactgtactgtgaggaagtgaagaaccatgccgtttctgaaatcgatgccctgtacgatgagataaggcctgcggttgaagagcacgagagggacagccaagatagcgtctccacaagcctcgcggagaagtggatcgaggctagctgccgcaagtacaaggccgaattcgacctgtatgctgcagtactcaagaacgttgcctccactccactacggtcgaaggatgatgtgggcccaagagagcagaacgggttgaagtatctggagaacggctcatgatttcttttagctagaagcgtggaatattacgtacgccttcaatttgtagtatagggattgcattttttttaactgtggttggtcttgtatttaggtagaggcattgtaaggttacatgattttaaatagcgtggaatcatgtcaaacgcacatttgatct

SEQ ID NO: 3573 - DNA, 3269 bp, Zea mays
  Clone ID: TF_ZmC13490_1
ggcatctgtaccgccactgccaccacgtgctgcatgggtgttttgtgatgattgccaaaagtggcggtgcatacctgctgaacttgcagatgtgattggagaaacaaattgcagatggacttgtaaggacaatggagacaagacgttcgctgactgttctattccacaagagaaatcaaacgctgagattaatgcagaactcgatctttcagatgcttcagctgatgaagcagacaatggtggatctaactccaaagcttgcaaaccaccgtcatggactcttgttaggtcaaacttgtttctgcatcgaaaccgcaggacacaatccattgatgagagcatggtgtgcaactgcaagccaccccaagatggccgaatgggttgtagagatggatgtttgaacaggatgctcaacattgaatgtgtcaagcggacatgtccatgtggagaacaatgctctaatcagaagttccagcggcgtagctatgcaaaactgagatggttccattctggcaagaaaggctatggattgcagttgcaagaagacgttactgaaggaagatttcttattgaatatgttggagaggtccttgacataacatcctatgaatcccgccaaagatattatgcttgcaaaggccagaaacatttctatttcatggctctaaatggtggtgaggtaattgatgcttgcactaagggaaacttgggccgattcatcaatcatagctgcagccctaactgttgcacagagaagtggatggtcaatggggaagtctgcattggaatatttgctttgaggagcatcaagaagggtgaagaattgacatttgattacaattatgttcgtgtatctggtgctgctcctcaaaaatgcttctgtggtactgccaaatgtcggggttacctgggtggagacatatcaattgtcgataccatcatcacccaagatgatacagaagcagatcattttgaacaaatggttgttgacaaagactccaaggagttgctgggtccaaatgagtctgattctgatggtagccacccaaatatttcagaacctgaattttctatccaaggggaagatttacatgattgctcagctgcaaaagtagaattagatctgcttgaaggaactagaggaacctcattagaaactagtgagcctgaacatcccttggaagcatggagcccaccagaagatgaagatgtcattcgtacgcctgtgcatgtgtcacggacatttgaaagttctctgcagaagttctcagtacatgacactcagtcatcagatcttttgcgtaagactgcaaattcaatggaaggatcaaaggctccaaatataacaaacggatcgacacttggttctgatttcaggggcaatctggtgcctactttcagacctgctgagagaaaaaaacttaaaacaacataaaaatcagaaacgacaaccgtcttctccaattgacaatgaacatattttgggagttgaagggacactgaacagcctactggatgtggacggtggtatcagcaagcgaaaggatgctacaaagggatacttgaagctgctcgttgtgactgcagcagaagatggtagtgctgggggcacatccaaaagtctgagggatctttcgttgattcttgaggcacttctaaaaacaaaatcacattcggttctgttggatatcatcaataagaacggactgcaaatgcttcataatatattgaagcagagtagaggcatcttccaccggagacctattatacggaagcttctgaaggtacttgaatttctagctcagaaaggaattttgacatctgaacatataaatggaggtcctcggtttgctggagtcgaaagcttcagagacttgatgctgagtttaacaagacattcagacattcaggttcaacagattgctcggagcttccgtgatagatggatcccccctaataatgcaaggagtgaaccaacagaatatccacatacatcaacatttgtgcatgatatccagggaaccaatacagtctggagttctgctaggaggaaacgcaagagccgctgggactatcaacctgacgagcattataagatgccgggactaaaaatccaaaaagtttgttctggacatggtgaatttgatgttcagtttggctttatgaaaaataagttaaagaggaatcagggcgcaaacaactatcataatgatgttcttggcatggggagttcaacagagggtgaagatgatgaagcccctcctcctgggtttgagtcccagctggaccgtcggcctgcacaactttcaataggcagcgaggttgctccaggactttgcatggagaggtaccaatctagcttgagtatttcatatggggttcctgtaactcttgttcagcactttggaacccctgaatctgaaggaggccaatgccataaaaaatggaaagttgcacctggcgtgccttttagtccttttccaccattgcctccctatccgcgagggaatccttgcccctccacttcgtcttcccagatgtttcagcatgatggaacaccccaagttaaacataacaattctggacaacggggaaggatcatgggccgagatgggagagtgcataggtcatggagaaatgagtcaagaacaaaatggcaataccatcatcaaggaaggagattttcgagcactcatcatagatttgaaagatccgaacctgcaagacctcaatagtgattaagggttcagggcagtgattggtaccaaccttgcagtttttgaacctcaagtagtggtggtatacatggtaattcctgcttgtcagaagtgtaacagaaactgtgtcaggctttaacgatgtttaaagagtgtaaatttcagttcattgggggtagagcgtatgctgcacataggccattttccagtgcagtgttactaattaatttggtcattgtttttctctctcccaatgagtatttttcataggaacattttttatttgatttaatcctttttacaggtgataaggataaccaagtttagcgacaatcctctgtagtctcgtttggttctttgccttttttccccttttgctttctcagtaaagcttcaaaaaaaaaaaaataaaaaaaaatccatctgcaatggtgaagtgttgttactgttgtctactattactatccatgagatctgtttggaatatgcatcggacttgtggtgaacatgaatgactttggtcattctgagataatattagctacttacaca

SEQ ID NO: 3574 - DNA, 446 bp, Zea mays
  Clone ID: TF_LIB3075-013-Q1-K1-F1
tgctgttctggttgttttggggattgtttagcggagccacttccttgcgcttgtgcgagagaaactggcggagactttgcttatacgagagatggcctgcttaaagaaggatttctagatgcgtgtgtctcaatgctccgggaaccacttaaacaaccgcacttctactgtaagggtgtctgtcctattgagcaaataatgaagggagtcagctcagcgaaacctgatgcttgtaaagggcaccttattaagaagtttatcaaggaatgctggataaaatgcggctgcaccagaaattgtggaaaccgtgtggttcagcgaggcattactcgcaaactgcaagtgtttttagcttctcggaaaaagggatggggcttgcgttctgctgaaaatcttcctcgtggtgcttttgtatgcgagtatgttggtgaaatattaacaaacac

SEQ ID NO: 3575 - DNA, 2688 bp, Zea mays
  unsure (1)..(2688): unsure at all n locations
  Clone ID: TF_ZmC3752_1
ctggccgggattcccttcctgcttcgacgattctatgtttatcacgcccaacaaagtagtgtagtttttcgacgccggcggatccctcgagccctagctaggaaagtagggttttcgatggattctctgagccggagggagcgggcacaccgcgccgtcgacgccatgaagcctctgggcttctcgaagaaggaggtcttcgccgtcctcaagaacctcctccagctgttcgataactcctgggagcccattgaggacgagtgctaccgcgccctcgccgatgctatcctcgaagcccgcgaccggccccagatgcattgcagcaacagtacaagaggggttcggcttccgccggagggggagggctgccggccccggccttctacttcccgtgacatccacgacggtctggatggtgggaccgaggcccttcgcatcaagaggacgaggatcagcgctagttgctctatcgatccccagtctcccgtctccgctgcggaagcccttgatgaacctataggcgtttcgtctgagctaagccatccacaaatggggacctcaacccaatgtcagcggcccactgcatatggtggcgtgccttcacatgggaatactgcacacaagaagagggcaatacaaatgatggatgaagatttccaacataccgtcttcttgagggagcctaaacctgaacctgatactgatgatctacaatgcagtgcccctgcatccagctgtcagaatgcccaacttggccgcattgcttcccacccgctcaatgccagcaccttagatgctctacctgttcaggctccgttaaagatttcaggagctaatggcaggacagtccagcattatagaagtacagcgccttcttcctttgttgaacctataaatagcaagacgaagcaacctcaaagtctggaaaatgggttggaccatgcaactatgatgcacaatgctgggacaggatctgcagctggaaaaacacaggaagcaccttgtttacacactcttgtagcttcatccactatgggtgaggtcgagatgtcgatcaaatgctgcatagacccatcaaaattccacatgcctgatnttagaagctgttttcaagatggttgaggaaaaatgccttcgctcacacaagagcctcccacctgatttttccatagccggtctcatcaagcagatatgccagtgtgtcgcacgactaggcagtgatcatgctgcagaacataataaacaatcagatgcttttggcaagatcagaagctcacaggataagccaacaacgagtagtgctccatccttggaaccaattgattgcatgaacagcagaagcgnggaatataaagctgtagaagaatcattgattgtggaagcttcatgagaatggcccaccaaattcaactacccatcagcaggcccatctggtacttcctcccaatgggtgtacccatgatttatctgacatatcaaagggaaaatgaaaggttaagtatatcagcagttaacgaatttggtagcgagaattgtttaccttccttttattatataccaagaaatcttgtttcccaggactcctatgttaactctgttgaaacaattggcgacaaggactgttgttctgattgctctggcaactgcttgtatgcctctgaaccatgtgcctgtgcaagaaaaactggtggtgaatttgcctatacacgagacggattggttaggacaaagttccttgatgagtgcatctctatgaccccgcgtccggaaaaacataatatgttcttctgtaaatcttgcccacttgagagtatcaggaacgagccttcaccagagctttgcaggggccatattattaggaattttatcaaggaatgcgggagtaaatgtggctgtaacgcgcaatgtggtaaccgtgtagttcaacgtggtataacttgcaatctgcaggtgttttcgacacgggaagggaaggggtgggggctacgcacacttgatgaacttccaaaaggagcttttgtctgtgaatatgttggagagttgctaacaaatacgaagctacatgaaatgactactcaaaacatgcacaatgctaggtactcagtgctcttagatgctggttggggtcctgatggggtgctgaaggatgaagaagctttattcctggatgcgacattttgtgggaatgttgggagattcatcaaccacagatgctatgatgcaaatttagttgagatccccgttgaaaaggagacgccagatcatcactattatcattttgcatttttcacaaccaagaaggtggaagcatttgaggagctcacatgggattatggtattgattttgatggtgataagcatcctgtcaaatcatttgaatgcctgtgcggaagcagatactgccgtggtagaaagcattcgaggacgcgaggcaaagctgcttcgaagtgaagtgttgactgaaagcagcggtgcatggttggtttgggaaagcgaacggactaatcagttttagaatgctttgttaacctaggtagctatgcattcataaagtgcccgctgtgcttgactgcagaacgtgaaattcaattagacagactgaaatgcaatgtacgtacgctactcctaaaccctaagccatctggccatgatctactgatgatgaggtgaatttgattaaactaaaat

SEQ ID NO: 3576 - DNA, 2093 bp, Zea mays
  Clone ID: TF_ZmC7397_1
ccggccgggagaccgctctctccgcggacgcaccaggcatctcgtgtatcgtcctcggatccccgcggtcatccccatctcagccgccgttgtccgccttcccctcgacaacaagcctgccgccccgagctgcctccctccgtccgttcggtatcctttagccagttagcctcttccttccgtctgccaccggcacgttctctgccctcgggtacctcgtctgttcagtcttcagagctgggttcggtctattcctcatcctctcttgttgatccggagtgccttaagttttggccgtcttgttactgtctgctgttccacagtcgacgaatcacgaatgctaatggaggaagaatgcgtagaggcaccgtcgtacatccacattgacagcaacgctttctcctacagaaagcataagagtcagacagaggaggacatagctgtgtgtgagtgccagtatgatatcttggatccagagagtccatgtggagaccggtgtttaaatttattgactaacacagaatgcacgcctggctattgccgttgtggtgtgtactgcaagaatcagcggttccaaaaatgtcaatatgccaggacaagacttgtaagaactggagggcgtggatggggccttgtggctgatgagaatattatggctggtcaatttgttatcgaatattgtggagaagtaatatcatggaaggaagccaaacggagagctcaagcttatgaaacccagtgtttaaaggatgcctatatcatttacctcaatgctgatgagtcaattgatgcaacaagaaaagggaaccttgcgagattcatcaaccattcatgccaaccgaattgtgagacaaggaaatggaatgtccttggggaagtaagagttggaatttttgctaagcaaaacattccttttggcacggaattatcctatgactacaattttgagtggtatggtggtgtgatggtgcggtgcctctgtggagccgccagctgttctgggtttcttggggctaaatcacgtggtttccaggaggccacgtacctgtgggaagatgatgatgacaggttttctgttgagaatatccctctttacgattctgctgatgacgaacctacaagcattaacaaggaaatcctcgtatcaagtgatggcatggttacccaatacagcaacatcagcagagtacagagtaccgaaaatcctggaaacactggaacaaatgaatttgcgccaattatcgtcgacgaactgacaagctcaaatggattagcaccaatgaacgttgaaccattgactgtaagctcaaatgagttcacgccatcgaacgccatgccaatggtagctcgtctagtcgagaatgggtcaactggatacagcgcacaggacactcacgacgcttctcagaattcagcgcccaaagctgcaaatcacgcgaaccaaactggacctcagaacaacagcaaccattcagcgttggtccctgtgaagcccgcgccgaaacgccgtggcaggaaaccgaaacgcgttgtgcacaagcagctggacatcccagatatctgcgaccggcttacatcgtctgtggcgtgcgaagaaatactgtactgtgaggaagtgaagaaccatgccgtttctgaaatcgatgccctgtacgacgagataaggcctgcggttgaagagcacgagagggacagccaagatagcgtctccacaagcctcgcggagaagtggatcgaggctagctgccgcaagtacaaggccgaattcgacctgtatgctgcagtactcaagaacgttgcctccactccactacggtcgaaagatgatgtgggcccaagagagcagaacgggttgaagtacctggagaacggctcatgattttttttagctagaagcgtggaatattacgtacgccttcaatttgtagtatagggattgcatttttttttaactgtggttggtcttgtatttaggtagaggcattgtaaggttacatgattttaaatagcgtggaatcatgtcaaacgcacatttaaaaaaaaaaaaaaaaaaaaaaaaaacttggaaccatgcatgaatggttgataaatat

SEQ ID NO: 3577 - DNA, 755 bp, Zea mays
  Clone ID: TF_ZmC113_2
tggttattgagtatcgtggtgaacaagttagacaacgtgttgctgatttgagggaagcacggtaccatagagaaaaaaaggattgctatttgttcaagataagtgaagatgttgtcatcgatgctactggcaaaggaaacatagcgcgcctgattaatcactcgtgtatgccaagctgctatgctaggatcgtgaccgtcagtggtgacaggagccagatcattcttattgcgaagagagacgtctctgccggagaagagctgacgtataactacctgtttgaccctgacgagtccgaagactgcaaggttccatgcctgtgcaaagctcctaactgtcgtggatacatgaactagggtgctgctagaagagtaaaaaccaatctaacaaacaaggactgaggctaactccttacagaagccaaaagccggccattttttttttcctggaattctttcggtagtttctcgttttcttatattactcaccagaagcttacaattcgtgggctgcacaaggtttggaccattttgttcagaaattgcgatttagggcagccgtaggcagtcatccatttgtatattcttccattgctgtgataagatggtaagaatgctcaaaatttttttttggttaaatgaaaataagaaaaactcagtttgattcaaaaaaaaaaaaaaaaaaaaaaaaaaaaaaaaaattaaaaaaaaaaaaaaaaataaaaagagaaaatggtaaaaaaaatataagagaaa

SEQ ID NO: 3578 - DNA, 1447 bp, Zea mays
  unsure (1)..(1447): unsure at all n locations
  Clone ID: TF_ZmC2742_1
acccacgcgnncgaagacgaggatccttgtattcgtttactctcgtactgcaaaaagcatagacagccttctgctgctgaacgtccatctttagaaagtgatcctcctgaacccattcaggtagttcagacagatatggcttcatcatctggttgtgcaaggaccgaaccctataatttacacaggagaaggggccaaaagcagccacaagttgtcgctactgcttctctgaaacgtttatatgtggagaatagacctcatattgtcagtggctactgccaaaacagagtaggcaatacatgcggagaatcaattcaaccgtttggtttgtcagatgctgtgcagcaagaagctattggcaatgtgtcttctatggttgaaaaatatacaatcgtgaaggctacatttaggaagagactaacttttggaaaatcaaaaattcatggatatggtgtctttgccaaggttgcacacaaggccggagatatgatggttgaatacataggggagattgttagaccaccgatatcagacactagagagcggcgaatttacaactcactagtgggtgctgggacatatatgttcaggatagatgatgaacgtgttatagatgccactcgggttggaagtatagcccgtctgatcaatcactcatgcgagcctaattgctattcacgtgccataactattcttggagatgaacacatcatcatttttgcgaaacgggacatagatccatgggaagagctgacatatgattataggtcagaaggttaagattttgctttttgaccttttgaacatcatagttttgtacaaaatgttgtccatgctttcttcaggtttttttcaagtgatcaacgacttccatgtttttgtggattccccaaatgccgtggagtagttaatgatgttgaggcagaggaacagtcggctaaaatcagagttaagagaagtgaattatttgaaaaaagtgaaaagtaaaggtacatcatattggttgggatatgacatgcttgtgtgatatgcttgccagtgcctaaaggcaaattctaaaaaatggttgagtttcattcttgaatcctgataattcttctcattatttgagtggaagacgaatctaattgtataggtacccaatataggatcggcaatccaatttggggacataagttgaatcaattgtcgtgtaccattgaaatgttagttgttacacatatttcggccatttatcttgttgaacctaccctattttcaaccgttggagctgggaatcggaggggtggtttggttaaatgatttgagatggcctgccatgtgtaatgtaatcgaagtacatggttgcacttttcggtgttgcccatatattatccataacaatatgtagtttcagctgttctgcatttacgaaaatgcattggaagagaaacgtccacttcaactg

SEQ ID NO: 3579 - DNA, 3042 bp, Zea mays
  Clone ID: TF_ZmC12356_1
gccggccgggccgggagacaagtcccttccgtccctccccacgccgccgagggccgccgaccaggaggagatcacgcgctcatctctcatggagtccgtctagcttccgctcgtctgcgcccactccaagcagccgcagcggaactcaactactgcaggttgagatgaacggtccatcgaatttcatgcctactcctgaacaggatgttctggacgtcaagcccttgaggacattggctccaatgttccctgcttctctgggtgtcaatacatttaaccactcaaccacgccaccattgatatttgtcactccttctggacaatttcaagggggttttggtgattggaataattctgctgccaaatcatttttcgctttcagcagcaaggatgctcgtggaggcaaggctgatacatttagtgatcagaatactggtactggcaaggctgccacttttggtgatcaggatgcttttggcagccagaatgtttttgctagtgatcacagtactggtactggcaaggctgccacttttggtgatcaggatgcttttggcagccagaatgtcgccactggtgtgcaggatgctgcgaaaggccagactgcaacagattggacagatgtgagtgccaatgccaatcctaatggcccaattgatgccattgccatttcagcttacaggtcaacacagcctaatgttatatcactggatgatgatgacgacgacgatgatgagccttatgctgctaacaagacatcagcatctggacgcaagatcaagaggccatcccacctcagcggatacaatgtgagtgatgctttggtaagtgacagctccaacagcatgaaggttaagcgccccaaatcctctcacgggaaagctgctgctgacaacgagcatgccttgcttcctccttctgaggatcccagggaaattgtggaggcagttctcatgacctttgaggcgttgcggcgtaggcatctccaattggatgaggcacaagagactaacaaacgtgcagatctgaaggctagtgctatcttgatgtccagtaatatcagggctaaccctgggaagaggataggggttgttcctggagttgaaataggagacattttctacttcaggatggagctatgtattattgggctgcatgctcctagcatggccggaattgactatatgactgccaagtttggtgacgaggatgattctgttgcaatatgtattgttgctgcaggtggttatgacaataatgatgatgatacagatgtactggtttacagtggttcaggaggtaatagcaagaacagtgaggagaagcatgaccagaagcttgagaggggcaacctggctcttgagaggagcttgtccagaaaaaatgtaatccgtgtggttcggggctataaggatccaggttgcttgactgggaaggtttatatttatgatggcctctataggattcacgagtcatggaaggagaaaacgaagagtggaatattttgttttaagtacaagctgctgcgagagccaggacaacctgatggggttgcaatctggaagatgtcccagaaatgggtacaaaatccactgactagaggcagtgttttaaatcctgatctatcatctggtgcagaaaatcttccagtgtgtcttgttaatgacattgacagtgatgaagtgccacaccatttcacatataccactcaggtcgaacacttgaaaccactcagttctgtgaagcctttacagggttgcagatgccttagtgtttgtctgcctggtgatgccaactgctgctgtgcacagcgtaatggaggcagcttaccttacagctcatcaggactgcttgtatgccgcaagactatggtttatgaatgtggtgaatcctgtcggtgttctttcaattgtcgtaacagagtgacccagaaaggagttaggatccactttgaggtctttaagacgggaaatcgaggctggggtcttcgttcgtgggacgctatacgggctggttcatttatatgcgagtatgttggtgaggttattgatgatgctaacattaatctgaatgatattgaagatgattatatatttcagatgtcgtgtcctggtgagaggacattaaaatggaattttggacctgaattgataggggagcaaagcacaaatgtttctgctgatagctttgagactctacccattaagataagtgctaaaagaataggaaacatatcacgtttcatgaaccatagttgtgctcctaacgtattttggcagccagttcagtttgaccatgaagatgatcatcgcccacatatcatgttctttgctttgaagcatattcctcccatgacagagttgacttatgactatggtgacgttggagctgatcctagtggtgtacggtctcctagagcaaagaactgcctttgtgaatcctcaaattgtcggggattctttatctgaccgtggaaaatgcatattctatgattctatctatcaacattcaaccctaccagctagatcctttttggtggcacctgaaggaaaagtaggactgttcgaacagcttgcatcactctgtcgtggacattttacgcagatcttttagatgaccattcagcaattaatgcacaaacgttttttttgtgggggaagaatgttggtcttggaagatcaattttgtgtagtttgtagacttgtagagcatttagtgctgctaaacttgtgcaccttaagtcttttggctgtaaaagagcctccaggctccagctgaattggttagtcagtctaagtagcatttctttgatcctgaatttgactccacgtggagtcaatttcaagctggagttaaaaaaacattcttatgttctatactaaagtacagttctaaggctcaaccatgatcatagtcgttctcacaaaaaaaaaaaaaaaaaaaaaaaaaaaaaaaaaaaaaaaaaaaaaaaaaaaaaaaaaaaaaaaggaaaaaaaaaaaaaaaaaaaaaaaaaaaaggtcctctgcgttgttaccactgtt

SEQ ID NO: 3580 - DNA, 764 bp, Zea mays
  Clone ID: TF_ZmC2742_3
ctaacttttggaaaatcaaaaattcatggatatggtgtctttgccaaggttgcacacaaggccggagatatgatggttgaatacataggggagattgttagaccaccgatatcagacactagagagcggcgaatttacaactcactagtgggtgctgggacatatatgttcaggatagatgatgaacgtgttatagatgccactcgggttggaagtatagcccgtctgatcaatcactcatgcgagcctaattgctattcacgtgccataactattcttggagatgaacacatcatcatttttgcgaaacgggacatagatccatgggaagagctgacatatgattataggtttttttcaagtgatcaacgacttccatgtttttgtggattccccaaatgccgtggagtagttaatgatgttgaggcagaggaacagtcggctaaaatcagagttaagagaagtgaattatttgaaaaaagtgaaaagtaaaggtacatcatattggttgggatatgacatgcttgtgtgatatgcttgccagtgcctaaaggcaaattctaaaaaatggttgagtttcattcttgaatcctgataattcttctcattatttgagtggaagacgaatctaattgtataggtacccaatataggatcggcaatccaatttggggacataagttgaatcaattgtcgtgtaccattgaaatgttagttgttacacatatttcggccatttatcttgttgaacctaccctattttc

SEQ ID NO: 3581 - DNA, 2577 bp, Zea mays
  Clone ID: TF_ZmC3477_1
ctctgtagtgacgacgactgggcggcggccgctgccgccgacctacgtgcgcaggtctccatcttccggaccttcgctggagaggaacatcctcctgctaccagaggcagggttctactagctgatctgtcatctaaggctgaaactattccagtttctcttgtcaatgaggttgaccatgagaaaggacctgcacatttcacctatactaaccaggtcaaatacgtgaggcctctcagttctatgaaataggttcagggctgtcggttccagagttttcgccttcggggtgatgcaagtagcgctcctgcactacgttagggaggtaatttccccgccagttcaaacggagtattgtattccggcaaacgtattattggtgaatgtgatgccactcgtatctctgcatacaagacaaggtcaagcatatcacttaaagatggtgatgatgatccttactcgggtaaccaaagtttggcatctgaacggaagcctaggagaggccgtcctcccggttctggtcgtgatggctcaaatggtaagttaaagcgccctaagcccacttacaagaattttgttgctggcaaagagcttgtctttctgtcatctacatccgatcccagggatattgtggaatcagttcacatgacttttgaggccctcaggcgaagacatctgcagatggatgaaacacaggatgctagcagacgtgcagacctgaaggctggtgccatcatgatggccagtaacatcagggcgaattcaggcaagagggtaggaactgtacctggagttgaaataggagatattttctattttaggatggagctgtgtgtcattgggttgcatgcacctagtatgggaggcattgattacatgactactaaatttggaaaagatgaggattctgtagccatatgtattgtctctgcaggaggttatgagaatgaggatgatgacacagatgtgctcgtgtacagtggtcaaggtggaaataataggaatactgaggagaggcatgaccagaagcttgagaggggtaacctagctcttgagaggagtttgcataggaagaatgagataagggttgtacgtggcttcaaggatccattttgcctaactgggaaaatttacatatatgatggtctcaagattcatgagtcctggaaggagagaacaaagtacggtgtcaatgtcttgcttcaagtgctgctgcgggaacctggacagcgtgatggagctgcattatggaagatggttactcggcgatgggataatcctgctaccagaggcagggtcctactagctgatctgtcatctaaggctgaaattttgcctgtttgtctcgtcaatgaggtagaccatgagaaaggacctgtacatttcacttatactaatcaggtcaaatacttgaggcctctcagttctatgaaaaagttgcagggctgtggatgccagagcgtttgcttgcctggcgacgccagttgtgcttgtggacaacataatggaggcgatttacccttcagttcatcaggattgttgtcatgccgcaaaccaatagtctacgaatgtggtgaatcttgcaactgttctacaaattgcaggaacagagtgacccaaaaagggtccaggctacatttcgaggtcttcaggaccacaaatcgaggctggggtcttcgctgctgggaacctattcgtgctggttcatttatatgtgagtatgctggtgaggtcattgatgagctcaaatttaatttgaatgatagtgaagatgattacatttttcaaactgtatgccctggcgagaagactttaaaatggaattatggacctgaactgataggtgaagtaagcacatatgtatcgcctgatgaatttgaaccactgcctgtcaagataagtgcaaaaaacatgggaaatgtctcccgtttcatgaaccacagttgctcacccaatgtcttttggcaaccagttcaatatgatcatggagatgatggacacccgcatataatgttctttgcactgaagcatattccacccatgacagaactgacttatgactatggtgttgctggagctgaatctagtggttcaggttctcgtagaacgaagaactgcgtgtgtggatcacaaaactgcaggggattattttgatgggttgagagacgtgctctttgtggttaatcatgcaaaccactttctgctagatcctttctatgaaaccaaatttagtctccggataatatgacagatgatgtcatttgccatgtgtactgtgaagacagtaagttgtcgagcgagctgtagaatttctgttgctctgaactgcatggtggtcgctttcccaccatttcctcggatgtttatgtgggcgtggattgctgcattgcttccgctaaacttgtccaccaattgcaccggcttttgtagacttgttatcagccccgcttgcgttggacgcctggttgttaggatatggtcttgtaaattatcctggttaaggatcatgttgctttcgactcgaattttcgtcctcccttgcccttatgttcagcaatgttcaggtgttgagagctc

SEQ ID NO: 3582 - DNA, 1295 bp, Zea mays
  unsure (1)..(1295): unsure at all n locations
  Clone ID: TF_ZmC12905_1
attcanggttcaaaggccaaaatagaagtgaaatggtcattctaaaggcaagcaaacttcaatatttatatatgatggattgtacgaagtgttggaatgttggcaagaaggcccaaaaggcgagagggtcttcaagtacaagttacagaggatcgcagggcaacctgaattagccctacatgcagttaaggcaacgaggaagtccaaagttcgtgaaggtctttgtttgcctgatatatctcaaggaagggagcggatacccatatgtgtcatcaacacaattgatgacatgaagccagcaccatttaaatacattaccgaagtcatatatccagattggtatgaaaaagaaccaccaaaaggttgcaactgtacaaacggctgctcggactctattacatgtgcttgtgcagtgaaaaatggaggggaaatcatgttcaatttcaacggtgcgatcgtcgaggccaggcctctcatatatgagtgtggtccatcatgcaggtgcccgccaacatgccacaacagggtgagtcagcatggtgtcaaaattccactagaaatattcaagacaggcaagacaggttggggtgtaagatccctcagttctatatcatcaggcagtttcatatgtgagtataccggtgagctattggaagatgaagaagctgaaaagagagagaatgatgagtatctatttgatattggtcataactaccatgataaagaactttgggaggggctgaagtcagtggttggcctaggatctgctacttcgtcttctgagaccatggaaggcttcacaatagatgcatctgagtgtggcaatgtgggaagatttatcaaccatagttgttcaccaaacctctatgcccaaaatgttctctgggaccatgatgatatgaggatgccacatgttatgttttttgctgttgagaatatcccgccactacaggagctgacctaccactataactataagataggggaggtctacataaatggcgaggagaaggttaaacattgctactgtggcgcctcggattgctgtggaaggctctactgaagcattattgactgctgttagctctatgttttgaacacctctgtcctgtctctgcggtacccttcttttctcagttcgccttgtcttgtcggcgttctgatgtttacagcaagctgcatttgatcttgctgttttcatttagaaaaaaaaaaacattctgcttcgctctactgtgttttgaattgtgaatgaattttgaatggaaccccgttgtaccatgtgttcatgtggc

SEQ ID NO: 3583 - DNA, 462 bp, Zea mays
  Clone ID: TF_uC-zmromo17102d10a1
tttttgatacagaagtatattaaagaatatggacatgtcaatgcctgctaacgtgcatgatcaagctaaacatggtacaaaaaaatttatttaaagaatgaactggccgtagtgaatacaactgtggtattaacaggaatggaagctcgacttttgagctctaactaaacttattctaaaatgaatgtaaacaaaaaatagggaaggatcaatatataccaaaaacgggggtaaataagaaagaaagactgtcagtgatcctctaacatctaagtaaactaattcatgaatttccggcagttagcagtctggcaaaggcatggcacttcgcgttcatcaccctcatctggatcaaacaggtagtcatacgttagctcatcaccagcacaaacatttttcttggctattagaacaatacgactttcatcatgttcaacactcataatcctcggatagcagttt

SEQ ID NO: 3584 - DNA, 2149 bp, Zea mays
  unsure (1)..(2149): unsure at all n locations
  Clone ID: TF_ZmC3531_1
ccccgcgtccggtcaagaaaaaaaagggcaggaacatttccagtgagaccagtcagaaggtaaaaccggtgatctcatgcccagaatcagatggttgtgctagagcttccattaatggatgggagtggcgcaattgggcacggaatgctactccgtcggaaagggctcgtgtgagagggtaccatgttcggactattctttctgcctcaaatgataatgtgtggaaaaattctcaagcaaaggtttcatctgcaagaacaaatcgggttaaactgcgaaatctgttagcagccgctgaaggttctgaactgctgaaaattacccaaatgaaggcaaggaaaaagcgtttgcgttttcaaaggagcaagatccatgattggggtctggtcgcacttgagtcgatcgaagcagaagactttgtaatagaatatgttggtcaactgattcaccggcgggtctctgacatacgtgagtctcaatatgagaagagtgggattggaagcagttacctctttcgcttggatgatgattttgtggtcgatgccactaagcgtggtgggttagcaaggttcataaatcattcttgtgagccaaattgctacacaaaggtgatcactgttgatggacagaagaagattttcatttatgcaaagaggcgtatatatgccggtgaggaaatcacatataattacaaatttccattggaggaaaaaaagataccgtgccattgtggttctcggaggtgtcgtggatcaatgaactaagaaggccatcttttgaggttgctgcaacacttaagattcttggctgtgtgcaactcatcaatcaggatttacatcaatatcaaaatatggagtgcacgaacatgctggacagcaagaacaaactgccgcattatacttatttaagctatattggtcagactaattccacggtatcccaaggatggtgcaagaggaagcccatactgcgctgccctgtggaggtcgcgagcatgggaaatcagttgaggatgggctgagctagtaaagggttgttttctgacaaggccagtactattgtttttttttgacatacctgggtggagttgcaaactcttgtacaggcgcaggctttacttattacattgtttggattggggatatagttcacatggtgcatacgaaacggttagattggtttaaattctctacctcgtccttaaatcatttatcatactaattagttattgaaagatgaaacacccgaaccactagttcttgtaatacttccactgcttttgtgaaggatgttatgagcatcaaaccgaactgaatggatgccctgctcctgttgatcaacttgacttgaatggacggtccggtccctatttgatgtggatgcatggatggcagtatgaaactagccactggatgaccattttctgctttagtgcatcctggaaataataaagcatctattttccaccagggtgtacacgttttgcagcaataatctatactaccttttggttttagctatctcgtccattccgaatggcgtggaaaggatctacttactgtacccttggtgtcactttgtgcacatcctattctatagtagtgcactggggtacaagttgtctcttttgtaaaagcggtgcaagtgttttattcatggacctactgttcttgcatgcaggtaccaaatctgctagggcttgcttgtcgtcggttcatccatgaggtatacgcgtgtaggcgtccacgaatttttcaaatgagtggtatgtgttccatctcttgattggctgtctatattcgtgcatttttttattatcaaacaatagaaccgctaactcacaaatactcatgttttggacaagatacagccagagttttgagaccctgactaccaataaccctttcaaagatttagtttatttagaggcaaacatgcttcacaagtcacaacctcataaaatctacgagcttttatttacaaatacgtctcgataatgaagtttggagacaacaagtatcacatgtactgaaaagacacttctgtgacctcatcgtgccatcggagggattgtgtaacatgttacaacagaaatacaaaatagtggccacagtatggccaatgattaacctcctcctncccacccccc

SEQ ID NO: 3585 - DNA, 2667 bp, Zea mays
  Clone ID: TF_ZmC204_1
ttgaacctggggaatctgtgaccgatgatcgtatattgggtgcccgcatgacaaaggccagctgtgtctcttccgttcctaggaagtatgaagttgtcgaggaggagcttagtgtataagatttgggggaattacagcgacaactgatagttgctttacctgaagtctattctgagaagttcgtgtcaaagaagaatggcaccgaaaacttggaacttccagaggttaaggattatcaaccccgaaaagtagcaggagatgaaattcttgagcaagaagtatatggcatagatccatacacacacaatctactgagtgacattatgcctgctgatcttgagttgtcacctaccgacaagcatatctttattgaggagttgcttctgaatacattgaataagcaagttaggcatttcactggttcgggaaatacccctatgacttacaaccttaggcctgtcattgaagagatccaaaggtctgcagaggataatggtgatagacgaacttcaaagatgtgcttggggatgctaaagaccatgagaaatcgctctgaacagaacttcgttgcttatagaaagggtctcggtgttgtttgcaacaaaaaaggtggatttggtgtcgatgactttgttgtagagttctttggggaggtttacccttcttggagatggtatgaaaagcaagatggtattaaacatatacaaaacaacagtgaagatcaagctcctgagttttacaacattatgttagaaaggccaaagggagacggagatggatatgacttggtttttgttgatgcgatgcacaaggccaactacgctagtagaatctgccactcctgcaacccaaactgcgaagcaaaagtgacagcagtgaatggtaaataccagattggagtttacacacttcgaccaattgcagaaggcgaggaaatcacttttgattacaattctgtaactgagagcaaagaagagcatgaagcatcagtctgcctctgtggaagtcaagtatgccgtggcagctatttgaatttttctggtgaaggagcctttgagaaggtattaatggaattccatggtgtgctcgataggcatagcctgctgctacaggcttgtgaaacagactctgtctctcaacaagacttaattgacttgggtagagctggtcttggtacctgtttgcttgctggtttgcctggatggcttgttgcttacacagctcacctggtgcggtttatataccttgagagacagaaactccctgatgagatcttaaggcacaatgtggatgagaagcgccagttccttatagaaataaacatggattctgagaagaatgatgctgaggttcaggcagagggagtattaaattcaagattacagcaaatagtgcatacacttgacaaggtgagatatgttatgagatgcatatttggagacccaaagaatgctcctcctcctcttgtaaggttgtctgggaaaagtctggtatctgccatctggaaaggggacagttcaatagttgctgaactcattcagtcgatggaacctcatgttgaagaagaggtacttagtgatctgaaggccaaaatccgtgctcatgatccgtcagagtctgaagatattgagggaggcatccggaattctctcttgtggctgcgtgatgaattgcgaactctttcatgcacttacaagtgccgtcatgatgctgctgcagatttgattcatttgtatgcttatacaaagtgcttcttccgagtccgggattataagacagtaaaatctccaccagttcatatcagtccgcttgacttaggccccaaatatgctgataaactgggaccaggctttcaggagtactgcaagacatacccagaaaattattgcttagcccagcttatctattggtatagccagaattcagaacctgaatctagattaacaagagctagaaaaggttgcatgtcgttgccagatgtctcatccttctatgtgaagtctgcaaagccatcacaagagcgagcttatggaaacagaactgtgagattcatgttatcgcgcatggaaaaacaggcacaaagaccatggccaaaggataggatatgggtgttcaagagtgatccgagattctttggtagtccaatgatggacaccgtgttgaataattccccgcttgacaaggagatggtgcactggctcaagactagaccaaatgttttcctaggctagtaaaaaaggtttgtaggcagataaggtggtatttggttctttctcctttttggagattttagtctacatgattctttttccgactcacaccttggctacctgatcatggggagtttagcttttagatagcagggtagtctcaccacccccatctgtacattcctctctccctactttccttgtagagatgtatctggttaataactgatagattcgtcattgatttgatgtagtgaattttccccataggaatgctccctcttttgtttcatgtaaatgcagaacaatttcaatcttgaattcagtaatgtgttacaggcattttgcatttctatggttcagttgggttgtttcagtcaataaaatggttttaagggctcaaaaatttaattcataggaaaaaatctgtgcatgagttttgatgattgaacctgtg

SEQ ID NO: 3586 - DNA, 2455 bp, Zea mays
  Clone ID: TF_ZmC1758_2
tccgtcgtgaaaaagcgccggccgcggtcatcggagctcgtgcgggtctcctcgctcggtgtgcaggatcagatctacttccgcgacctcgtgcgccgggcgcgcatcactttcgagtgcccccgcgggctgctactcagggacgacgagcgtgctgagtccctcggcctcgcgggtgccgccgggttcggcgttgccagggaccggcgccgcgcccgcgcagacatgcgtgccgcagcgctcatggcagaccacgacctctggctcaatcgcgaccgccgcatcgtggggccgatgcctgggatctcggttggtgacgctttcttcttccgcatggagctctgcgtgcttggcctccatggccaggtacaggcaggaattgattatgtcagtgcagggaggtcggcctctggggagcctatagccacatctataattgtatctggtgggtatgaggatgatgacgatcatggcgacgtacattcggctcgagggcatggcggccgtgatcccaacctccacaagcattgcgtcgatcagaagctggagggcggcaatcttgccctcgagcgcagcatggcttatggtattgagattcgtgtaatccgtgctgtcaagtcaagacgaagccctgttggtaaggtttacttctacgatggcctctacaaggttgttgactactggctcgaccgtgggaaatctgggtttggtgtttataagtatagactgctgcggattgagggccaagaacccatgggtagtgtgaattatcgagtagctgaacagcttaaggtggatgtgtttgctataaggccaacagggtatttgagctttgatatctccatgggccgtgataccttgccagttgcactctataatgatgttgatgatgatcaggacccactcttatttgagtatctaacacggccaatatttcctacctctgctgtccaggggaaatttgctgagggtggtggtggtggtggttgtgattgtgctgagatttgctcaattggatgtaactgtgcaggaaggaatggtggcgagtttgcatataataagactggaaccctgctacgaggcaagccactagtatatgagtgtgggccatattgcaggtgcccacctagttgtcctaacagggttagtcagaaggggcttcaacataggcttgaggtattccggtcaagggagactgggtggggagttcggtctttggatctcattaaggctggcacattcatttgtgagttcagtgggattgtccttactcaccagcagtcagaggtcatggcagcgaatggtgattgcttggtgcgtccaaataggttccctccaaggtggttggattggggtgatatatctgatgtgtaccctgattatgtggcgccagaccatcctgttattcctgagttaaactttgcaattgacgtgtcaagggcaaggaatgtggcatgctatttcagccacagttgcagtccaaacgtgtttatccagtttgtgctgtttgatcattacaatgtgtcttacccccacctaatgatctttgccatggaaaacattccaccattgagggaactaagcatcgactatgggatggttgatgaatggactggacaattaaccatgtagctggagtaacctatttaaaaggcagtgttctctttctttcttttccctttatttttggaattctcataatgcttcccctggggatcatcaagccaactggactaaaattcctcagctgaaacttgcatgaggatgaccaagctacaactcattgtcatctacacttttacagtacatcagccatccattgtatatgttgcctgataacctaggtgcctcggccaattttctagatgaactcgcttttgaggtataacatgcaatgttgctgtaggaagcttgtttgatgtggctggttaattttaaccttcgtgttatgagttgtcactgctggaactcattttgtacatatatctgcagattatctagctggaagcgtgtccacttttgttggaaaatgttgatccatatgttgtaaagttatttgcactccttgtgcaattgaagattcactctctggctgtgggtagaatctagctgtagaaagagtctaagtatcatgtgaattacgtgctgaggaagataaagttcagacggtttaggatttagacagtcatgtatttatactatcgcgatgacttgaccgattctgtgtctatgtttattttggatgatttttactaaagtaattctcatagaaatgggatgagaagttaggcgtttagtagtttgcaccaccttttggtagctagaagatgaaaaaagttaaaacaaacaaaaaaaaaaaaaaaaaaaaaaaaaaaaaaaaaaaaaaaaaaaaaaaaaataaaatacaatattaagggctgtccacgtatatgagtctcgggctcccgagaattaa

SEQ ID NO: 3587 - DNA, 2195 bp, Zea mays
  unsure (1)..(2195): unsure at all n locations
  Clone ID: TF_ZmC487_1
ctcgaggtgggccggtcggggacgtcttcgttaggtttccacggctcccaccagcgtgagtgcgtgaccagccccaatgccctccaaaccctagtccacagctcctgtaccctggcggccatgccggatctgagcaccagctacctccctcccttccctgaactgtccctcgatgcgggggccctcgccgtcgaccacgcggggaatgctgcagccgccgcctcggccgatgcggcgtccgcgtacgcgtcttcgtctgcctctgtgggcagcggcgtagacgacctcgttattccagcggaatgccggtggaagggccatgtccgcaccttcgacatggcgggcgcgggcgctgtcaccacttgccccgccgcgcggcgtggcggcgggaagaagctgtcactgattccgtcactcgagccggcacggacgcaggcttcagcatcggctccgacgctcgaggaacgcgtgagcgagtgggcggctaagaaggcagcggccggcgttccgactcatcactgcgtgctgcctttcctcaccggggcgccaatggcggtcgaatgtcgtttgtgctccaagattatttatgttggagaagaaataaaatgttcagttaaaaagtgtccacaaatgttccatctcaaatgtgttgcggaagatacttcaaactttaccgttgaaagcttcaggtgccctcaacatgggtgtatggtttgtaagcaaaagatgttcttttggcgctgcggacgttgtacagttgcagcacatacgaaatgtgcaccatggccagtggttcacctaaaaaatgatcaaggaagtgcaatttgctggaggcatccttctgactggctgctgcaaaataagaatgctgactttaccaacagtgtagaggaagtattttgccggctacctcttccatatgttaatgaagacttaaatattgattcaatcatcagggattatgctgaggctgtttataagccacccccctatacatctatcaggcgcaatgtatatctgataaaaaagaagcgcactggtgttcgtgtggatattgggtgcacaaactgcagggctgattctacttgcaaagaagactgtgaatgcaggggtctttctatgagttgttccaagaattgtcgctgctcagatctatgtacaaacaggccattccgcaaggataagaaaattaaaattgtgaagacaaagcgatgtggatggggtgctgttgcgttggagccattggagagaggtgattttgtaatcgagtatgttggtgaagtcattgatgatgcgacatgtgaacaaaggctttgggatataagacggcgtggtgacaaaaacttctacatgtgtgaaatcagcaaagattttacaatagatgcgacatttaaaggcaatgtgtcacgttttctaaatcacagttgtgagcccaactgtaaactcgaaaaatggcaggttgatggtgagacaagagttggtgtctttgcctctcgttccatcgaagttggagagcccttaacttatgattacaggtttgtgcattttggagagaaagtgaagtgccattgcgaagcagtgaactgccagggatacctgggcagccaaataaagaacccaattcaaagcattcttgccactgtagcaccgcaagtgcagttgcgagagtattcgcccatgcaccacgaagctccaagattgaagccaataaatcacttgttaccctggaccaactgtatagaggtctcttttaacctgagaagcaaaaggaaaattgaccggctatgctgggcccgcaagaagaagagaacatccctcgtgccatcttcaacaagcatgccagcatcgccgagtgaagttcctgccgcggatttctaactgcccttcgttgaagagcaagcctgccctgtataataatttcatggtacattctttacatgcattggttggaaacgattctttcacattgctcatcaatggtgttgtaacctgcaacattctttatttggtttcatagggcattcagtcagtttacgggtggtagtttgtcggaacatgtacccaatttttctgatgaaacaaatgtttgagcttcaaaaaaaaaaaaaaaaaagcggccaaaaaaattnnnnnnnnnnnnnnnnnnnnnnnnnnnnnnnnnnnnnnnnnnnnnnnnnnnnnnnnnnnnnnnnnnn

SEQ ID NO: 3588 - DNA, 789 bp, Zea mays
  Clone ID: TF_ZmC3614_1
ggggtataatccgctacacggtacctggtttgcctgtatactggcacgcggcagcacctgcagccctgaccggcgacgattgggcggccgtcgctgcctccttactccaggtgtccagctcttcttcgtgccatttgccggccgtgagcaccaccaggggagtttttgacaactgaagaagcgcggagacgacacaaggtgtatgatgaacttgcctctggtggcaagctctgtcccgcgctgattgtcataagagagcacctcccttctggtaaagcatgcttaagagtcaacattgatgcaaccagagtgggaaatgtggctcgctttatcaaccattcatgtgatggaggcaacctgcacccagtgctggtgaggagctctggtttgttgctcccaaggctctgcttctttgctgccagggatatcgtggagggagaagagctcaccttcagttacggtgatgctagggttaggcccaagggtttgccatgcttttgtggaagctcgggttgttctggtgtgcttccttcagaagaaacttaagaactgatgccatcacctgggatgtcttacaaatgagtttgattctatttctgacttcgcaataacattggcttcatgaggaattgcctggcccattcttttagccatactgtaatgtgtgcaacaaacaaaaaaacaagctgtcagtttttggtgaagaactggtcatgtttgtaatgtgatttgttttggctggacatgtgtttcctgcttacagttgattggcagattctttgactgccg

SEQ ID NO: 3589 - DNA, 831 bp, Zea mays
  Clone ID: TF_LIB3245-301-B3_FLI
ggcatcggcctgccgcgccctccgcgcggctgtgactgctgtcaccgcgcgccgcgccggcgacgccgcacgtggcctagagccgctccccatcccgttccgcaactacgtcgattccaagccctatgcctacttcctgtatacccccttctccctcacccggctggctcccggcgcctccgcccccagcgcccagccgtggggtgccgcctggacccggccgccccgccccacctggccccgccccaacctcgacggcttaccatcagccgtgtacgggtgcgcgtgcgcggcggcggaatgcggtggtacccagtgcgcgtgcgccgatgtggaggccgatgcagcgggctcgggcttggaggccgggatggggagcctcacggagtgcggtgatgtctgcgcgtgtgcgccgtcatgtgggaaccggcggactcagcgcggcgttgctgtgcggctgtgcgtcgtgcgccacctgcacaaggggtgggggctgcacgctgcggaggccctcagctgcgggcagtttgtgtgcgagtacgccggggagtttttgacaactgaagaagcgcggagacggcacaaggtgtatgatgaacttgcctctggtggcaagctctgtcccgcgctgattgtcataagagagcacctcccttctggtaaagcatgcttaagagtcaacattgatgcaaccagagtgggaaatgtggctcgctttatcaaccattcatgtgatggaggcaacctgcacccagtgctggtgaggagctctggtttgttgctcccaaggctctgcttctttgctgccagggatatcgtggagggagaaga

SEQ ID NO: 3590 - DNA, 773 bp, Zea mays
  Clone ID: TF_ZmC1285417_1
atttcattcttctattcacagttcacaccttggacacgatctatttcagagttattatagtcataagtcagttcctgtagtggtggaattgtctctgcagcaaagaacataatatgtggcatccttttgtcaccatggtcccagagaatattttgtgcttgaagatttggtgaacagctgtggctgatgaaccttccgatgtttccatacacagatgcatctatagtgaagcgcacatcttccatggcctgggagcaagagctagaagagttcaaacctgaaacatttgatagcaacacactgctaacattctcatcatcatagttaaggcctacatcaaacaagtaattgttgttccttctcttgtcagccgccttttgatgctgcagctcaccgatatactcacatatgaagctgccagcaggaatggaccatagagatcttacgccccaacctgtcttggttgtcctgaatacttccagtggtattttcgtatcatgctgactgaccctgttgcggcacgacggaggacatttacaagatgaaccacactcaaatatcacagacttctcattgagaattgcgccacttaagtcaaatgggatttcccctccattcttcacagcacaggcacagctctcagagtctgagcaaccattggtgcagtcacaaccctgattgtgtttttctgtaagcccaaatggatatctaattctagtggtgtattggaaaggtccaggttgcacatcatcgactgtattaatgacacagat

SEQ ID NO: 3591 - DNA, 2498 bp, Zea mays
  Clone ID: TF_ZmC499_1
cccgcccgtccgctgctgcctctgggccggcctgcgtgctctctgttaccgccacaaatggccttggtggtcttggactcgggctacctggggcccattacctccagtcggcactagtcattcgatgtatgtcatgtaacagcaattttttgaacacagatctgctataccctcacattgtttctgaccattcacaacagttcaggcttcttgatgtccctcagcgaccaagtggtcaatctgctcaacaaacagaagggatgagtggtctgcccctttatgatagccacaacgttgaggatgaaaatggctcacagaagtttgtctgcagattatgtgggctcaaatttgatcttctgccagatcttggccgccaccataaagtcgctcatatggtctcaggtgctgttggccacattccactgggccgtgggaagtaccagcttaaccgcggccgacactactattccgctttcaagaaaagtttgcgaccaacaagtacattaaagaagagcagtagctctggaatcgataaaaatttgaagtttcagatctctggcttaacatctcaaatagttgaatctgaaacatccagccttggtaagttacaggatttccaatgctcagatgttgcacaaactttattttccaagattcaaaagacaagaccccatccaagcaactttgatgttttatcggttgcccgctctgtatgctgtaagacgagtcttcttgctgcgttggaagttaaatacggacctttacctgagaacatatttgtgaaagctgcaaagctttgcagtgacaatggcgtccaaattgattggcatcaagagggattcatatgccctaaagggtgcaagtctagatataattcaaatgctctgcttcctatgcaactcacggcagttgattttcttgaagctcctgttgattcccgtaatgatgatgaaatgtggggaatggaagaataccattatgttcttgattcaaagcacttcggatggaagcctaaaaatgagagtgttgttctctgtgaagacataagctttggcagggagaaagttccaattgtctgtgtcattgatgtggatgcaaaagattctttaggtatgaagcctgaagaacttttgccacatggcagttctttgccttgggaaggatttcactatatcacaaaccgtgtgatggattcatctcttattgattcagagaactctatgcctgggtgtgcatgttctcatcctgaatgttctcctgagaactgtggtcacgtgagtctctttgatggtgtctacaatagcctggtggatatcaatggaacaccaatgcatggcagatttgcatatgatgaagatagtaaaattattttacaggaagggtatccaatatatgagtgcaattcatcatgtatttgtgactcgtcctgccagaataaagtattgcagaaagggctgcttgttaagttggaactctttagaagtgagaataagggttgggctattagggctgctgaacctattctacagggtacctttgtctgcgagtatattggtgaagttgtgaaggctgacaaggctatgaaaaatgcagaaagtgtgtcatcaaagggtgggtgcagttacttgtttagcattgcttcccagattgatagggaaagagttcggactgtaggggctattgaatactttattgatgccacaaggtctggaaatgtttcccgttatattagtcacagttgttccccgaatctcagtacccggttggttttggtagagagcaaagattgccagcttgctcacattggattgtttgctaatcaagatattgccgtaggagaagaactcgcctatgattaccgacaaaagcttgtagcaggcgatggctgcccatgccattgtggaactaccaattgccgaggccgtgtctattgattttgcaggaatacactaactgttcaatgctcggttgcagaactccagagatttcaacagttgtgtaggcttgctgagcgatttagcattgcaattttcctacagcttgagtgcagggctaggatctcattgttaatgctacaaatagtgattgtgatataggactcaggcaagcattaggcaataacatagtgtcgattttagtcatggtaccatcatgtttaactgattatttgttagaagcagcctgaaatgaaactgattcaggctgctctgttcgtaggcgagaattctctctgtaaaattccttcattcatattttatggttcatgagcaccatcattgacgtgaagtaataaactagttatcccagtggcctattgtgcggataatactccctctgttttttttagggagcgacaaattcgagaggtatttttagttgtactaattgcgtgatggatatcagcaatgaaaaaggttttttccaaaaaaaaaaaaaaaaaaaaaaaaaaaaaaaaaaaaaaaaaaaaaaaaaaactcgaggggggggcccgggtaccc

SEQ ID NO: 3592 - DNA, 365 bp, Zea mays
  Clone ID: TF_ZmC181406_1
tgaatttgttatgtttgatcgttccaagctttcaagggttgattggaagtacattataattgatgaggcacagaggatgaaggacagagactccgtcttggcgcgtgatcttgatcgctatcgctgccagcggcgcctccttctcaccggtactcctctacagaatgatctcaaggagctttggtccctcttgaatttgttgcttccagaagtatttgacagtagcaaggcattttcagattggttctctaagccttttcagagggatggtcctacacataatgaagaagaagacgattggcttgagacagagaagaaagtaataataattcacaggctgcatcagattttggaacctttcatgc

SEQ ID NO: 3593 - DNA, 700 bp, Zea mays
  unsure (1)..(700): unsure at all n locations
  Clone ID: TF_LIB4172-030-R1-L1-E12
aattcggcacgaggaacaacttttgaagagagagccgggctgcggttgaccggtatccgtcgaactactggatttcaagttgcttgttcaaattaaagattataataccaaacatcgggctctattaacggggacctcattccacactaatcttaatgagcttctcatgcttatacacttccttgagggagaaagatgtggaagtataactgatctccaagaagaggtcaaggatataaaccaagacaatcaaattgagaagcttcatggaatgctaaatccacatcttcttggaagattcaagaacgatgttatgaaagaacttcctgcaaaaaaggaatggattctacaacgtgaattgacaagataacacaaggagtactataaagcaattctcaccaagaattatgaacagttagcccgtcgcaatggaggacatacatgtctaataaacgttggaatggaggtgcacacactctgttgccatggattcatgattgatgaacctgatcttgaacctgccaatccacaataaggtttaaagacgcttctatattcatcaggtaagatgcagctgctgcacaagatgatggagaaactganagacaaggncatagatctctaatttattcacagttccatcacatgttggacttgctggaggactatttgaattacaggaaatggacttatgaacgca

SEQ ID NO: 3594 - DNA, 3073 bp, Zea mays
  Clone ID: TF_ZmC170_1
tatatatgattggatcaagtctactggtaccattagagttgatcctgaagatgagaagcgccgtgcacaacggaatcccatgtaccaggtcaagacatacaagaatctcaataacaagtgcatggagctgaggaaagtttgtaatcatcctctgctgtcatatccattcttaaatcatgggaaagattttatgatcagatcttgtgggaagttgtggaatcttgatagaattttaattaagcttcacaagtcaggccatcgtgtacttctttttagcaccatgacaaagcttcttgacatcatggaggactatttgcagtggagacgacttgtttataggcgaattgatggaacaacaagcctggaagatcgagagtcagcaattgttgacttcaacaggcctggttctgattgttttatattcttgcttagtattcgtgctgctgggaggggtctgaatcttcagagtgcagacactgtcgtaatatatgaccctgatccaaatccacaaaatgaggagcaagcagttgctagggcccatcgtatagggcagacaagggaggtaaaggttatttacatggaggctgttgttgataacatatcaagttatcagaaagaggatgaattgagaaatggagggagtggagatttggaggatgatcttgctggaaaagatagatacatgggatcaattgaaagtctcatccgcaacaatatccaacaatacaaaattgatatggcagatgaggtcattaatgctggtcgttttgatcaaagaacaacccatgaggaaagacgaatgactctggagacactcctgcatgatgaagagagatatcaagactctgttcatgatgttccttcattgcaggaagtgaaccgtatgattgctaggactgaaagtgaagtcgagctttttgatcagatggatgaagactttgattggacaggtgatatgacgaagcatcatcaggttccaaagtggcttcgtgttaactccaatgaagtagatgctgtggtggctagtctgtccaaaaagccgtcaagaaatatgtcatctgggggcattgctttagacactaacgaaacacttgagaaaagagggggcggccaaggggtacgggcaagtactccatctacagggagatcgatgatgaagatcttgaagaatctgatgaagattctgaggagaggaatactgcatccctacctggggaaggggaagtaggggaattcgaagatgaagaagacaatgatgactcagtacctgataacaaggatgaatcagaggaagaagagcctatgaatgatgatgtatatgaatttactgaaggattaagaggcagaaaagctaataggatggaagaagctggttcaacaggctcttcttctggaagcaggagattaccaccacctgtaccttcctcatcttcaaaaaaaattgcggtctctatctgcattagatgcccgcccaggcactttgtcaaagagaactccggatgacctagaggaaggtgagattgcaatgtctggggactcacatatggacctccagcagtcagggagctggaaccatgaacgtgatgacggtgaggatgaacaagtactacaaccgaaaataaaacgcaaacgaagtattcgtcttcgtccaaaacctaatgcagaaaagcaggaagatagatctggagaaggggccttccctcagcgtgctgccaggcagcaagacgcggttcatcctatagtgaaacagaagcgcaacatgtcatctaggaaggtttcaccggcttctaggtctgggaaattgagtcacttgtctgggtctggtgaggggtctgctgaactctccaaggaaaattggagcagtaaggccattgattccactgcccctgagttcggtggcacaaagatgtctgacagtatgcaaagaaagtgcaaaaatgtgataagcaagctttggaggaggattgacaaagaaggtcatcaaatgatacctaacatatcttcttggtggcggaggaatgagaattcgtcgttcagaggtccggctggtagcacacttgacctacaaaaaatcgagcagcgagtcgatgggttggagtacggcgctgtaaccgagttcatagcggacatgcagcagatgttgaaaagcgtggtccagcacttcagctataggcatgaggtccggatagaggccgagaccctccacaacttgtttttcaacataatgaagatcgccttcccagactcggacttcatggaagctaagaacgccatgtcgttttcgaatcctggaagcggtgccgccgctgccccatcatcgtcaaagcacgccgcaccatcccttaagcgcagcagagccagtgccagtgccagtgccagtgaagcagagcagcagcatggctcgggacacagcagcaggcacaatcagcctagcgaggcggtcccgcccagccggtcccacagctccaggtcagagagagaccccagacatggcggcagcagggatcagcacctccaggacggcgccgctgggttgctgcaccctagcgacatgttcatcgtgaagaagaagaggcaagagcgcgcgaggagcggcatcgggtccccttccagctcgggccgaggcgccggacctctgtcgccggccaaccctgggcgtccgggccctgccccctcgcccagaggtgccaggacgccgttccagagggatccaccgccacacccgtctcagcagtcgatgcattccgctgggtctggatggggcagcggcggtgcgcattcggatcatcaagcgggggcaagctcgtcagcacccggcatcggagacatccagtgggcgaagcctgccaagaggctgaggaccgacagagcaggcagaggcggccgagcctaacggttggttcttctttagcgtcatatggatgtgtaaatgcatccacgtagcggatggaggcgtttgataataatcgtcagtgtatttagttcatcgtcctagcaagtcaaactttgctggcagtttttaaaacagttttttaaggaaaatcaggttatatttcagacctctttaattaac

SEQ ID NO: 3595 - DNA, 924 bp, Zea mays
  Clone ID: TF_ZM4624.C5.o1.fg
atgggtggccccctcaccgccgccggaggtcgaggagatgggggcgccaaggcggtggaaccgctccggcctccgccgccgcccgacccgaagacaatggccagatggtaccagctggaggcgctggagcgggcggtgcgggggaacaccctggcgttcctggagaccgggagcgggaagacgctcatcgcggtgatgctgctccgggcgtacgcgcaccgcgtgcggaggccggactcgcgccgcttcgccgtcttcctcgtccccaccgtcgtcctcgtgggccagcaggcgcgcgtcgtcgagcagcacaccgacctcgtcgtcaagcagttctgcggcgagatgggggtcgacttctgggacgccgccacctggcgatcccaactggaggacggcgaggtgctcgtcatgacgccgcagatcctgctcgacaacctccgccacagcttcttccgcctccaggacatcgcgctgctcatcttcgacgagtgtcaccacgccaggggcaatacgccgtacgcctgcattttcaaggaattttatcacccccagttgaattctagtgcgtcagaccctctgccaaggatatttgggatgtctgcttcgctcatttattcaaaagatttgaatccgcacaattattcaaagcaaatttctgagattgagaatctcatgaattccaaggtgtacactgttgatagtgaatcagctttgtcggagtacataccatttgcttctacaaaaatagtggactttgacgattccaacatttcatctgagctgcatgccaatattctcagttgtttgaatagattgaataaaaagttgagtggtaagactaggcatggcggccaatttggggtaagatacaagggagaggttggcactttcggcatgcctacagaagggaacagagattga

SEQ ID NO: 3596 - DNA, 678 bp, Zea mays
  Clone ID: TF_ZmC504615_1
gggtaccctccgggccggccgggattgaaagataatgttactatgatcaattcagaaaccagaaggctttgttatggttagcaaaactttctcctaaaaacttctcgagatggagtttgttggtttgactcgcccagttctagatacacgtgcaactacaggcaagggtgcccatccatattacaagatattccaagcatttggccttgtgagaaagattgagaaagatacaacgccatgtgtcctcggatacccttaatgtttttgtgtggggagaccacaagaagccatctgctcacaaccttgcttgggactatgacattgtcataaccacattcagcaggctaagtgcagaatggggtccacagaagagaagtccactaaagcagatccattggttcagggttatactggatgaagggcatacactaggttccagccttgccctgacaaacaagttacagatggctgtcgctttggttgcatcaaataggtggatattaactggtacacctacaccaaacacaccaactagtcaggttgctcatcttcacctcatgcttaagtttcttcatgatgaaacttatggtcagaattaccagtcatgggactctgggatccataggccttttgaggcgcaaatggaagaggggcgcgctcaccctgtgccactgcttc

SEQ ID NO: 3597 - DNA, 1563 bp, Zea mays
  Clone ID: TF_ZmC9159_1
aattcggcacgagggttttgttgactggaactcccttacagaacaacattggtgaaatgtataacttattgaacttcttacagcctacttcttttccttctctatcatcatttgaggagaagtttaatgaccttacaacagcagaaaaagtagaggagctgaagaaacttgtagctcctcatatgcttcggagattgaaaaaagatgcaatgcaaaatatccccccaaagatagagcgaatggtacctgttgaattgacatcaatccaggctgaatactaccgtgctatgcttacaaagaactatcaagtactgcgcaacattggaaaaggtggtgcacaccagtctttattgaacatagtaatgcagcttcggaaagtctgcaaccatccctatcttattcctggaactgaacctgaatctggttcacctgaatttttgcatgagatgcgcataaaggcctcagcgaagctaactttgttgcactctatgctaaaaatattacacaaggaaggccaccgtgtccttatattctctcagatgacaaaacttcttgacatccttgaagattatctgactttagaatttggccctaaaacatttgaaagagttgatggctcagtatctgtggcagagcgccaggcggcgattgctcgctttaatcaggataagacacgttttgttttcttgctgtctacacgatcatgtggacttggtattaatttggcaactgcagatactgttatcatatatgattcagatttcaacccacatgctgatatacaggcgatgaacagggcacacagaattggacaatcgaatagactcctggtttacaggcttgtggtacgtgctagtgttgaagagcgtatcttgcaattagccaagaagaaactgatgcttgatcaacttttcgttaacaaatcagaatcacagaaagaagtggaagatatcattcgctggggtacagaagaactctttggaagtagtgacagtgtggatggtaaagatagcagtgaagccccaggttctgttgctgatgttgaatttaagcatagaagaaaaaccggtggcctaggtgatgtttatgaggacaaatgtattggtggttctaccaaacttgtttgggatgaaaatgctattttgaagctgcttgatagatcaaaccttccatcatcagtggccgaaagcactgatggggatctggacaatgatatgcttggtactgtgaagtcaatagactggaatgatgagctgaatgaccaccctggtaccaatgaggatattgcacctattgataatgatgggagtgagttggcatctgaatcaaagcaaggtgctactaatcgtttagaagaaaatgaatgggataaacttttacgtgtcagatgggagcaatatcaaatagaggaggaggcatctcttggtcgaggtaaacgtttaaggaaggctgtttcttacagagagacatttgcaacacttcctaatgaagcattaagtgagggctctgatgagggagatgaaccaaagagagaatatacagcagctggactggtcttgaagg

SEQ ID NO: 3598 - DNA, 694 bp, Zea mays
  unsure (1)..(694): unsure at all n locations
  Clone ID: TF_LIB4172-009-Q1-L1-B9
aattcggcacgaggggatgttcaaagagatgattgttcatagaagttaatgttcttctgacaacatatgagtacttgatgaacaagcatgataggccaaaactaagcaaaatacaatggcactatataataatcgatgaagggcatcgtattaaaaatgcttcttgtaaacttaatgctgatttgaagctttatcggagctctcatcggatattattgacaggaacacctcttcagaataatctcgaggagctgtgggcacttctaaattttttgttgcccaatatttttaattcgtcagaggacttctctcagtggtttaacaaaccatttgaaagtaatggtgataattcacctgatgaggccttactttcagaggaggagaacttgttgatcataaatcgtcttcaccaggttcttcggccctttgtactcagaagacttaagcataaggtcgaaaatgagcttcctgaaaaaattgaaagacttgtaagatgtgaggcatctgcttatcagaaacttctcatgacaagggtggaagaaaatcttggtggaattggagccgttaaggttcgcttcgttcacaactctgtcatggaattgangaacatatgncaccatccatacttgagccagcttcatgntgaaagagatgagggctacctaccctaacattttactacatctattttgag

SEQ ID NO: 3599 - DNA, 583 bp, Zea mays
  Clone ID: TF_20337019
cggagcatgaagggcttcaaaatagcatgcaatctactaagctgatgttcattcaaagctcctccatgctcagcatgaccctcaataccctttgagaaccactcgttgaactgttcatggctgtcaaatagagtgggcatgatgaaatgaagaagtgcccataactcagccatattgttctgtattggtgtcccagtaagaagtagacgatttctacagctaaagctcagtaatgtcttccagcgctggctgcttgaacttttgatagcctgggcctcatccagtaccatgtattgccacttaacacgtctcaaaagcttctcttcattcacaagtatctgatagtttgtaataagaatgtggaagctagcatctctgcgatacaaacgcttggggttgatgttctttcgaagaatcatcctctctgggccccagtaaggaagtatctttaggtcagggcagaatctaatcaactcctcagcccagttattcacaacagatgcaggagccaccactagaaaggggccccatatgtttttgtcctcagccaaatgagacaggaatgccatagcctgaacagttt

SEQ ID NO: 3600 - DNA, 456 bp, Zea mays
  unsure (1)..(456): unsure at all n locations
  Clone ID: TF_LIB4978-050-A1-K1-E11
ctctaatttatataaactcccgatctagctcggaacgattcccgggcgcnatcccggcacaaaccgaacaagcgcctaaaacgcggacgcataaccacgntcaactcaaaagnctaagcagatcgggagaagatactcgatccgccggagactacttttancaggcactcctatccaaaaccgcctgcaagagctccggnctttgcttaactctctcctgcccaaaatnntncattcatcccacaantntgaggaacggnttaatgcaccatttgcatgcgacgccagccttaacgacgagcgaaccactactaatcatacatcgntcgcatcaagctctcgccncccatntttgctgaggaggaacaccgacgacctacagaactatctccccgcgaaaacacaagccattctcacgcgcgacccgtccgcttggcaaaaagcgcactaccaaca

SEQ ID NO: 3601 - DNA, 484 bp, Zea mays
  unsure (1)..(484): unsure at all n locations
  Clone ID: TF_ZmC137038_1
cggacgcgtggngtggatgaggggcatcggttgttaaacaaagattccaagttgtttggtcagcgtaaagattataataccaaacatcgtgttctattaacggggaccccagtccagaataatcttgatgagcttttcatgcttatgcacttccttgagggtgaaagttttgggagtataactgatctccaagaagagttcaaggatataaaccaagacaagcaaattgagaagcttcatggaatgctgaagccacatcttcttcgaagattcaagaaggatgttatgaaagaacttcctccaaaaaaggaattgattctacgagttgaattgacaagaaaacagaaggagtactataagccatctcacgagaattatgatgtacccgcgagtcgggattaatcacataacgtgaaagtaaccaactcgtgcatgatcagatgatgactgtctgactgcatcagagagttagagctcaatacag

SEQ ID NO: 3602 - DNA, 2666 bp, Zea mays
  unsure (1)..(2666): unsure at all n locations
  Clone ID: TF_ZmC38421_1
acacacagcctgtagcaccttggttcttgggcaacactgncgacactgtttctttggcagctccggtgcgtttatctcagtgaacagttgggcgggtgcaagatttttttatttacgcgctaatgaaatatctcattacggtcagacatgatcaaacacgtttcaaccccacggctgctatttttcagccctgttcctttgctttaattatcaacaccaaaactatgatcagtacagattaccctctttacacaaaattatttctatgtgtgctggtcatggatcatcctccatgcttatgtacatatatggtcacagccagcacaatgaatactgcagatgccgactgcattgctaacctctgcaggataaccctcgcctctaaaaggcaacccctgtcagcttattgtcactgcccaccgcactgacggcttaatcacccgatttcgctgctttccgtatgattcccatgccttcagtcagtagaagtctcctcccaagttcagcataataaattacttgtcttgtcatttagcatcttggtgttctcatcttctgtcagtggattaggctggagtgttctcatcaccttgaacctcttctctatcataatcatgggctcagtgattttccgcttcatttaccggtttctcatgatccgcacagcagtatccttgcatcagtaatgctcttcatcagttttgatctttttgagctcgatgtttctttttgctggtcgttttgtcttgatctacagcttctgcagtagcatcatccaagtcttcgagcgtcaaatctccttctttgtcaaccttgatgcccttcgctcgtctcctcttttgtcgatccttcgcctgcatggatatttctttcaacttgtgtgcaatctgtgtgtcatcaataagtaatgaaacaacatcctcttgtctcattaaatgatcgtcctggacatgtttccccttcataactaactcttgcactgcatttttctgctttgctctttgcaatattttctcctcaatggtatctttgcatataagcctgtacacagttacctcctttgtttgaccaagtctgtgtgttctatccattgcctgctggtcttgtgttggattccagtcaatttcataaaaaataacagtatcagcagcagtcaaattaataccaagccccccagctcttgtgcttaacaagaaaacaaatatgtcattcctgttctgaaaatctcggaccatgtcacggcggtctgagattgcagaagacccatcaagtctgaaatacttgaattttctgaaattcatgtaatcctcaagaatgtccagcattttagtcatctgagcaaaaagaagcacacgatgaccttcagctcgaaggcgtcgtagtagcatatccaaggtgtggagcttcccagaatcagtgagcattttagctggatcaaaattactcatcggtggagaagacccaaatatcctatagggtagctgcagcatcggctcaatgatgggcaaatcagtattaagttcttgtatcaaagatgaggagcaattggttgtctaggaccattgaactcagaagtacgagcaaatcccaggaacagtttcttggcccaaggatcatacatctcatcggtgaacttataggcaaaatttcgatcagcacaccaaacatttataggtggtgctctagctggcggaataaaagcatatgctgaacgaagaagcctaatgtttgaagcgagcctgtcgcgatgagaaagcaccagtgcttcatatgggccatcaattggcccagtcccaatctttgtcctaagcaaactgggcttggcctttgtagaagaaagcaacaaacgggcaactgcacgaacttttgtggaatcattctgactggactggatgccggtatcttctgaatcaaggaattcatccagaatttcagcagtgtagttcctattccattgcattactgaaaagactagtctctcaaacaatgaagcagtagccaggaaggaagcttcaactgggcacagatttgacaaacgtgtaaagccaaatgcaccagatgatagaagagactcttttgatgaactaacttctggaatggctgagcgatagatattgctgggcaaaaatatattaaacagcctgttcaaatatccattctgaaatccacagatgtttccagaattttccatgttggagatgattccctcataaactaactttggaatctcaaagattatgggatttctcttgcctgcatagtgtacatcttgcaattccccaaatgggggagaaagaagtgagtttgggatttcagcaaagttgaagtaagagcttccctcattccgctcaaacagctcggggtgattgcagaccttccgtaactgcatgacaatattcatcaggctaagtaacttcttgtcatttagactgccacgacttccagcaagcaactcgttaagcgagatcttattttttatggcttgatagaaaacttgttgacgagaactcaatttgcagggaacaatttcttctttctttttggtcatttcagcaatgacatcaatcttaacccggcggagcataaagggcttcaaaatcgggcgcaatctactaagttcccggccgggcacgtctactaaggttgagtgcctcggtgccgaatgt

SEQ ID NO: 3603 - DNA, 1800 bp, Zea mays
  Clone ID: TF_ZmC1082_1
cccacgcgtccgccaaaatgatttgcatgagctatggtcattgttggagttcatgatgcctgatatatttgctactggggatgttgatctgaagaagctgctgaatgcagaagatcgcgaactaatttcacagataaagtccattttagggccatttattcttagacgtttgaagtcagatgtaatgcagcagcttgttcctaaaatccaacatgttaagtttgttgtcatgggcacagagcagtctgaagcttacaaaaatgccataaatgagtaccgtgctgcttgccaggctcgtagtgccaagtcttcagatggcatttccaataatgttgctggattgattccaaagcgacaaatatcaaactattttacacagtttcgtaagattgcgaatcaccctttgcttataaggtgtatttatggtgacaaagatgttgatcgaatttgacggttgcggtaccctaaaggtgcatttggcttccaatgctccttggagagagcaatacaagagctaaagaactacagtgatttcaatatccaccaactattattgtcatatggtgatgtgggcacaaagggcgctctaaaggatgagcatgtttttgcatcggcaaaatgtcaggccttaggggagcttttaccttctctggcaaatgatggtcacagagtactcatatttagtcagtggaccacaatgcttgacatccttgaatgggcattggaaattataggagttacatatagacgccttgatggagggaccgctgtgacagaaaggcagactatagtggacacgttcaacaacgatctttctatatttgcatgtttactttctacaagagctggaggccagggtctgaaccttgtaggagctgacacagtcattatacatgatatggattttaacccccagatggatcggcaagctgaggaccgttgccatcgcattggacaacagaaacctgtcactatctataggctagtgacaaaggattcagttgatgaaaacatctatgagattgcaaggcggaagctagtactagacgctgcaattcttcattctggagcagagttggacaatagtaccgatgtaccagagaagacaatgggggagattttggcatctcttctcctggtctgaagttctaaccctggagtttcttgaaggtatacaattctacccgtgggatatcttcaacaatgggtttttggccttcatttaagcttaccattcaccctggttaatgtcttgaatcttgaggtcctaagatgtgcatccatgtatcctttttgctcttgaaacctcccatcttttagtctgccttatccatcttttgttctatgaatggcgtgctataaactgctggatttccgaagtgtttatggttctacataatgacataatgtttaaggttactgtaggttgtaatggagtccggttcccaccccccctctgatataggaagaactgaaatctgaagtaatacatctgtaccaaagttttaacttgttttaaatgaaacgcagaatagttccaaagtcgcaacattttcttcagtctgtaccattatttatctttatttttattttatctgcacaagtaggtacggggtacctaagctacacttaacattgtcaggatacgtattagagtgcagtttgaccacatgtacatgtatcttgacatactagtctaactgtcagtttgagattgacacccgctttatcagagaaactatatgggaaactttatatgtgttaaatttaactccccaaaaaaaaaaaaaaaaaaacccc

SEQ ID NO: 3604 - DNA, 2307 bp, Zea mays
  Clone ID: TF_ZmC38173_1
cggacgcgtgggtgaagggtggagtgcttctcattggttattcatcatttagaaatttatcccttggaaagcatgtgaaggacaaaaattctgcaaacgaaattacttatgctttgcagtgtgggccagatattcttgtatgtgatgaagcgcatatgataaaaaatagaagggctgacattacacaggctctgaaacaagtaagaacacaaagaagaattgcgttaactggatctccattgcagaataatctgatggaatattattgtatggttgattttgtcagggaaggttttcttgggagtactcatgaattccgaaacaggttccagaaccccattgaaaatgggcaacacacgaattcaacatcagatgatgtgaagatcatgaaccaacgatcacacatcttgtttgaacaactgaaaggttttgtccagcgaaagagcatgaacgttgtgaagaatgatctaccaccaaagaaggtttttgttattactgtaaagctctcacagctgcagaggaagctatacaaaaggttcttggatgttcatggtttctcaagtagtggttattcagaaaaatctcacaggtccttctttgccaagtaccagacattatcccaggtatggaatcatccggggctcctccagatggctaaagaacaaagaggaaatttgcgtcgtgaagacgcggttgagaattttatgatggatgagagttcaagcgatgataatgttgaaaattacttgcctaatggagagaagcaaaaggataaagctgatcagcagtccaagaaaagcaacatcattatgaatgaggaaagtaactggtgggaggaacttttagatgagaatacttatatgaaagcagattacagtggcaaaatgaccttgctccttgatatcctgtcaaaaagttctgaattaggcgacaaagtattagtgtttagccagagtttgaccactctggatttagtagagttttatctggcaaaattgcaaatcaatggaaaagaaggcaaacattggaagcgggggaaggattggtacaggcttgatgggagcactccatcttctgatcgtcagaatcttgtggagatgtttaatgaccttgaaaacacaagagtgaaatgcacattgatatcaactcgtgctggatccctgggtatcaaccttcatgctgcaaatcgcgtggttcttcttgatggatcatggaatccaacacatgatctgcaagccatttatcgagtttggaggtatggccagaccaaacctgtatatgcctaccccctaatggcacatcaaacttaaaatcaatttatatataagcgccaggtgacaaaggaaggccttgcagcaagggtggtggatagacagcaagtttcaagaaccatctccaaagaagagatgctgcatctttttgaatttggtgaagaggaattaatggaacagaacgagaatggttctactatgattgagaagccatccacttctaacactattaaaacctctgtgcctgttcctgtcgacagtctcatgctgagcctgctcagtgagcaaactcggtggatttcaggttaccatgaacatgaagctctcctccaagaaaatgaagaagaaaagcttacaaaggaggagcaggacctggctttgtccgaatgggagtcattgaggaaagctgcatctgatcctgagagaaaatcaagcatgagcgcagttccaacatatcccaatcctgtgcggccacttaagcctgcttcaagaagccggcaactgcagcaacctaaggctaactcaaataaccaaaagaagtgcaccaacttaacccacttgctgactctgagaagccatggcacaaaagcagggtgcacgacaacctgtaacgagtgcggccaggaaattagttgggagactctaaacagagatggtagatcgagatgatgcctgtctctgtggcattgccagatttttttggggtctttatgtaatgttaacgtccaggtagcagtatatatattgcgtatacgagagtattagagtaggtagaatgtagaatggacaaaaaatggctcttgtggtacacatggtagaacgcatgggatgcaaaaaatgaacgatcacattgttatggaatgtagtcgtaacaagatgtttgttatgcacttattgtcttttttttttccttatcctcagcgctagctattttaagtcaagtgtttgtctgaaatttgccaatcggaaggcataactttataggtttaaaataatgaatactaataatgtcttggaaaaaaaaaaaacaccacac

SEQ ID NO: 3605 - DNA, 3513 bp, Zea mays
  Clone ID: TF_ZmC262_6
tttcctggctcgagccccaagcctccaatccactgaactaaaccctaggacatggcgggtagagactactgccggttgccggtgcgcccgcgcgacttctgaggccccgcccccgtcccggcgtcgccggaactggctccactgtcgcccccatcactgggactgggagagtgggagttcagagccgcagacgctggggcgccgggtcaccggaaggccgggaaggaaggtgtggccgcaagacgcaggcaggaggcatcgactcgactcaccatgtctcagtcaccgggaggacgggaaggcatatattacagcaggcagaggaaacctgagcgcaatggcagtgtatttacacctatagctgcaatgtattccagtggtcatgcactccctgttgcaaataggagccacggtttggtatttggcagtctgagcaaggactgggacgacattcgccagcgcaaggatcagttggtcaacttccttgctagtcttgaacgagcctctggagattctgcggcagctggcaaaatcgaagatagcaaattggccagtccttctgtggagccaactgaacaaaaagagaaggctgccataatcgttcttgattcagacgatgaggacggaaatggttcaggaaacagtaagttggcatctgagactaacaaagaactcggaacatctggattgattaataatatcgcagaaaggatggcgtttaatgggagccaagcatttggaactgtgcatacttatggagataagaacacacagattgttccgtatggtcaatgttctgctttagtgaatcagtttcctttgcaaaccagttggcaaccatctattcagtttgagagagtcgtgctgcagaaaaggcctgaggagcagcgaatgcaagatcttgtggctgctagcatagccgagaagagagcagaaacacaagtgttcctttcacttcccacagagaaaaagcgaaggagatcagaccccagtctgcatgccagtgacgatactgctactgtccctaaacaaagaaaaagtaaaggtgccacagttgtagcagcagctaatttgtcattggtttcacaacaaactgctacatcaccagaacctgacatggttatagaggaagaggagaaacataaaaatgaaagtgatggtcttgacgattattggaaagattttgcattggctgttgaaagcacaaagcttgacgaagttgatgaggcggcaattgaaaaggaagataatggaaagatggaggacatcgattgcaatcatgacatccggattcatgaagatttgggtcatgtatgccgtgtgtgtggtatgattgtgagaagagctgattcaataattgattatcagtggaaaaaggcttcaaggagaagaacgaatggctatggaggacattcaaaagatgctgatgagatagattgtggtactgttaaactgtctgaagatttcatagtcgcagatattgctattcatcctagacatgctcggataatgaaaccacatcagttggaaggtttcaactttttggttaagaatttgattggagacaagcctggaggttgcattctagctcatgccccaggtacagggaaaacatttatgcttataagcttcattcagagcttcatggcaaggtatccatctgcaaggcctcttgttgtgctgcccaaagggattctaggtatatggaagacagaaattaaacgatggcaagtgcaggatataccagtgtacgatttttactctgtcaaggctgaaaaaagagtagaacagttgcaaatcctcaaatcttgggaagacaagatgagtatactatttcttggatacaagcagttctccacaatcgtcactgatgatgggggcagcaatgtcacagctgcatgtcgagacaggctgcttaaggttcccaaccttctgatacttgacgaaggacatacacctagaaatcgggagactaatgtactcgaatcactaaatagagtggaaacaccacgcaaagtggttctttcgggtacacttttccagaatcatgttgaagaagtgtttaatatcttgaatctcgttcgcccaaagtttctcaggatggaatcatcccgtcctactgccagacgtataatgagtcaagttgaaatagttggtagaagttcgaaagggcttgctgatggcgcattcactaaggcagttgaagaaaccttattgaatgatgagaacttcaagagaaaagctcatgttattagaggtcttagagaactaacaaaggatgttcttcactattataagggtgatatcttagatgaactacctggcttagtagacttcagtgtgtttttgaagctcacacccaaacagaaagacattatttataagttggaagcacatgatcggttcaaaagaaatgcagtagggagtgcactgtacattcatccatgtctttcagaactttcagaggttaatgctgagcatagggctaacacctttagagatgatttagttgatagtctggtagattctatcactgtgagagatggcgtgaaggccaattttttcatgaatatcctgtcacttgctaattctgcaggagagaaagtgctagctttcagtcaatatatatctcccatgattttctttgaaaggctgctggtgaagaagaaaggctggcatgtggggaaagagatctttatgatctctggtgatactagccaagaagacagagaattggcaacggaccattttaacaactctgctgacgcaaaaattatgtttggttctatcaaggcatgtggggagggtatctccctcgttggtgcgtcgagagttgtcattctggacgtacacctgaacccatctgtcacccgtcaagcgattgggcgtgcattcaggcccggacagcagaagaaggtgtttgtgtacaggcttgtagctgccgattctgacgaggtaaaggtccatgagacagcattcaagaaagaagtcataccgaagctgtggttcgaatggagcgagcactgtactacggaagacttcaaacttggtcaaattgatattgatgactctggggacgaactgttggatactaaagcaatccgcaaggatatcaaagcgctgtatagaaggtaaacaagctttgtggccactggacaccatgtacatattgcagtgctgaccgtcgagctgatccttaaactgaagaaagaggtggcgggtgttgcggtggctacattgcgcggtaacaaaagaagtcattcccagctatatccgtggaatggcggcttcttttgttcctagtatgtgccaacttggggcagcagtcagctgatccccagacacatttctagactcttttttaggctcaagtttctgagaattaacctgctatggcgtttagccttaagtaaatatttcgttcgcaacaataataacccagtaaacctaatttgtttttgtgcgtttgtgggggtggttcttgaaatttaccgggcccctttttcttgggct

SEQ ID NO: 3606 - DNA, 3050 bp, Zea mays
  Clone ID: TF_ZmC2934_1
gtcctggcatggcatgttcgggcacgtcaacgtatctcacggcaagagaaaaataggattaatcttctgaaaactggtgatcaagaagcatatatgaggatggttgaagagagcaagaatgaacgcttgaaaatgctccttgataaaacaaatgagcttcttgaaggaattggaaaagctgtacagcgacaaaaagatgctgaacatgttagtaagccagaaggagggagtgaagtgccaaaagggtcagaatctgaggattgttctcaaatttcgggcatcaagagtgaatcagctgaggagtctacttcagatgacgatggagacctccctggccctgcagatgaaagtaaattcaatgcaggacgtagacttgatgttactgttcattctattgaagaaaaggtaacagaacaaccatctgctctcgaaggtggtgaattgagaccatatcagctagaaggtctccaatggatgctttctctatttaacaacaatttgaatggcattctggctgatgaaatgggtttggggaagacaattcaaaccatagctttgatcgcttatctgttggaaaagaaggaggttgcaggaccacacttaataattgctccaaaagcagtattaccaaattggtctaatgaattcaaaacttgggctcccagcattgggacaattctttatgatggccgtccagaggaaaggaggctgttaagggataagaattttgacggagagcaatttaatgttttgctcacacattatgacctgatactgaaagataagaagttcctaaagaaggttcactggcattatttgattgttgatgaaggacatcgtctgaaaaatcatgaatgcgctcttgctcgcacactagtttctggatataagatccgccgcagactacttttaactggcactccaatccaaaatagcctacaagaactgtggtctttgcttaactttattctgcccaatatttttaattcatctcagaattttgaggaatggtttaatgcaccatttgcatgtgatgttagtcttaatgatgaggaacagctattaatcatacatcgtctgcatcaagttttgcgtccatttttgctgaggaggaaaaaagatgaagtggaaaaatatctccctgtcaaaacacaagtaattctcaagtgtgatatgtctgcttggcaaaaagcatactatgaacaagtcacaagcagggaaaaggttgcactaggatatgggctcagaaagaaggctctgcaaaatctgtcaatgcaacttaggaagtgttgcaatcatccctacctattcgtagagcattataacatgtaccagcgggaggaaatagttagagcatcagggaagtttgaattgcttgatcgtctacttccaaaactgcagagagctggtcacagggttctgcttttctctcagatgacgaaactgcttgatgttttagaaatatatttgcaaatgtacaatttcaagtacatgaggcttgatggatccacgaagactgaagaacgagggaggttactggcagattttaataagaaggattcggaatatttcatgtttctcctcagcacacgtgctggaggacttgggttgaacttgcagacggcggacactgtcattatatttgatagtgactggaaccctcaaatggaccaacaagctgaagaccgtgcccatcgtatagggcagaagaatgaagtgcgtgtgtttgttcttgttagtgtcggctccattgaagaagagatcctggaccgtgcaaaacaaaagatgggtatcgatgcaaaagttatccaggctgggttgtttaacacgacctccacagcacaggacaggcgagcattgctgcaggagatactcaggagaggaacaagctcactgggaacggatatccccagtgaacgtgagataaaccgcttggctgctcgaaacgatgaagaattccggttgtttgagaagatggatgaagaaaggaggctaagggagaactacaaatctagacttatggatggaaatgaggtcccaaattgggtgtttgccaatgataatgaaaccttacgcaagaaaaccgtggcagatgaattccggaatataattgttggttcaaagagacgtagaaaggaggttgtctattcggactcttttggtgatcagtggatgaaatccgacgagggatttgaagagattgcaaagatgactccaagggtgaagcgaactgcttattcgcctgacattcaagttgagtacaatgaaaggaggaaaaggcccaagtctgtggaaaacagcgcagatggcgcaagcaacccaacacggacacccgacaaaggaagggctggagtttcatcatacagcaaggatgagaccgaagatgatggtgaagacgaagtcatcaccagtggcttacagaagggtaacagtttcacatggaagacccttggaagaaaaaggtcaagccacttaagttcgtcgtcggactcaaaagggcgaccaccattctaatgtcagttgccttgatgcttttgctcgatgaagcccttctaataatggagtacccctggaggctagcagcgctaccatttcgaaagtaccttgaacctataaacttcaggatggaggctgtagctagcaggactaccattttgaaagtacattgaagctataaacttcagaattagtaatttactctggacttgttgccatgaattcgtaactcaaacgaacttaaattgcgttacagttcaagcctattttgggggtaaaggttattggtaaatagctggtgatggcttgccctgaatttgggctgtcttgtctgcacattccgttgagcagtcttcggctaatgcctgtccagattttactggtttatatggcaagcaaaactgtactaggtgctatttgatgtgcttccaccgaggcaagtcctcaaacaagtgtcatcttttattgtgtatagctagtagagttggctctgtggaaaaaaaaaaaaaaaaaaaaaaaaaaaaaaaaaaaaaaaaaaaaaaaaaaaaaaaaat

SEQ ID NO: 3607 - DNA, 551 bp, Zea mays
  Clone ID: TF_19436653
cgttgctgtcgccgttgctgtcggcgaaagaaatgtgaaatggacggaatatgtccagaaatttccatcggcagcaaaaggaaaaagcagagaaagccaaagaagaaaaacaaacctagcaattcagaaggtggcccacttgccagggtacgatggttcagagttgtgcttgatgaagctcaaacaataaaaaattaccggactcaagtgtctagagcttgttgtggactgagggcacaaaggagatggtgcttatcaggaacacctatacaaaacaaaattgatgatctgtatagctatttctgtttcttgaagtatgaaccttactcaaaatttagtaatttcaaatatatgatcaagcaccaaattactagagattcagttcgtggctataagaaacttcaagctatcttgaggataattctactgcggcgcacaaaagaaacacttatagatggggaaccaatcttaaagctgccaccaaagacaattcagctgaataaaatagatttcacccaagaagagcgagctttctatttgacacttgaaga

SEQ ID NO: 3608 - DNA, 2234 bp, Zea mays
  Clone ID: TF_ZmC3777_1
gaacttaccaaatatgatgttgtgcttactacatattctatagtaagcatggaagtaccaaaacaatcaaatcctgatagtgatggagaagagaaagggaagcctgacccgtatggtgcacctgtgtcctcttcagggagcaaaaagagaaaggcatcctcttctaagaaaacaaaaaataaaagtgttgcagagagttgcttgcctgaaaaacctcttgcgaaagttgcttggtttagggttattcttgatgaagcacaaagcattaagaactaccgaactcaggttgccagggcttgctggggtttgcgagccaaaagaagatggtgtttgtctgggacacctatacagaatgctgttgaggatctctatagctacttcagatttctcagatacaatccttacgctgtatataagcagttttgcactctgataaagattccaatcagtaggaacccaaataacggttacaagaagcttcaagctgttttaaagccggtaatgctacgccggactaaagcaaccatgcttgatggggaaccgatcatatccttaccacccaagactgtttcacttaagacggtggacttcactagcgaggagcgtggtttttataacactttagaagttgaatcacgagaacagttcaaggaatatgcagctgctggtactgtaaagcaaaattatgtcaacattctattgatgcttttgcggctaagacaggcatgcgatcaccctcacctagttagaggctatgactcctgttctagttggatgtcttcgttggagatggtgaagaaacttcccatggaacggcagcacaaattacttatttgcttgcaatcttgttctgcgttttgtgctctatgcaatgatgcgccagaagatcctgttgtcactctatgtggtcatgttttttgcaaccagtgcatactggagcaactcactggtgacgacagtgtatgcccagtgtctaattgcagagtccgactaaacacatcctcactcttctccagaggcactcttgaatgctctctgagtaaattagcctctgatttcaagtctgatgatacatgtatggaaatgatacatgctgaaaagcgccctgggatggattcatcctacgcatcttcaaaattgagagctgcattagatattcttctctcattgcctaaaatagatcccactattgatagcaaatgttcaatcgggattgaatctgagaagtttgatggaaagggtatttcagaacaaactgacaccaagttgacagagaaggccattgttttctctcaatggactagaatgctagacttgcttgaagtccatttgaaagcttctcatgtgacatatcgaaggcttgatggaacaatgtctgttgctgcacgggataaagctgtgaacgacttcaatatggttccagaggttactgttatgatcatgtcactcaaagctgcaagtcttggcttgaatatggttgctgcctgccacgtacttatgctagatctttggtggaacccaaccaccgaggaccaagctgtggatagggcacaccgtattggtcaaaaacggcctgtcacggtatcaagattaactataaaagacaccgtggaagatcgtattcttgctctccaggagaaaaagcgggagatggttgcttctgcgtttggagaagacaaatctggttcccgacagactcgattgaccgttgaagacctgaattatctgtttatggtgtagaatcgctcctgagagtgaacagttttgctcattggattggtgttagacgtggtagataaaaatgttctctgaaaaaataacaaaatgctttcatttagggattattagttcttgtagcttgtacagttgcagagatttaggggttgctagcgacgtgtcttccaattctttttgcacgggaagcagtaagatgctgaactaggtgaattcttcagatagctgctatagtgcctgttaacttggggggtgttttctatgtactaatttctagttcctccattttattttcttttacttcctaaattgtcaaacacagatactaaaatagagataatctctcttttagtctatgtgtttagcaatttaggggctaaaagggactaaaatagagagactaaagacaccccttaatgtaatgaagataacgacaatgaagctcagatgatatatatgtacatattcttctcgtataaaaaaaaaaaaaaaaaaggggg

SEQ ID NO: 3609 - DNA, 339 bp, Zea mays
  Clone ID: TF_LIB3245-229-P1-N1-A10
ttggggtttctgaacaacaggagggggggcaggggctccattaggtttttcgcccattccttcttacgaggctcacgtctgatgtataaaagggcctacctccaaagacagaaacactccttaaagtcggaatgcctcagatgcaaaagcagcactatcgtgctctgcttcagaaggattcggaggttattaatgctggtggtgaacgcacgcgattgcttaacattgccatgcatttgctcaagtgctgaaaccattcatatttattccaaggagctgaacctgggccaccctacacaactggtgaacatttaatcgagaatgcaggacaaatggtct

SEQ ID NO: 3610 - DNA, 2182 bp, Zea mays
  Clone ID: TF_ZmC10254_1
cggacgcgtgggcggacgcgtgggcggacgcgtgggcaaaaactcttaatccgtgttggagtgcctacaatattgcagacaggagagctcctccagtctatgttaatctttttactggtcaagcaacaacacaatttccaagtatgactgagactgtaagaggagggatactagcagacgcaatgggtcttggcaaaactgtgatgaccattgctctgatactttccaatcctaggggggagttctctaactgtataaaaggagacacaaggtatctaggagatcgtgcgaccagaggatacacttcaacatcctctgttagaggaggtacccttgttgtttgccctatgtcattattgggccaatggaaggatgagttggaggcacattcggcacaaggagctctttctgtgtttgtgcattatgctggtgataaaactagtagcctcatgctgatggctcaacatgatgtcgttttaacaacctatggtgtcctctcagctgcatgcaaaacggaatgcaacagcatttttcacaggatggattggtataggattgtgcttgatgaagctcacacaatcaaatctcctaaaactaaaagtgcccaagcagcttatagattaaagtcggaatgcagatggtgccttacaggcacaccattgcaaaataatttggaggacctctacagtcttctctgcttcctacatgttgagccatggtgcaatgcaaaatggtggcagaggcttattcagaaaccttatgagaatggtgatgatagagggttgaaacttgttagagctattcttaggccactaatgctaaggaggaccaaggaaacaaaagacaagattggaaatcccatactggttctacctccagctcgtattgaagttgtagaatgcgaacaaactgaccatgaacgtgatttctatgaagcacttttcaggagatcaaaggttcaatttgacaaatttgtagcacaaggcagtgttctgaacaattacgctaatattctcgagctacttctccggctaagacaatgctgcgatcacccttttctggttatcagccgagctgaccctaaaaagtatgctgacctcaaccagcttgcacagcaattccttgaaggggtgcagcagagttcgtctggaagacagaacgtagtgccttcactggcttatgtagaaggggtcgtcgaggaaattcgccagggtgccactatggagtgccctatctgtctcgagtcagcttcagatgatccagtgcacgaggcttgcgcacaccggatgtgtggcgaatgccttgtttctagctggaggactccagaaggagggccatgcccactctgtagacgtcacatcagcaagtctgacctgatcatactgcctgctcagagtcgtttccaggtggatgccaagaacaactggaaggactcgtgcaaagtgaaaacgctcgtaacgatgctggagagccttcagaggaagcaggagaagagcatcgtgttcagccagtttacttccttcttcgatcttctggagatccgcttcacccagaagggtatcaagttcttgaggtttgatggcaagctgagccagaagcacaaagagaaagttctgaaggagttcagtgagagccaggacaagctggtgctaatgatgtcgctcaaggctggaggtgtagggctaaatctaactgctgcctccaacgtttttatgatggatccgtggtggaatccggctgtggaagagcaggctatcatgagaattcaccgcattgggcagaaaagagaggtccgagtccgacgcttcatcgtcaagggtactgtcgaggagcggatgcagcaggtccagatgcgcaagcagaggatggtttctggggcgctcaccgacgaggagattcgtggcgctcgcattgagcatctcaagatgttgtttaaataaatgatcattgccgatgtgtatagctgacgctacgccgttgatactttggtagtgtcaagtaggttgttgagggcatgtttggtaggagtaagatctgggtttagaccattgtagatggggatggccggatgggagtgggtggaaccttgcccttccgatatgacggtcttcctttctaacgtgaatcatactgagaatgagcattttggaaaacatgactacgataaatcacttttctcttg

SEQ ID NO: 3611 - DNA, 2630 bp, Zea mays
  Clone ID: TF_ZmC13100_1
ttgattgcaagaaaatggcattggcttggatggtttcaaaggagaatagctcacattgtgctggcggaattcttgccgatgatcagggccttgggaagacagtgtctactattgcccttatacaaaaacagaggatggaacagtcgaaatttatgtttgttgattcagatcgtttgaaatctgaagcactaaaccttgatgaagatgatgagggagaacaaactgttagcaatgaacctaaaaaggaccaaggcgcttgttcattgtcaacatctgctggtactagtgctgaactttttgttaatcaaccgaataatgttgtgaataaaatggttgaaaccaaagcagaacgcaagaaaaaagctaaagtttccacatcatctgcatccacctcacgttccatgacaaggccagctgcaggtactctagtagtgtgccctgctagtgttcttaagcagtggtctaacgaattaactgacaaggttagcgaaagtgctaaattatctgttttagtctaccatggtggtgcaaggaccaaagatccacgtgagctggcaaaatacgatgtagttgtcactacatatacaattgtggccaatgaagtacctaaacagatggctgatgatgacgcagatcaaaagaacagtgaagaaccctctgctagcaataaaagaaagccatcggcgaatatgcaaaccaaggctaagaaaaagaagaagaaacttaaggactcaaactttgaccttgacagtggtccaattgcaagagtgcgatggtttggggttgtgcttgatgaagctcagtcaataaaaaacttccgaactgtagtggccagagcctgttgtgggctaagagcaaagcggagatggtgcttatcaggaacacctatacaaaatgcaattgatgatctgtttagctatttccgttttttgaaatatgatccgtattgcacgtataactcgttttgcacaatgattaagcacccaattgctagagatgcaattaatggatacaagaaacttcaggctgtgctgaaggtagttctcctgcgtcgtacgaaagaaactgtgatcaatggcaaaccaataataaatttacctcctaagacaattaatctgaataaagtagatttcacacaagaggagcggtcgttttatttgatgctggaagaacgctctcggcaacaattcaaggcatttgctgcggctgggacactcaaacaaaactatgccaacatccttttaatgttgctgcgacttcggcaagcctgtgatcatcctattcttgtaaagggcaatcagtcagaatatggaggtgatggttctatagaaatggcaaagaaacttcctaaggaagtggtgatagatttgcttgcaaaactggaagtggggtcaacactttgtggcttatgcaatgatacacctgaggatgctattgtgacaatttgtggtcatgttttctgctatcaatgtatacatgaacgaataacgactgatgagaatatgtgccctgcccctaattgcagtagaacattaggtcttgaattgttattttcgtcaggagctttaaagatttgcatctctggcaaatccagttctgcagtagctagttcatcatcagataacgagtcatcttcaatcagtcaaagcagctttgtctcatccaagatacaagcagccattgatatactgaattcaatcattgtcatggatcctcttactgaaagttatacaatggaatcaagcagaagtggactaggccctgtgaaagccattgtcttttcccaatggactggcatgctggatttgctggagctttcactgaatatcaactgtatacagtacaggagactagatggaacaatgtctctcaatttaagagaaaaaaatgtgaaggattttaacactgacccagaggttagagttatgattatgtcactgaaagctggtaatcttggtctcaacatggtttctgcttgccatgtaattctccttgatctctggtggaacccttatgctgaggaccaggcagttgatagggcacacaggattgggcagactaggcctgttactgtatctcgcttgacggttaaagacactgtggaagatcgtattttagctctgcaggaggaaaagagaaccatggtgaactctgctttcggtgatgacaaagccggcggccatgcgacccggctcaccgtggaagacctgcggtacctatttaggatatgattgcgagggaactctctcaatgcctcggtcaacttgtcaggtcatgatgcgttgtaccttgtaatcgtagtccggcaaaagggcggtgtaccattgcgagggtaggctcattggtccatgtccgccacgccttgctgcagctccagttttgtggtgctcagatttctagatgggtaatctagggctagatagcatgtgtaattataaccccccaaccccccctccccggggcatggaggagagttccgcagtgccaatgctttatgatttagtgtatgtatatacatgatcaccatgtctaacttgcaatgagttgttttagctcgagatgtgagactgatactgccagcggctcagcattttgtaccttctgtgttatgtccatttgcccgtcatcag

SEQ ID NO: 3612 - DNA, 810 bp, Zea mays
  Clone ID: TF_ZmC31890_1
ccttcccaagttatgggattgccttactgagttccttagacctgtaaaaacagaagatggtattccggaagatgatgcaagtattgcacagctgggcagatcgtatgaggataaggacccacagtcactcattaataatatccaggtcgttcgttccatttcacctcacttggctgagcccttaaggcctcaactgctaaatctccttccctctattcttgggtgtgttcgtcatcctcatgtggctgttagactagctgctgcaagatgcatcacatctatggcaaagtcattgaccgatgatgtgatggtactggtgatagaaaatgtcatcccaatgttgtccgatttatcttctgtctgtgcaagacaaggagctgggattctgttaagccttcttgttcagggtttggctgtggagttggttccttatgctcctttccttgtcgttcctcttctgaagtgtatgagtgacccagatggttctgttaggcagactgtgactcacagttttgctgctcttgttcctttgctgccattatcaaggggtgcttctttaccatgtggactaagtgaacgcttatctagcagtgctgaagatgtgcaatttctggaacagctccttgacaatacccaaattgatgatttcaagcttaatattgatcttaatgttgaactacgaaggtatcagcaagaagggattaactggcttgcattcctccgtcggtttaagttacatggaattttatgtgatgacatggggctcggtaagacgctccaagcatctgctattgtagcaagtgacattgc

SEQ ID NO: 3613 - DNA, 3812 bp, Zea mays
  Clone ID: TF_ZmC14226_1
gaaaaatcccctccgcctctcgagtgtttatcgcgtaattgccgcatccctcgacactcgagacgactcgaaatccaaagcgccccgccccgacccgaaccctaatcctgcatttcctctcccgccaccgcccgccccaatggcgaagccggtgaagtatgacgacgaggaggagatctcctcctcctccgccgaggaggaggatgaccagtccgccgccgccgcctccggatctggtgaggaaggggatgacgatgaggaggatgctgcggcgctgcccacggaggaggaggaagctgagggcgaggggcagcaagaggaggaggtcgacgaggaagagatcgaagccgtcactaccggcgctggagctgaggacggagaggacgccagtgccgctaccgccgctgaaggcgaagaggagtcccagtccaccgaggacgacgaatccgtcgcaaaggacaaggccatcggcgccgagactgatgcagtggttgggaagcgtgagaagacaaggctaaaagaaatccagaagttgacgcagcataaaatccgagaaaaattggatactcaaaaggctgccattgatgctgacatgaactataaagggaatggacgattgaaataccttcttcagcacaaagaagaattagctcactttgcaagtgcaagtcggacgaattatgtttatcctccttcatggatcaagggaaagacgcatgattctgaagaagaggaagacgaagaatacctcaaagaggaagaagatgcccttgctggtgcagggggtacacgtttagtttcacagccttcatgcatcaagggaaagatgcgtgattaccagttggctggacttaattggcttatacgattgtatgagaatggtatcaatgggatattagctgatgagatgggtcttgggaaaacacttcaaactatttcattgctgggctatctgcatgagttcagaggtatagctggtcctcacatggttgttgcgccaaagtccactcttggcaactggatgaaggaaatccaacgtttttgccctatcttacgtgccgtgaagtttttggggaacccagaagagcggaaccatataagggacaatttgctacaacctgggaaatttgatgtgtgtgtgactagttttgaaatggcaatcaaagaaaaatctgcgttgaggcgcttcagctggcgctacataatcattgatgaagctcaccggataaaaaatgaaaattctcttctatcaaagactatgaggatttacaacactaattatcgtctcctcatcacaggcactccactccagaataatctccatgagctctgggctctcctcaatttcttgctacctgaaatatttagctctgcggagacctttgatgaatggtttcaaatatctggggaaaatgatcaacaggaggtggtgcagcagcttcataaggttcttcgcccattccttcttaggaggctcaagtctgatgtagaaaagggcctacctccaaagaaagaaacaattcttaaagttggaatgtctcagatgcaaaagcagtactatcgtgctctgcttcagaaggatttggaggttattaatgctggtggtgaacgcaagcgattgcttaacattgccatgcagttgcgcaagtgctgcaaccatccatatttattccaaggagctgaacctgggccaccctacacaactggtgaacatctaattgagaatgcaggaaaaatggttctactagataaattgctgcccaagctaaaggagcgtgattccagagtccttattttttcacagatgaccaggcttttggatatcttggaagattatcttatgtataggggatatcagtattgtcgaattgacggaaatacaggtggagaagatcgtgatgcatccattgaagccttcaatagtccaggaagtgagaagtttgttttcttactttcaactagggcaggtggccttggtatcaacttggccactgctgatgttgtggttctctatgacagcgattggaatccccaagctgatctgcaagctcaggaccgtgcacatagaataggtcaaaagaaagaagttcaagtgttccgcttttgcactgagtacactattgaggaaaaggtgattgagagagcatataagaagctagcattggatgctttggttattcagcaaggacgattggcagagcagaaaactgtcaataaggatgaccttctgcaaatggtgcggtttggtgctgaaatggttttcagttctaaggacagcacaataactgatgaggacattgaccgtattatagctaaaggagaggagacaacagctgaacttgatgcaaaaatgaaaaagttcacagaggacgccattaaatttaagatggatgataatgccgaactgtatgattttgatgatgagaaggatgaaaacaaggttgatttcaagaaacttgttagtgataactggatcgagccacctagaagagaaaggaagagaaactactctgagtctgattactttaagcaagcacttcgccaaggtgcaccagcaaagcctagggaaccaaggattccaagaatgccgcacttacatgatttccagtttttcaataaccaaaggctaaatgaattgtatgaaaaggaagtgcggtaccttatgcaagcgaaccagaagaaagataccattgatggtgaagacgaagatcagttggagcctttgacagcagaggagcaggaagagaaggaacaattattagaggagggttttgcgtcatggacaaggagagacttcaacacatttattcgtgcatgtgagaaatatggtcgcaatgatattaaaagtatatcatctgaaatggagggtaagacagaagaggaagttcaacgttatgctagagttttcaaggagagatacaaggaactgagtgattatgatagaattataaaaaatattgaaaggggggaagcaaggatatcccgcaaggatgagattatgaaggctattgggaagaagctagaccgctacaagaacccatggttagagttgaaaattcagtacggccaaaataaagggaagttctataacgaggaatgtgaccgctttatgctttgcatggtgcacaaacttggatatggaaactgggatgaactgaaagctgccttccgtatgtctcccttgtttcgatttgattggtttgtgaagtccagaactacccaagagttggctaggcggtgtgatacccttatccgactggttgagaaagaaaatcaagaatatgatgagcaagagaggcaagcaaggaaggagaaaaggcttgctaagaacatgactccaacaaagcgagctgcactaaagaattcagagggtgagaatactccaccgagttcattcaagagacgacggcagtcccttatggacgactatgtgggctcgggaaagcgtaagagaggctgaccacgtttggcatcctcccttagacatgccgtctctacaatgattttaataccctgccgcgcagtagtgcttagttcctcttgcacgtgagtcgaatacctcaagggcatgtgactagcgtaatttatgcaatgatgacataggttagttattaatcctaaatgaagcatgtatgcgcatgctgtgttagtgtcgtagatctggactttgcaattgcaactgttgctgcccagctgacacagatccctttcgctgcaatcttccggtcctgcattttgcccgcaactgattttgcaaccaaggctaaacccaacgcgggcagtagtaactgttgcactcaggatccccgtcc

SEQ ID NO: 3614 - DNA, 334 bp, Zea mays
  Clone ID: TF_ZmC980466_1
cccacgcgtccgaggaggttcctcgctcagtacctggattaactgtggaggttcacaaattggatccgctagttcagcgtgctttagctgctgctttacgatccaaagatcttcgaggtttgtatgacaggattccccctcatctcgagtcaaagcttatgccatttcagcgtgaaggcatcaggtttgttttacagcatggtggcagagccctgattgcagatgaaatgggtcttggaaagacactacaggcaattgctgttgcttcgtgccttcgtgatgcctggccagtcccttgaatctctccatcttctttgcgattacattgggcatc

SEQ ID NO: 3615 - DNA, 2998 bp, Zea mays
  Clone ID: TF_ZmC30001_1
tcggccgggagtcccattccacaccgttggtggctcggaaccgccactgaccacttccctgaccccgcgctctctccctctactacagtcggagggcggcggcggtggcgaaccgacggcgtatgtaaggaatccaactgaacatttgacttgcttgttccgggagatctcttgcctaggtgtgaggaattgagttgtcacagaacagttggctgctcacaatggggacactttcaatgtccgacgccagccctatccctgccaagaactgggatgcttcccctgtcaagctcgaggctcaaggtggtgacaccatcctcggcatgaaggaggaagagcgactactggagctcgtgaaggatgagcaggctgatggaatcttggattcattaccaattgacctggaggccaagaatggcgatgcatcactcattactgaagcgatgaaaaaggaggaggagcagcttgaagacacccggatcaaggtgcaggaagaagaggaagccaggaagagggaagaggctgctagacttgcttttgatcctgagacacagtataacaagttagatgagctgctgacaaagacacaactcttttcggagtttctacttgagaacatggatcggattgccgatgaaagtgttgaaactcaagctgaacagccacaggtagaagagaagaagaaagggcgcggccggaagaggaaagcaaagccacagtacaatgataagaaggctaagacggcagtggctgccatgctcacaagatctcgcgaagaacgtcttgcggaagattctactctctcagaagaagaaaggtgggaaaaggagcaggctaatcttgtgccgttattgactggtggaaagttgaagtcatatcagataaagggtgtcaagtggcttatatcattgtggcagaatgggctgaatggaatactggctgatcaaatgggccttgggaaaaccatccagacaattggatttcttgctcatctgaaagggaaaggcatgcatggtccatacttaataatcgctcctctgtccactctctcaaactgggtgaatgaaatctcaaggtttactccatctctggttagtatcatataccatggaggtaaggctgcccgggcagagatccgaaggaaatttatgcccacaaatgttggccctgattttccgatagtagtgacttcatatgagatggccatgtttgatgctaaatttcttgctgcctataagtggaagtatgttgttgtggatgaggggcatcgtctgaaaaatgctaagtgtctattattgaagcagctgaagcgcataccaatggataataagctccttttgactggaacacccttgcagaataatcttgcagagctctggtcactattgaacttcattttgcctgatatattctcgtcacatcaagagtttgagtcatggtttgatttttctggtggaaatgaagaaactgatgagaagaaaaggctgcatgttgtttcaaagcttcacgctatcttgcgtccattccttctaaggcgtatgaaggaggatgtggaacagatgcttccacgaaagaaagagataatcatatatgccaacatgactgagcaacagaagcaaatccagcatcacctgatcgaaaaaacatttgacaactacttgcacgaggaatcagatattatattgaaaagacctggcattagggcaaggttgcataatctaatgattcagctgaggaagaattgcaaccatcctgatcttttggaatctccagttgattcaactggtttatatccacctgttgagaagctcctggaacagtgtggtaaattccaactttttgacaggttgctaaatttcctgatggcgcaaaagcacaaggttcttgtattctcgcagtggacaaaagtgctggacattattgaatactaccttgattcaaaaggccatgctgtttgccgaatcgatggtaatgtgaaactggaagaaaggaggaggcagatagcagaattcaatgacgtgaatagcagcatgcgtatcttcctcctgagcacaagggctggtgggcttggcatcaaccttactgctgctgacacctgtatcctctacgacagcgactggaaccctcagatggatttgcaggccatggaccgatgccaccggatcggccaaacacgcccagtgcatgtgtataggctggctacgtcacactccgttgaggggcggatgatcaagagagcctttgggaagctgaagctggagcacgtggtgatcggcaagggacagttcgagcaagacagagctaagccgagcgccttagatgaaggtgagctgctggcgcttctcaaggacgagcagaccgaggaggacaggatcgtccagaccgacatcagcgacgaggacctccagaggctgatggaccggagcgacctgatgggcccgccgcctggcgacgcgcaaacgcgcgtcgcctcttgtaccgctgaaaggtccgggctgggaggtggtggtgccggccaagagtggcggcggcatgctgtcgtcgctcaccagctgagccgtcgtggctgcggggatctgttgtgcttttggttggtcgcacgcactcagttttggtttggccccccactggtgctggtggttttggtggcagctgttgcgctgctcaggcgatggctgttgaactggggcgttgcccctgcagaagtagctttttagtttaggatcagcaacaaaacaagcaggaggactctaggccatgtgtggtcgagtctccgtacggtggtcgttgcgttagattacgtgggtgggtgatgggacggttggttgaaccagacccgacggcagcatggacacacgccggttgctttgtaaagttagtatcgcgtcgtccgtgatacaatgcggtcctccgtctacatgggtgctgacgctctcttgttcggctgtcttgtgatgttgcaaacgcccgtgccgtgacaaaagccggttccttcccg

SEQ ID NO: 3616 - DNA, 1815 bp, Zea mays
  Clone ID: TF_ZmC12070_2
gccacaagtttatctgtttttgattaaaagaattggtacatcagttctaacaggcacaacagcagtcgatctacacaccgccgaccccgtccgtactggtgatatggcagcgtcagggttccaacttccaacaagtcagtgctcctagtcctagcatagcctgccctccctactcatgcttaactacgtcagcatttagatctggaatagaaacttgaggtccgcctctgtaagcttcgacatggcatacgacgagtcccccacggtgccttcaaacaccagctccttcttctgttgcagttgcagtatgcgctcttcaaccgtgtcctttatcacaaacctagtgctcttgattggcttgaactgcccaattcggtggatacgatcctgcgcttggttctcgaccgctggattccaccaagggtccatcaggaacacatgagatgctacagtgagattcttagcgactcctccagcttttaagctcatcaggaagaccctgcagtctgcatcatgggtgaaggtgtctatggctcttcccttttcggtgatgttcatggctccattcagctggacacacttaatgccggacctctccaaggaaaactgaatcaaatccaagaatgatgtgaactggctgaagacaatccctttggcagaaccatcgtgctcaatcatgtttcttatctcctccctcaaggcatcaatttttgtactcgtcttaaaatccacaaggcttggtagtctgctcaatattcctgaacatttgcgacccttgacactccgagttacttttccaactgaattttgtgctgttaagtccacggtgagaggtattgaacaggatggacatgaaacattccccaaagctgcagagtagtctatcaaacaagtcttgcagaatgcatgatcacaagaggtaaccacaacatcttcagccaaattatgacatataccacattggctctccatggactcgtttccttcattcttcattccttcaggatgtcctgctgttttagaatatgctacaagatagggatgatcgacagcctgtctcaaccttgtgagaagatcgaagatatgagcgtagttattcatcagtgttccagcatctacatatgcatcaaatgtgtgacactctgagtgtacaaagcttcatagaattccatttcgcttttatcaaaagagtcccgcctcaatgtcacctatcatgtaaaaactaactgcctcaaaatgtttgcaaatgaggaaagaaagggtattactctgtatttggccagacgaggaaggccgaaattgaggtggtcgagtgctggcaatagcttgtctcatacggatggtgtgcgcccctggatatcccttctgttcatctcctgtcacagaaccactgggagcagtctgctgaccagaaacttgacctgataaagaatagttgcttgggtttgtctgagggcttcgttatgcctgcatttgatattgtgaagcagcttgcttaagcaatttatcaccaacaatattccttacagtttttaagaagtattccttgctgacttcatttttcatcgaaggtctaacacttccaaaatagcttcatcagccttctgatcctttgaataagatcctgattatccacagtaacaactaacaagaaacaacagcagcaatagccacggcactcatttccttctcaggcctatgctctttttcttctgagtgattgcaaatcgtctcgacatcgcaacattgtaaaatttcctcatatgctctgacaaccgatgtatcgcaccaaggttgcctacagctgataacctc

SEQ ID NO: 3617 - DNA, 3767 bp, Zea mays
  Clone ID: TF_ZmC5477_1
gactgaggggggtgttattcatataattatcagcagaaaaaagcattgtattgcataaacgatagacccaacccagagatgcaacaaaacgcgcagacttgattgatgctagtcacaacccagtgactaaagctattagtggtgtatagcaacaacttcaaaacactttacttttgccgagcgcagactctccatgccttggatcaggcatccaaagaaatcactttagtgcccccctccttaagccccttttcaggagaagtcagtttttcggacagctcatttatctgcctacttatcttcttaccaccatctggcagcctcgacaacagcacaccgttggaaaggcaaaaaaaaaaaaaaaaaaaaaaaaaaaaaaaaaaaaaaaaaaaaaaaaaaaaaaaaaaaaaaaaaaaaaaaagtgcccgcggtgctagtgacggttgctctagatccgttcatcctgggggttttgtgaggtcgaaagcggcgagcgaattaaaaaatgctggacaagctgtgggacgacgtggtggccgggcctcgcccggagacgggcctcgagaagctccgcaaggccaccaccgcccgcccgctcgtcatcaacaaaaacgcggacggcgagctacaagcgggcgcgtcaacgcctccccgccaccgcacccctcctggacgtcgccggccgcattaacaccaagaacagaagagaggaagagacaccgcaaccgcattaccatgagagagagctaggggggcctggcctgctgcggcgcagcggccacgtccctccctccccagctctcctctcctcctccagtactccacaccgcacccctcctggacgtcgccggccgcattaacaccaagaacagaagagaggaagagacaccgcaaccgcattaccatgagagagagctaggggggcctggcctgctgcccctgcatcgtctgaccctgaagatggcggcagcagcatccatggcggcccgtagccgcgcgctcgttgcgagcaggaggaggatgggtggcccgccgcgtctcttggtcgtcagctgcgacgccaggacagcggatgcctactgctccctggccgcaaagattttgggacctcccacgaccttcaatgcagcgaagctcaaggtggagttcgccggggaggagctccggcctcctttccccagagcctacactctgacccactgcgacttgacggcgaacctgacgctgggcgtgatgagtagcgagcagctgcgcaagtcgacgctgcagagggacgacgtggtggcagagtggaaggaaaccgccggggagatgacgctgcaggtgcattgcttcgtcagcggcgccaacctcctgcaggagctggccgcaggtttcagatactacgtcttctccaaggagctaccgctggtcctcaaggcggtggttcatggcgacgccgctctgttcgccgacaggccggagctgatggaggccaaggtgtgggtgcacttccactccagctctcgcaagtacaaccggttagagtgctggggcccgctctgggaggctgccacaactaccaggaggaaccaccacctgctggagctggaccaactgcagagcgccatcaccaagaagaagactatctttaacgccctgctcgcccttctcctctgattttgattcagccgcctatacaatgaacggacggactatagagtgatcaagcaaacccaccaagcattctgcatctctgtctgactgtaatggttgctgctttgtctggggattatattattcatataatcatcatcagaaaaagcattgtattgcataaacgatagacccagcccagagatgcagcaaaaagagcagacttgattgatgctagtcacaacccagtgactaaagctattcaaaacactttacttttgccgagcacagactctccatgtcttggatcagtcatccaaggaaatcacttcagtgcccccctccttcagccccttctcagcagaagtcagcttctcgtccagctcatttatctgcctccttatcttctcaccaccatctggtagcttcgacaacagcacagcgttggagagggtctgtgaaagccggttgattcttgcctttatctcttcaggactctctgcgcttctgttacttggaatgtagtttcgaacagtgaaactttcatcctttggcttcagcgcaaaagatgccccgttggcgacatagtcagatgaggatcccttgtaatattgctggggcatcatgggcatgccccgaggtttgctgtccagtgcatcattctcactcagagtgggcagggttgcagttttagagaataggaggctgtgatgactcacaccggctattccttgttgctccagaaactgtatatgcttcctcaaggactcatccagaacaacttgttgaccatgctcttcttgcaactgcttatgtgtgagggaaacatcaaatccttgttgtggcaaactaaatagctcttgaatctcactcttgctgaagtaacgtgtttgctctttttgctccgtagctgtcctgaacagagcgcccttcaaaacctgcaatttgtatatcttttcttcaatggtcgcagatgtcatcaagcggtatacaatcacatttttagtctgtccaattcggtaagcacgatcaacactttgattgtctgtactagggttccatgcaggatcaactacaatgacacgagttgccttggtgagtgtaagtccaagcccaccaacttgtgtggttagcagaaaaactggagctccacaaccctcttggaagtccttcacaatcctttcccggtcagaaaccttggtggtgccatcaatgcgcaaaaacgcatagccctctaatattatagcttcctgaataaggtttagcattttacgagtctgtgaaaatattaaaacatgatgcccctctccaacaaggttccgcaacaaggacatgatgaatgatagcttgcatgagacatcctgaccaacttccagtgcattatcatcatgagccatatctgcaaggttcatggccattttttccaccattccaatgtcttgatcattcaacatttcacccattccttccaacacaccctcagcacctttcttagttaatagcagtggatgatcacatattttcttcaatattgtgattgcagccaacggtgatgcctttggctgcaatgctaaatgaaccagctcactatttagaaaagcttcatatagtttcctctggcatggtgttaacttcagccagacaattagctcattcttcttggctaatgttttttcttctgatgcaccagtatcaaagacaacttcacttttcaggcgccgcaaaaagtatggcttgattcgctctcttagttcctttgctacatttgagcctacgtgcttctctcgagcggtagcatttttgtcatttcctcgaaggatagccgtttcataccttattttgaactgctgtttatcacccaagacatctgggcaacagaaattgaacagagtccacatttccttcaagttattttgaataggtgttccactgatcacaatgcgatgggcacaaggtatttcgtacaaactttgggccctttgtgtcttattattttttattagatgtccctcatcaagaattacgtaattccacaaagttccttcctcatcatcatcatcattgctgttgttgtaggagttgcctcttatgagcttgtagttgttcctgacaatgtcataggtggttatgag

SEQ ID NO: 3618 - DNA, 2219 bp, Zea mays
  Clone ID: TF_ZmC2934_3
ggacatcgtctgaaaaatcatgaatgtgctcttgctcgcacactagtttcaggatatcagatccgccgcagactacttttaactggcactccaatccaaaatagcctacaagaactgtggtctttgcttaactttattctgcccaatatttttaattcatctcagaattttgaggaatggtttaatgcaccatttgcatgtgatgttagtcttaatgatgaggaacagctattaatcatacatcgtctgcatcaagttttgcgtccatttttgctgaggaggaaaaaagatgaagtggaaaaatatctccctgtcaaaacacaagtaattctcaagtgtgatatgtctgcttggcaaaaagcatactatgaacaagtcacaagcagggaaaaggttgcactaggatttgggctcagatcaaaggctctgcagaatctgtcaatgcaacttaggaaatgttgcaaccacccctatctatttgtagagcactacaacatgtaccagcgggaggaaattgttagagcatcagggaagtttgaattgcttgatcgtctacttccaaaactgcagagagctggtcacagggttctgcttttctctcagatgacgaaactgcttgatgttttagaaatatatttgcaaatgtacaatttcaagtacatgaggcttgatggatccacgaagactgaagaacgagggaggttactggcagattttaataagaaggattcggaatatttcatgtttctcctcagcacacgtgctggaggacttgggttgaacttgcagacggcggacactgtcattatatttgatagtgactggaaccctcaaatggaccaacaagctgaagaccgtgcccatcgtatagggcagaagaatgaagtgcgtgtgtttgttcttgttagtgtcggctccattgaagaagagatcctggaccgtgcaaaacaaaagatgggtatcgatgcaaaagttatccaggctgggttgtttaacacaacttccacagcacaggacagacgagcattgctgcaggagatccttaggagggggacaagctcgctgggaacagatatccccagtgagcgcgagataaatcgtttggctgcacgaactgatgaagaattctggttgtttgagaagatggatgaagaaaggaggcttagagaaaactacaaatctagacttatggatgggaatgaggttccagattgggtattcgccaacaatgatttacccaagagaaccgtggcagatgagttccagaatataatggtcggtgcgaagcgacgtagaaaggaggttgtctattcagactctttcggtgatcagtggatgaaatccgatgagggatttgaagacattccaaaggcgactcagaggtcgaagaagactgcttactcatctgacatccaagttgagtttagtgaaaggaggaaaagacctaggtctgtagaaaacagcgcagacggtgtgagcaacccgacgtggacgcctgacaaaggaagggctggagtttcatcatacagcaaggacgagactgaagatgatggcgaagacgaagtcattactagcggcttacaaaagggaaacagtttcacatggaataccctaggaagaagaaggtcaagccacttcagttcgtcatcggactcgagagggcgcccaacattctaatggcaacatacatgaatgttatggcctcgacctgttggttgatggaatacccttgtagagcagggctgcgactatgactgagtaccttcaagcttatgaactttattaggattactagtatactgtatggacttgttggcatgaatttgtaactcctttaaatattaattgtttaaacaactggtggtgtttgctatcataccgcgccaacatgtttttatttttttgctaatcaaagtttttgtggccaggttttattggtgtcgggttgcattgcaatggctgttcatccggttagcagtcttcggctaatgcctgtccagattttactggtttatatggcaagcaaaactggactaggtgctatctgatgtgcttcccccaaggcaagtcctcaaacaagggtcatcttttattgtgtaaagctagtaaagttggctctgtgtatctatatgcccttacatagcctgatagccccccgataaatacgtaaaaatagctttgtgcaaaaataatttctttttgagttttcccctttaatt

SEQ ID NO: 3619 - DNA, 2099 bp, Zea mays
  Clone ID: TF_ZmC26704_1
gggggctcggtaagacgctccaagcatctgctattgtagcaagtgacattgcagaagcacgtgcacggaatgatgaaaaaattctgacatctttgattatctgcccttctacattagtggcccactgggaatatgaaatagagaagtacatagacagctctatcttgaaacctcttcagtacgttggttcttctcaggacagagtgacactccgtagtcagtttgataaggttaatgttatcataacatcatatgatattatacggaaggatattgattttcttggaaatatcacttggaactattgtgttctggatgaagggcatataataaaaaactcaaggtctaaaataacgtttgctgtgaaacagctgaaagcgcaacaccgtcttatcttgagtggcacacctattcagaataatgtgttggagttatggtctttatttgacttccttatgcctgggtttcttggaacagaaaaacaattccaagctgcatatggaaaacccttgctagctgccaaagattctaaatgttcagcaaaggatgctgaagctggtattcttgcaatggaggcactgcataagcaggtcatgccgtttctactgagaagaacaaaggatgaagttttatctgatcttccagagaagataatccaggatagatattgtgatctcagtctattgcagctcaaactttatgacaaattttccagctccaatgcaaaagacgagatttcaactatagtaaaagcaaatgaactggaggaatctgcacctcaaccaaaggcaactcggcatgtgtttcaggcattgcagtacctattaaaactatgcagccatcccttgcttgtaactggggagaaccccccaaatcatcttgtggatcttctgaatgaaataggtctgggatctggcagtgagcttcatgagcttcaccactcacctaagcttgttgctcttcaagaaatacttcaagaatgtggtatagggtcagaaatatctagtcctgatgcttctacagctgttgggcaacacagagttttgatttttgctcagcataaggcttttcttgacatcatagagaaggacctgtttcaatctcatatgagaagtgtcacatatttgcggctggatggctctgttgatccagagaagagatttgaaatcgttaaagcattcaattcagacccaaccattgatgtacttctgctaacaacccatgtcggtgggcttggcttgaacttgacatctgccgacacattggtgttcgtggaacatgattggaacccaatgaaggaccttcaggctatggacagagcacatcgattgggtcaaaggaaagtggtgaatgttcaccgtctcatcatgcgtggcacccttgaggagaaggtgatgtctctccagaggttcaaggtgtcagtcgccaatgctgtcatcaatgctgagaactcgagcttgaagaccatgaacactgaccagctgcttgatctgttcacatcaacccctgcttcaagaaaagcaagcgacgagcagagtaagaggaaatctggtggcaaaggcttgaagtccattcttaatggtctggatgagctttgggatcagtcgcagtatgccgatgagtatgatctgaaccagttcctggcgaagctgaacggctgagccaccaccggctggctcgtgtacagtgtataaagcaatttggggcaggttaattttgttgttgctgttgtttgatagaggaaggaaaagattagatgctaacagatataggtggtggttggggttacgatctcaatttttttggtttccatcttcctcaatttttgttttgaggagttgtatatactctgctcacctataatcaaagctgcagctcttatcagaaaaaaaaaaaaaaaaaaaaaaaaaaaaaaaaaaaaaaaaaaaaaaaaaaaaaaaaaaaaaaaaaaaaaaaaaaaaaaaaaaaaaaaaaaaaaaaaaaaaaaaaaaaaaaaaaaaaaaaaaggaaaaaaaaaaaaaaaaaaagggccctttttaaaaaaacaaatttttacccccggggttgggaaaataattttttttttttggggcccccaa

SEQ ID NO: 3620 - DNA, 2366 bp, Zea mays
  Clone ID: TF_ZmC2934_2
ttctgctaaggctgcatatgatgggttgttcatcggggctgtgcatttcggtcactatgaaagagttcggaaaacttgggccccctctaaatgccacttcttcctctggttatcggtgctaaataaatgctggacagcagataggttggcaaagagaggacttgatcatccggagaagtgtccgctttgtgaccaagagtctgaatctttggatcatattttggtttcttgtgtttttgcgagagaattctggttccggctgatgtgcattttcagactacaaaatctggctcctacacctagtacggtgtcttttacgggttggtgggagatgatagacaatggctctggagatatgattatgaagggtgtcaactcccttattgccttgggagcctggattatttggaatcatcggaaccgaattgtctttgatggaatctcccctagtgtttctgcagctctttgtcaggcaagggaggaacaacagttgtgggaaatgatacatgatccgccggtcactacttttaacaggcactcctatccaaaacagcctgcaagagctctggtctttgcttaacttcatcctgcccaatatttttaattcatcccagaattttgaggaatggtttaatgcaccatttgcatgtgatgtcagtcttaatgatgaggaacaactactaatcatacatcgtttgcatcaagttttgcgtccatttttgctgaggaggaagaaagatgaagtagagaaatatctccctgtgaaaacacaagtaattctcaagtgtgacatgtctgcttggcaaaaagcgtactacgaacaagtcacaagcagggaaaaggttgcgctaggatatgggatcagaaagaaggctctgcaaaatctgtcaatgcaacttaggaagtgttgcaatcatccctacctattcgtagagcattataacatgtaccagcgggaggaaatagttagagcatccggaaagtttgaattgcttgatcgtctacttccgaaattgcagagagctggtcacagggttttacttttctctcagatgacaaaattgcttgacattttagaagtatatttgcagatgtacaatttcaagtacatgaggcttgatggatccacaaagactgaagaacgtgggaggttactggcagattttaataagaagaattcagaatatttcatgtttctcctcagcacacgagccgggggtcttggattgaacttgcagactgcagacaccgtcattatctttgatagtgactggaaccctcagatggaccaacaagctgaggaccgtgcccatcgtatagggcaaaagaacgaagtacgtgtgtttgttcttgttagcgttggttcaattgaagaagagatattggatcgtgcgaaacagaagatgggtattgatgcaaaagtaatccaggctgggttgtttaacacgacctccacagcacaggacaggcgagcattgctgcaggagatactcaggagaggaacaagctcactgggaacggatatccccagtgaacgtgagataaaccgcttggctgctcgaaacgatgaagaattccggttgtttgagaagatggatgaagaaaggaggctaagggagaactacaaatctagacttatggatggaaatgaggtcccaaattgggtgtttgccaatgataatgaaaccttacgcaagaaaaccgtggcagatgaattccggaatataattgttggttcaaagagacgtagaaaggaggttgtctattcggactcttttggtgatcagtggatgaaatccgacgagggatttgaagagattgcaaagatgactccaagggtgaagcgaactgcttattcgcctgacattcaagttgagtacaatgaaaggaggaaaaggcccaagtctgtggaaaacagcgcagatggcgcaagcaacccaacacggacacccgacaaaggaagggctggagtttcatcatacagcaaggatgagaccgaagatgatggtgaagacgaagtcatcaccagtggcttacagaagggtaacagtttcacatggaagacccttggaagaaaaaggtcaagccacttaagttcgtcgtcggactcaaaagggcgaccaccattctaatgtcagttgccttgatgcttttgctcgatgaagcccttctaataatggagtacccctggaggctagcagcgctaccatttcgaaagtaccttgaacctataaacttcaggatggaggctgtagctagcaggactaccattttgaaagtacattgaagctataaacttcagaattagtaatttactctggacttgttgccatgaattcgtaactcaaacgaacttaaattgcgtt

SEQ ID NO: 3621 - DNA, 2730 bp, Zea mays
  Clone ID: TF_ZmC12070_1
tttttggccgccctctattatccaaacgggctactccaacggaaaaagcctcgctagtcgctgccatcgatgttacacacactgcaaaagtacatcagttccaacaggcacagcagcagtcgatctacgcaccgccgaccccgtccgtcctggtgttatggcagcgtcagggttccaacttccaacaagtcagtgctcctagtcctagcatagcctggccctccctactcatgcttaactacgtcagcatttagatctgaaacagaaacttgaggtccgcctctgtaagcttcgacatggcatccggcgagtcccccacggtgccttcaaacaccagctgcttcttctgttgcagttgcagtatgcgctcttcaaccgtgtcctttatcacaaacctagtgctcttgattggcttgaactgcccaattcggtggatacggtcctgcgcttggttctcgaccgctggattccaccaagggtccatcaggaacacatgagatgctacagtgagattcagagcgactcctccagcttttaagctcatcaagaagaccctgcagtctgcatcatgggtgaaggtgtctatggctcttcccttttcggtaatgttcatggctccattcaactggacacacttaatgccggacctctccaaggaaaactgaatcaaatccaagaatgatgtgaactggctgaagacaatccctttggcagaaccatcgtgctcaatcatgtttcttatctcctccctcaaggcatcaatttttgtactcgtcttaaaatccacaaggcttggtagtctgctcaatattcctgaacatttgcgacccttgacacttcgagttacttttccaactgaattttgtgctgttaagtccacggtgagaggtattgaacaggatggacatgaaacattccccaaagctgcagagtagtctatcaaacaagtcttgcagaatgcatgatcacaagaggtaaccacaacatcttcagccaaattatgacatataccacattggctctccatggactcgtttccttcattcttcattccttcaggatgtcctgctgttttagaatatgctacaagatagggatgatcaacagcctgtctcaaccttgtgagaagatcgaagatatgagcgtagttattcatcagtgttccagcatctacatatgcatcaaattgtgtgacactctgagtgtacaaagcttcatagaattccatttcgtttttatcaaaagagtcccgcctcaatgtcacaatctttggtggaagagcaagatctgctgctcggcctttctttgtgcgccttaacactatgcctttcagaactttttccttcagaagagtcatggctctttttccttcgaaacttgttgacccatactgtattggtgttgatatgtacttattccaccagcaaaagtgcctaacagatgagtgaccacagtcgcattgtttcttcatactggtatctagtatctcacagctacagtccttgcagaaatagtatgagtaggggaagatttgcaaaaaccgaataagagagtaaagttctccaacacggttctgcaaaggtgttccactcagagcccacttgcattctgactccaatgcaaaaacagcccgtgcagtattacatcgtctatcttttatgaagtgagcctcatccaggataacacgctcccaccgcacagaatgcagaggagattggccccttaactgtctgcccagttcatcagccaactcttgaaaatccttattcacctcatcacccttcttatgaaccctcctcttctccttcaccttttccttgctgctgtcccacttcctcttgctctgctgcttagcctgagcttctgtgcgtttagcattaggcccacagtgatacatcaagtgcaccttcatcttgttggggtagaacaatttattgcagtattggcaccgagtcttgggcggcatgatgtgcttccggtagtccgcctcaatggtagagtaggtggtgataacaaagtcatagctgttgaaatcgaaactctgagtgacacgcttggcaccgtggtagatgagcacgcgcacgctgccactagcagtgtggcgttcgatctcctcagtccactggatgacggccaccacagggcagacgaccagcgtgcacccgacctggggcttggtgcggcccaccgaggagttggacgaggaggcggcggagtgatggtccgggggccggaggcggcgcgcggttaggacgagcgagatagcctggatggtcttccccatccccatctcgtcggcgaggatgccgccccgcgtgacggacgcctcctgcgcgagcgcccaagcgagccactccttctggaaacgcagcaatcggagcaccacctccggggccgggtccgcggtcggcacggccgccaccgtggcgtccgtggcctcgacgcccccgtcggctgcgttccgctcgtcgagccaactgtcgtttgccacctgccactcttcccatggcaggggcggcgcgtccctcctcgccttcttacctcgcctcctcttctccctcctgttccgcgcctgattcttaatccggatcggcaccggcggcggcagggccgcctcgggcaccgcgggcgcgggcggggtgtccttatcgggcgcgaactcctcgtcgctgtcgtcgttctccaccgcgtccccggagtcggcgacgaaatcggtgtcggaggtgtcgt

SEQ ID NO: 3622 - DNA, 1484 bp, Zea mays
  Clone ID: TF_ZmC35142_1
agaacaaatgcttccacggaagaaagagaagagcatttatgctaacatgactgaggttcagaagcgaatccaggatcacttagttgagaaaacctttgatgtctacttgaatgatgaatcagatattgtgttgcgtagacctggcatcaagacaaagctaaatagtctctttattcaattgaggaagaactgcgcccatcctgatcttttggaagctgcatttggaacaacaagcctttatccacctgttaataagcttttagagcaatgtggcaaatttcagcttctggacaggctactaacttccctacttgcacgcaagcataaggttctaatattctcacaatggacaaaagttttggacattcttgagtattacctagattcaaaaggccttggggtttgcagaattgatggtagtgttaatttggaagagaggcggcggcagatagcagagtttaatgatttgaatagcagtctgaatgtctttattctgagcacacgggctggcggacttggtatcaaccttacttctgctgatacatgtatcctttatgacagtgactggaatcctcagatggatcagcaggccatggatcgatgccaccggattggtcaaacacgcccagtgcatgtatataggctggctacctcatattctgttgaggagcggatcatcaagaaagcttttgggaagttaaagctagagcatgtggtgataggcaagggacagtttgaacaagaaagagcaaagcctaacgctttagaggagggggagctgctggcgctgcttagggacgagcaggacgaggaagatcggatgatccagaccgacatcagcgacgaagacctcttgaagctgatggaccggagcgacctgtccggaccacctggtgctgccgatgccgctccactgatcccgctgaaaggccctggctgggaggtcgtggtcccaaccaagagcggtggcggtatgctctcgtcgctcaccagctgagcgatgccggcaccatgtttggggtgcccattttgctagtcactcatcatgtggacgatggggcgcttgttggccggtcgccgatcaggcggatattttgcatgtatgcccccctacaaactgttgatctgggtgttgagcctgcaacagtagggttaggttatttcctcccgtgtccgtgccagtgacacgcaagtcggattgagttatgctgtgaacttctgatgagtcgctgcaagctgcctttctgacttgagctttttgctgcttctgttgctgcgttctatgatgtagtaacagtagctgatggtttacaccaaagcggagatggatgccctctatgatgtagtccttgctatataacttgaacactgatgtgattttctgtagtgtcaactgccatgctttataagttttaaaaaaaaaaaaaaaaaaaacgttgccccatttttgtgatttgtgtccgggtgtatggtgcccccttgtg

SEQ ID NO: 3623 - DNA, 2053 bp, Zea mays
  Clone ID: TF_ZmC3853_1
gagcttatctagtcggcggccgctcgcgatctagaactactcttttagcaaacacaagaaacctaaggccccacttattggaggaagcaatctaattatctgtccaatgacactaattagtcagtggaaggcagagattgaagctcatactaagccaggcactgcgaatatatatgttcactatggacaaaacaggccaaaagatgcaagcatcattggtcagagtgatattgtcctgactacatatggtgttgtgtcatcagagttttcaatcgatggttcaacagaaaatggggctttgtactctgtacattggttcagagttgtgcttgacgaagcacacatgataaaatcttctaaaagtttgatatccctagctgcggctgctctgactgcagatcggcgctggtgtctcactggtacaccaattcagaacaatttggaggatttatacagccttttccggtttctgaaagttgaaccatggaggaactgggctttgtggaataaacttgtacagaaaccatatgaagaaggtgatgaaaggggcttaaagctactgcagtccattttgaagccaataatgctgagaaggactaaaaattgcacagacaaggagggcaggccaatccttaatttaccccctgcaaacattgaagtaaaatactgtgttttatctgaggctgagaaggatttctatgaagctctatttcgaagatctaaggtaaaatttgatcaatttgttgagcaaggaagggttctgcacaactatgcttcaattttggagttacttttgcgcctaaggcaatgctgtgatcatccattccttgttatgagtcgtggggatacaaaagagtatgcagacctaaacaagcttgcaaagcgttttctgcgtggtggtaatggtgctgttaatggtgattcttgcatcccctctagagcttatatcgaacaggttgtccaagaattgcaaaaggatgaaggggagtgccctatttgtcttgaagcctttgaggatgcagtattaactccctgtgctcatcgtttatgccgagagtgtctcttatctagttggcggagtgcgacagcaggcctttgtcctgtctgtagaatgtcaatgagcaagcaggaccttataactgctcctactgataaccgctttcaaatcgatgtcgaaaaaaattgggttgaatcttccaagatatctgctctcctgcaggagttggaagctcttcgcagttcaggcgccaagagtatcgtgtttagccagtggactgcttttttagatctgttgcaaattccactttctaggaataatttctcatttgctaggctggatgggacgttgaatcttcagcaaagggagaaagttataaaggagttctcagaggacaaaggcattttggttctgcttatgtctctgaaggctggaggtgttggaatcaatcttactgccgcttctaatgcatttgtcatggacccttggtggaatcctgctgtggaagaacaagctgtcatgcgcatccatcgaattggtcaaacgaagactgtttctatcagaagattcatcgtgaagggcactgtcgaagaacgaatggaggctgtgcaggctcgaaagcagcgaatgatttctggagctttgactgaccaagaagtccgcactgcacgtatagaagaactgaagatgcttttctcctgagactacaaaagggctgttgtgcatcggatggtcggcaattcggcatggctaaaacaagatggctggtagccagaatgttggaaggtaagacgagggtaggaaattgcacgcccaaatatcttggcgtttagctgctgttgtgcgcacgatttgtacatcatgaatggttaatggctgacaagagtccaagacgcttcattgagtgaaaatcgaaagcatcatctcaaaattgaatatttctgtttgggttttgtataagtagataaactgaacatttgcagtaatacgaaggcagctacctgctcgatcattaatttaacaataaataaatttggtaaggtggtcaagtatacg

SEQ ID NO: 3624 - DNA, 573 bp, Zea mays
  Clone ID: TF_cC-zmpo148030a10a1
cacctttctgaatgatctacttgtaatgtaaatcttacctgcgtttgttactttgtgatctcctgtagtatatgggggaccgggctccgcaccctggaagagataagggtgattgcagcatttccgtaattgcattgctatgttcaacagacgtttgcgttctccaccaccattaaccacttcaagatccttctgcagtaaagccttgtagtactgtttttgcatttgagacatgccaactttgagtattgtctccttttttggaggtaagcctttctctacatctgattttaacctccgaagaagaaatggtcgcagaacctacaaagatgaggtaaatgattagcataagaacttagagaataaccttgataaaatatgagtacataccttgtgaagttgttgaacaacttcttgctggtcgttttcaccagaaatttgaaaccactcgtcaaaagtttctgctgaactaaaaacctcagggagaagaaaattgagaaaggcccacaattcatggagattattctgtagtagaaacatatgaaatgaatacaatattaactcaagcaaatc

SEQ ID NO: 3625 - DNA, 365 bp, Zea mays
  Clone ID: TF_LIB3159-002-Q1-K1-E3
ggctcggcaagactctccaggcgattgctatagcatgctgtttcaaggacgagggctctatattgatagtatgtccagctgtattgcgttattcttgggcagaggaattggaacgctggcatccttcatttatgccaaaagatattcatattgtatttggtcgtcaagacagtcttgaacatctaaatgctactccaagggcagtgattatatcttaccagatgctaagtcgccttagagaaagtatggtgaatagaacatgggcactgatgattgttgatgaatcacataacatacgctgcacgaagaaactagaagaaaaaatatgagacaaaaagctgtgctacatctagctttaaaaactg

SEQ ID NO: 3626 - DNA, 973 bp, Zea mays
  Clone ID: TF_ZmC41243_1
aattcggcacgaggggttgatgaagcccaccggttgaaaaattgtgaagcatcactatatactacccttttggaattcagcactaagaataagctgcttatcactggaacacctttgcagaacagtgtggaagagctttgggcattacttcatttccttgatccagttaaattcaacagcaaggatagttttgttgaaagatacaaaaatttgagttccttcaatgaaaccgagcttgcgaatctgcataaggaattgaggcctcatattctaaggcgggttataaaagatgtcgagaagtctttacctcctaaaattgaacggattctacgtgtcgagatgtcaccccttcagaaacaatactacaagtggattttagagcggaatttccagaatctaaataaaggagtccgtgggaatcaggtatcacttttgaacattgttgttgaattgaagaaatgctgcaaccatccatttttgtttgaaagtgccgatcacggttatggtggagatagcattggcgatcggaataaagttgaacgtattgttatgagtagtgggaaacttgtcttgttggacaaactattggtgagactgcgggagactaaccatcgtgtgcttatattctcacagatggttaagatgttggacatccttgcagaatacctctctcttcggggatttcagtttcagaggcttgatggtagtacaagagcagatcttcgtcatcaagccatggaacactttaatgctcccggaagtgatgatttctgttttcttttatccacacgtgccggaggacttggtattaatctagcaactgcagatacagtgataatttttgattcagattggaatccacaaaatgatttgcaggccatgagtagggcacataggattggccaacaggagacagttaatatctaccgcttcgtcacatgcaaaagtgttgaggaggatatttggaacgcgc

SEQ ID NO: 3627 - DNA, 1875 bp, Zea mays
  Clone ID: TF_ZmC506_1
cccacgcgtccgtcttgggtgacacaactggaggaacacttgaaagcaggcagcctgaaagtctacatgtaccatggcgagcggacgagagataagaaggagctgttgaagtatgacctcgttcttaccacctacagcatcttggggacagaatttgagcaggaggactcaccggtgaaggatatcgagtggtttcgtgtgatcctggatgaagcccatgtgatcaagaactctgcagcacggcagacgaaggcggttatcgctctgaatgcagagaggcggtgggtggtcactgggacacccattcagaacagctcatttgatttatatcccctcatggcatttttgagattccagcctttctcaatcaagagctactggcagagcttgatccagcgccccttagagaaaggaagtaaggctggattgtcacggttgcaaaacctcttaggtgctatttcattgcggagaatcaaagagatggacgatggaaacaagagcatggttgaacttccctccaaaactgttttggcatgttatattgatctttctgcagaggagcgtgaatactatgatcagatggaacaggaagggaggaacaaaatgcaggaattcggtgacagagattcgattctgagtaattactcaaccgtgctttatttcattctgaggctccgccagctctgtgatgatgttgctttgtgtcctttagacatgaaagcatggtttcctgcaagctctatcgaagatgtgtctaaacacccagagctgttgaagaaactggccttattggttgatgatggagatgactttgactgtcctatttgcctctctccaccaactaaaactgtcataaccagctgcactcacatatactgccaaacctgcatcctaaaaatcctcaagagctccagttcccgctgtccaatatgcaggcgcaccttatctaaagaggacctcttccttgctccagaggtaaagcatcctgatgaagatggttcaggcaaccttgagtctgacagacccctctcatccaaggtgcaagcactgctgaagctgctgacggcttcacagaacgaagacccctcatcgaagtctgttgttttttcccagttcaggaagatgctgatcttgctggaagcgcccctcagaagggcaggctttaagacactacgcctcgatggctcaatgagtgcgaagaagaggctgcaagtcatccaagaattcagtcacggtggctctgactccccaactgtgctactggccagtctgaaagccgcgggagccggcgtgaacctcacagctgcctcgacggtgtacctgttcgacccctggtggaaccctggggtagaggagcaggccatggacagggtgcaccggatcggacagaagaaagaagtgaaggtgataaggctcatcgtgaagggcagcatcgaggagaggatactggccctgcaggagaggaagaagcggctgatcagcggcgcattcgggaagaagggaggcaagaacgagaaggagatgcgtgtcgaagagctccggatgatgttgggcctaggtaagtaaggaaaaggctggttggtggtgataggaggagtgatgcttgtgttgcttgtgatatagctctggcggtagaagttgtagctagggcgatggagtttcagtgtaggcatagggtagggctggaagaaaacgaaatccaggcacgcgtgcatgtatctctgatgctaaacattagcactagatcagtgctaaatgattgggtcctcacttcctcagctgtgatggtcaattactgaacacggtcaaatctagtagtagctgtgctaaatgaattgcgtttgcagctttcctattcaaaaaaaaaaaaaaaaa

SEQ ID NO: 3628 - DNA, 371 bp, Zea mays
  Clone ID: TF_LIB3079-023-Q1-K1-H5
acgcatcgtgaggccaccttctacaagcgcagggactgtctcttcaagaaaggtggggagctctccggtctgtgcgacgtcaacctgctgctggtcctgtcttccacctgcggcaagctctaccactacctctcggccaccgttccctacgtcgaggacctggtcgagaggtacgagggcacgacgcacaccaagggctgtaccgacatccgtcaagagcggcgcgcgcagctggcgaaggcggagctgacgtgcgagctgatggagaaagagctgcgggtcatgacaggggacgacggatagcagtacactgtgcccactgttgagctgcttgaacacaaactggatgcagccgtgcacaaggtgcgctc

SEQ ID NO: 3629 - DNA, 569 bp, Zea mays
  Clone ID: TF_LIB3206-120-P1-K1-F1
gccgggcgtgcgcagcgccgcgcgtttgcgagtccgggacgactacatggggaggggccgcatcgagataaagcgggtcgagaacccgacgcagcgggagtccaccttctacaagcgcagggacgggctcttcaagaaggcggggagcagtacacggtgccgtcgctggagctgctggagcacagcctggaggcggccgtgcacagggtgcgctccgagaaggaccgcaagatcggcggcgagatcgactgcctccagaacattatcagaggacgccacgaggagcgctacgggttgtgcgacaaggtaagcacacgattttgtgagctacagacgctcagaacgccccgagactgcacttaataagtatacatttcttgcaccataaaacgtagcgtcgtgtgagcaacttaaattacttgcgtacatttctttggctatatataagaacatttcttcatttgcttgcaccatacaaaacaaccgaagagatggttcatagcaggcaaaagaatcttcctgcgggcctgcctatggctttgcccgctagcagataaacaacctatctg

SEQ ID NO: 3630 - DNA, 345 bp, Zea mays
  Clone ID: TF_uC-zmflb73275a12b1
tggcgctatctacactacgatttagcacgggaccatggggccggagaggagaagctagctaactaggagcaactctgatggtgagagtgcgagaggaggggatctgcagccggcgctggatggaaaaggagagagaaacgacggggggtacgacggagctacagcggatcgagaacaagagcaaccgtaagacaactgaccccaagcgcccgagcgatctgctgaagaaggagcacgagcactgacggctctgcgacgaccgagctgcgcacagggtctgctgcagccgctgactgctataccagctctgtacgcggactaagcatgacgagaacacttgagagg

SEQ ID NO: 3631 - DNA, 298 bp, Zea mays
  Clone ID: TF_LIB3245-361-P1-N1-B8
aatttcgatggcgcaccctttactatccacaccactaacgcggtggttcactcaatggatggcgaaaaccttacgcagataaaagcaggcattcgctagcgcttaactctcgctgccctacggatctgtttgggagtggataactcagtatggggcgcccgaagaaccaagatcaaaattattgagaactctaccaacccccaagtgaccttctccaaactccacaccggactggtcaataaggcacggaagatctcctttctatgaaacacctaagtccgcgtaatcatcttctcca

SEQ ID NO: 3632 - DNA, 176 bp, Zea mays
  Clone ID: TF_LIB3279-011-P1-K1-D3
cccacactttcaccactaccaacctagcgtctccaggctcctgctcaagaaggttagaagaggggagccttccttgtgaagtcgctggttgtttataatgtgcacatagatggctccctggaagatcgatatcaagcggatcgagaacttcaccaaccgccaggtgacctttttca

SEQ ID NO: 3633 - DNA, 621 bp, Zea mays
  unsure (1)..(621): unsure at all n locations
  Clone ID: TF_LIB4764-056-R1-K1-E5
ttgggaccctcgaggccggccgggacgncgncggggcncacgagctcccgggtgattggcttggctcgcacggggtcgatggctcccctccccttccttccccactgatacataccatcaggtgttcacagccgagccgaactctacgaggcccgattgcaagtcttccaccaggacagcctcctccaacatggggagggcccgcatggagataaagtggatctagaaccccacgaagtggcaggccaccttctacaagagcagggtacggcctcttcatgaaggatagtgacttctccgttctgtgggacgtggacctggtgttgttcctcttttctacctccggtaagatctaccactacctctcgaccaccgtcccctccgatctggacctgatcaacaggaaccacgtcacaacgcccaccaagggctgaaccgacatccgccaagagagcagctggcacttgaataaaggcgatatcaaatgttacatgtgatgtaaaaagagctgcgcttcttcgacggtggacgatcggagatcgatacacggtgcacatctctggaactgctgcaacacatctggattgtgccgagcacatggtgccctccgataaggaccgc

SEQ ID NO: 3634 - DNA, 324 bp, Zea mays
  Clone ID: TF_LIB189-006-Q1-E1-G12
gctgcaacgatgcaggtcactttcaccatccgccgctgcggcatcttcatgaaggtttaagagctctccgtgctgtgctataccgacgtcgcgctcatcctcgtctcctccacggggaatcgctcgtaattatccaactgcaatatggatgagataattgacaactacttcacacattgctattttcgtgcgggacaacagagcagacttcgctggactttaacttatagcatagcatatatgtaaatttgaatgaccagcttgcggtaccaagccttcgactcatgcagattaaaggtgtagaacttgatggatttaatgttg

SEQ ID NO: 3635 - DNA, 387 bp, Zea mays
  unsure (1)..(387): unsure at all n locations
  Clone ID: TF_LIB4862-001-Q1-K1-E1
gcgcgagcgagagagggacggcggccgancnggcggcgcaggcggagggcncggccggggccggcaagncggcgccgaacaaggggaggggccgggncgagcncaagcggancgagaacaagancaaccgccaggncaccggggcgaagcgccgcaacggcccgcacaagaaggcgnacgagcncncggggcncngcgacgccgagggcgcgcccancancnncnccaaccgcggcaagcncaacgagnncnccagcacgcagagcangccaaaaacacnngaaaaggaccaaaaangcagnnnngcagggcccgaaacagcacnccagaacagagagaangagcaacngaaaagcagccgcaaggaggaccncaaacngaaggcac

SEQ ID NO: 3636 - DNA, 608 bp, Zea mays
  Clone ID: TF_LIB4756-102-R1-K1-E10
ctcgaggccggccgggaccgtatccaactacgacttgctctcgtcgcctggtgccttcgctgatcaactgcctcttcccggcctctgtaactagagaggtcaggacatggcgcctctgttctttggctctcttggtgcaactgtcttcgtcgtcgatgctgctgtgagtgtgaccatgagactgagattcaccgccggggactatgtccagaaagacactgaagacaacgaggagagagactgcgacagcggcctggtcgccgttctccaacgtcctgcgcctcctcttgctgaaggaccaagagatctccgtgctctgcgtcgacgacgtctggctcatagtcttctcctcctgcaccaacctctcccagatcatcacgctccttgacgaatgatgtaattgacgaggaccacacgcattctagaaacctggggaaaacacaacacttcttccgctggaattgcacttagagcatagccaatatgcttgtgtgaatgttcctgttgcggaagcatgccttctactctgctagatgacacgtgaatagcttgagggattgaatgttcaagaactccacagattggagactaatctggcatctggactg

SEQ ID NO: 3637 - DNA, 611 bp, Zea mays
  Clone ID: TF_LIB4764-131-Q1-K1-B12
cctcgaggccggccgggctggtatttcccactttgcttgcaggcccctgaaactgataaagaaggcacaagcctgcgatctccagcatggcgaggagaaagattgaaatccagaggctcaagaaaacacgacccgccagggcacctattgcaaacgccgaagagggctcctctagaaggcctacgagctctccgccctatgatacgacaaggtggcgatcgtcaccttctccctatgtgttttacctctactagcacgccagcaacagagtgtcagggtacctctggagaggaactcgagggttcacgccggatgtttcttcctctgaaccaccgctctgtagagtacagtggccacgatctcctcgctgatgaatctcgcacaagtgtccacccacattccgatgttgttcaacgctactctggactggtatgcagcactctgtgcagaaacattgtcgctcagagaatgtgtccagatgtcagagccgcctgtgatagaggcggtctctgaagatctgctactcgatacagtgagctgttagggtgccgccatctgttacatgtcacacatgagatagtgagcatttctactgaccacaatgactctca

SEQ ID NO: 3638 - DNA, 487 bp, Zea mays
  Clone ID: TF_ZmC733474_1
ggagagtctgagaccgagagagggacgatagaaggcataggagctaggagcgatgaccgtacgcgcatatactaggagcagcaaattaaaggcatatatagacaaatagtagtagtagcgagtagcgacgggcgagagagaaagcagtgctactgctacgactactccttagctcgtagccgggtagaaggtgacgagagagagagagagaaagggggagagagatcttgatctagttctagtagactgctagcagtgaacaggcccggtggaggagctgaggtagctgggaaggagaaggaaggaatcgaagaaaaaggcagcaaaacaagcaggatggggcgcggcaaggtggagctgaagcggatcgagaacaagatcagccggcaggtgacgttcgccaagcgccggaacgggctgctcaagaaggcgtacgagctgtcggtgctctgcgacgccgaggtcgccctcatcatcttctccagcc

SEQ ID NO: 3639 - DNA, 763 bp, Zea mays
  Clone ID: TF_ZmC32383_1
cctgttcctttccttcccagggcccagcagcgtgaagtgaggccagctagccttatcagcctatggcggctcggattggagcggacgggaaggcgatggcacgccgcggccgcgtggagctgcggcggatcgaggaccgggtgagccggcaggtgcgcttctccaagcgccgctcggggctcttcaagaaggccttcgagctctccctgctctgcgacgccgaggtcgccctcatcgtcttctcccccgccggcaagctctacccgcgtggagctgcggcggatcgaggaccgggtgagccggcaggtgcgcttctccaagcgccgctcggggctcttcaagaaggccttcgagctctccctgctctgcgacgccgaggtcgccctcatcgtcttctcccccgccggcaagctctacgagtacgcctccaccaggcaaaaggcgtggtgcgtcacttatccattcaaacacaggaatttgttgcaatcacgggattgtagaagaaaactacaagatgtgatgatgctgatgctacataagtcatgctaaaatgtctcgtttattgaagtattgtatctcaaatatattattttttaatttctttatcttgtagtttatatttgagattttattattatatttagtcactgcacactctcattaaaagagtaacgacctttttggtgactaaagatgcttatgaagaagggagattgctattaaaaaaaaaaaaaagggcggccgcccgcgatctagaactagt

SEQ ID NO: 3640 - DNA, 368 bp, Zea mays
  Clone ID: TF_jC-zmX700335674a1
gtgacccttatcaacctggaggcttgtttctttctagtgggcggctgacagcacggatcgatcgaggaagacgagacacgctttttattctggtgtctccttcgccaggtctagctcaccacgtgttactctccaatctgacaccgaccgcacatggtgcagggcatggagcaacttcagctccacgtgaaccaagtgcaccgactggcaacactgtgaaagcaccaagctgggcatgtcaagaaggccctggagctctccgttctctgcgacgccatcgtgtgaatcatcgtattctacgggcacggcatgatctacgacctagccaccaccgtgaccatagaggagctgatcgagatgtacaaggc

SEQ ID NO: 3641 - DNA, 610 bp, Zea mays
  Clone ID: TF_LIB4766-025-R1-K1-H7
cattgggtacctcgaggccggccgaggcctttcaagcaagcgcctcacaaggaaaagatctcctagcagctagccagctacagcctacagcaagagatcggcgcgttgattgcttggatcgaccgaccggccggggtggtcgccatgggacgcgggaagatcgagatcaagcggatcgagaactcgacgaaccggcaggtcaccttctccaagcgccggggcgggctgctcaagaaggccaacgagctcgccgtgctgtgcgacgcgcgcgtcggcgtcgtcatcttctccagcaccggcaagatgttcgagtactgcagccctgcctgcaggttggttacgctagctcggcgctagcttcaactgatggctcatgatcctgcttctgttcgatctgcgttctgcccggccagtccccatcgaccagatcttatattatcagtgttgctagctcgctcatgcgtgcatgattcttgatcttgatcccgatgaaactgccgatcgatccgtgtcttctttgtccttttgtttccccaggcttctcttctaccttgttttagggctttgcagaaacaatcagttactgaaaaaaaaaaaaaaaaaagcggcc

SEQ ID NO: 3642 - DNA, 958 bp, Zea mays
  Clone ID: TF_ZmC21289_1
cccagcgtccgcccacgcgtccgtgttcctccgattaacggaccggccggcgacgtgcatagcaggtacgcagcagctctagctagcaatggcgcctccccgccggccgagcatggggcggcagaagatcgagatccggcgcatagagagcgacgaggcgcggcaggtgtgcttctcgaagcgccgcgcggggctgttcaagaaggccagcgagctgtccatcctctgcggcgccgacgtggccgccgtcgtcttctcccccgccggcaaggccttctccttcggccacccgtccgtggagtccgtcgtcgagcgcttcctcgcctcgtcgtccccctcgcctgccggtgccggtgccggccactccgccagcggcggcgaggaccgcgcggtctcggagctgaaccgccagcacggcgagctgcgcgcgcagctggacgccgtgaaggcgaggcaggagcgcgcggacgaggcgatccggaaggagcgcgaggcggggagcccggcgatggcgtggatcgacgcggaactgagcgggggcgcgatggggcacgacgacctggtcgcgttctgggccgcgcttgcgggcgtgcaggccgccgtggcggccagcgccgaccggctgctgcgcgacgcgctgctcgtcgggcgcaggggccggcagcagcagcagccggcccagcttgccgggggtggtggcgtggcctttgacgtcggcgcgtttggcggcgttggcgtgcaggtgcagccgcctccgggattcgccggcgtcgtcgacctgcaggggttcggggggcaggctgcggccatcctcggcgccggcggtccctcatgagtgatcgaatgcgtgtgtgcatacttcactcaagttgtttggagataacgtcgcaaataaatttgcgacaaatgttttggttaatttgttcgtatgcattgttcgttctcaccttgctctatt

SEQ ID NO: 3643 - DNA, 961 bp, Zea mays
  Clone ID: TF_ZmC786_156
gccggcagggccggagccgccatcgggaaaccttcactccttctcctactcgatctatagctatgaagatcatatcgtacatctgcgtcgtctcctactcgatctatagctccttcgtcccccatcttcagaaattggaatttcttgcagtcgcttcgctggttctgctctctagcttttaactcgttcctgctctttcttcagaccgatctgagttgcgggccgtcgtccaaggcgaaaggaggacagccggcagcgacgagctccggcggcgacaggcaggggaggggcaagatcgagatcaagcacatcgagaacacgacgaaccggcaagtcaccttctgcaagcgtcgcaacagcctgctcaagaaggcgtacgagctctcggtgctctgcgacgccgaggtcgcgctcgtcgtcttctccagccgcggccgcctctacgaccttgctggttacacagaagacgcatttggcttgttggtgctgctcctcgtgcgagagaaggagccagtagtgccaccactgtccagcagcttgaggacttcaaggtcggtggctagtgcagcccccgcccaaagcttagctgacttctgcaaggattcctcctcttcagctgcacacggttcgacatgccccgtgcctactatcactctcgatttgaagaagagtctcaagattctgcaagtgttgtgttactcctaattcagttaccttactggcaataggatgccattgcaacttctgaaagtgcaaccatctgattgaagcggatttaattatacaagatagatctagaattgctttacttgagatccaagcaatgttggatgcttttgtgactgatcatctctagagcttttgtaaatgatctagctagctatctgtaaatgatctagttgtgaatgatattataattgtgatgcttttgtgaatatataattgtggtgcttttgtgttt

SEQ ID NO: 3644 - DNA, 312 bp, Zea mays
  Clone ID: TF_LIB3245-589-P1-K1-B2
gtgtctgcgtcgtccactgagatcagggatcggcggcggggtatggcgagggagcgacgggagataaagaggatagagagcgcggcatcgctccaggtaccgttctccacccgccgccgcttttttttcacgtatgctgctgagctctccctgctctgcaatacctccttcacgctgataggtttgtcctacacggggtagctctcctattccgcccggtccattatgtataatatcaccctcaaacccgacttacattccaaaaatccacccatggacaaacatccttcacttgacttgaacttagatcat

SEQ ID NO: 3645 - DNA, 287 bp, Zea mays
  Clone ID: TF_LIB3116-001-Q1-K1-G1
ttattccatggtttcttttgcataacttcacttgtctatttgattaattctctatcctctttatctctatctttcctcttcccatccttcatttttattcaaacccatcaagatatataaataactacctatatataaattataaatacactaaaaatctctcaatttatacattattgaatacataaaatactgctcaacatacaaacatattattttatatactataaaatacttctaaatatattttataattttaaacttttatttaacataaacccttatct

SEQ ID NO: 3646 - DNA, 412 bp, Zea mays
  Clone ID: TF_uC-zmflmo17001d12b1
tattttgagggatgctgcgcctgctggagccgccgcgcacagttattgcggggtcccacgagtccttcttccactcctcccacgcctcctggctggtctcattgcgcttgataatagacgacggctagctagcagcagctctgttggtgtgtgtgtgcgtgaggggggtagctgctgctggcgctagctggaaaggtccgcagtcatggggaggggacgtcttgtgctaagctaatcgggaacaatatcacccttctgcacaccttgcaccaagcgccgaaacgtactactcaagaaggcttgcgagctcttcgtgctctgcgacgcccaagcattgctcatcgtctactccaaccgcggtaagctatacgagttttgtcacggaccgatactaacgagaacacttgtgagg

SEQ ID NO: 3647 - DNA, 1449 bp, Zea mays
  unsure (1)..(1449): unsure at all n locations
  Clone ID: TF_ZmC1408_5
cgtgcgtgtgtgtgtctgcgcgctagnttagnacacctccatcgtcaataattgcaggcagatccatatagtctgctggtggcgagacaaagcaacggatcgtcgtcgatccggagagcggaaagcgcgcagatcgcggcggccatggggcgcgggaaggtggtgctgcagcggatcgagaacaagatcagccgccaggtcaccttcgccaagcgccggaacggccttcttgagcaggcccgagcgagatccaatctgcaccccacgaacgaaaagattcttccccgccggcgtcgctctctcatccgtcgacgtctcgctccttccttcctctctctctctcttctcttctctctctctctctctctttctctctctcagccagcagcaatcatatagcccagcaccaccacatgcccaagggccctccctctcgctcggggtcgagccaattgagtggcagcgccagaaaaacccagagcgcgagcagcgagcgcgagcgactcggcagcgagcgcgggctcctgtgtgcgtgtgtgtgtctgcgctagagggcgaagggcacggaccgccttcgtcaataattgcggtacgaacggggcaaatccgtcgtttaaagaggtcgctgatagcgcctgctggtggcgagagagaaagcagcagaatcgctgagggatcgtcgatccggagaggcaaaaaagccgagagatcaggcagggcaccatggggcgcgggaaggtggtgctgcagcggatcgagaacaagatcagccggcaggtgaccttcgccaagcgtcggaacggcctgctcaagaaggcgtacgagctctccatcctctgcgacgccgaggtcgcgctcgtcctcttctcccacgccggccgcctctaccagttctcatcctcctccgatctgcttaagactctagagcggtaccagaggcacatctatgcttcagctgatgctgcagttccatcttgcgatgagatgcaggtgcgcggactatcgattttactactattattgcaacattttaatatatgtggtactactttttgtatcatgtgtaacattatccatgttctcaaactgtacatatcaggttaataatttcttcaaacacgatcgcttgtcaccagctaataatgcccttcacaataacaaaactataagtttatgtttattttcttattatttatcattgatttgttctgaaaacacttgatcaccaagccgtgcatttgtatttcagtattttatttctgaagcaatgattttcatcaaaacaaattcagtataagtctaagtactagtgaaaattcttgctcaatttggttgtacaagaactactgttagtttaggcgctttttgctccaatacttaggatgacacagtcaaatgcgcaacaaaactgctgtggctttaattcatataatagntcttcttgaagat

SEQ ID NO: 3648 - DNA, 1456 bp, Zea mays
  Clone ID: TF_ZmC1460_1
accgcacaaattgaaggagaccctcggcacaatgggaacgagacccaactaatcggaggttgaattcagggatcgttggaggaagaggacacaagctgattctgcttcttcggctcccgcagccgccgccagctccgctccagctcaccatgacttactagccaatctgacaccgattcacacccggcaccgacggcgcatggcacggtgcaaggtgcgggttcggcgcgtccagagccccgtccaccggcaggtgacaagcgccgcgcgccgctgcgggctgctccccaaggcccgggagctctccgtcctctgcgacgccagcgtcggcatcatcgtcttctctgcgcacggcaagctctacaacctcgccaccaccgggaccatggaggagctgatcgagaggtacaaggctgccagcgccggagaagcgacgaccgacggctgcggcaggcacaacaggatggaccccaaacatgaaaccacggtgctgcaacaggaaatcaacctgcttcagaagggactgaggtaaattgtttgttactcacagctttgccttgcagttccccccctgtacaaatcgcctacaggtaaatcagtttgctttctgaagaataaactgctgctgcacccagtcacgcaacatgtcaatctaaaaccaaggcatttaagcaaaaggaatggagagacagaccttcattgattctaacaagaatgactcggtacaagaaatagagaagaattgttagaagaaaggaagcattgtggtcggtaggtaccactacgggagctggacgaacgtgcacatgaatgatgacgtgatgaacgctcatgagctgtacttgctgatagggttgtacaacagccgctctgcaaagatgcagataacggctcaagagtaccaacaaccaaaaaggaaggtatgtcagatccctgttcctattgactctacgaagcaccgaggcttttagcacccatttacttcactaaaagtgtctgcgtgtacgcaggaaggcatgttgaaagctgccaacgagattctccaggaaaagatagtagagcagagtagtttgcttgacgtaggcatggtggtagcggaccagcagaatgggcgttttagcacagtcccactggtagaagaggtgatcagtagtaacccactgactatactgagtggctattctagctgtaggggttcagagatgggctactccttctgaccgtaataacaaataccctgggggctccttctgttgattactagtagtgtgtaatacatacagtcaataatgtctattcgtatcatgtaggccttagataagcccttcaggagtgcccctggtattgtgtcgtcgtgccttctacttttccagaatgaagaaatattgtctattgaggagatctgatgctgtgctatttcttccttatcaacggaaatatatctatgtttgtgttc

SEQ ID NO: 3649 - DNA, 1119 bp, Zea mays
  Clone ID: TF_ZmC497_1
gccacaacttccaccgctttctggctttcttctctcttctcaccgtgaatttgttccgatcctcttatggttacgacccgcctgccgtccgctgccacacaacagcggagttagtgactacgcaatcggtcgagctcgtcgtgaggctcttccgctcttggtcggtggtgctgtttcgcgtcctgggaaaaatggatgcggaggcggcgagaaggaagcaggtggcgcctccgcaggagaagaggaagcgcggccggctggagctgcggcggatccaggaccggacgagccggcaggtgcgcttctccaagcgccggagcgggctgttcaagaaggcccacgagctctccgtgctgtgcgacgccgaggtcgcgatggtcgtcttctcccccgccggccgcctctatcactacgcctccctaggcaccagcattgagaaaacattttgtcgttactgggaccttgccaacacagacattgatctcaatatcgaggcgcgagactcgagggacaactataatacacagtttcctgagaatggccagccagctgaaggctcgttatctgacctgctaattatgatggatcaatggtctatggaagaaaatctgaatgggctgagcatggctgggatagcaggcttggaggaagcattaacagtcgctctggcagttatcaggaacaagctggcgatgaaggtgactgggtgcggtgggcctaaacctgaagcacacacgctctttcagcggcggtaagaaggaagtaacaaaactgtattatactagcatctagctctggttctacaaatattggtaattctccagtgctgcagtacatgaacatataaggccatatgttcagagaggtgatggtttcttactgtcatgtaccgcgtgtttaattcatactggtgactggaaagaggaggaggcagctctctaaagtcacaactctgaacgtatggcttttaattcatactggtgcctaagcttggtcgtggctttcttgatcacaaagagaaagctctctgaggaataaagggggggccctcgtagacaggcgttgtgtaactggttctgatggcactacagtatataatttctctcaaacatttccacc

SEQ ID NO: 3650 - DNA, 1037 bp, Zea mays
  Clone ID: TF_ZmC497_2
attggtacctcgagccggcggggccagcctggtatacccaccctctcagcgcaccagtaggtgctgtgccatcagatcctccaggccacaacttccatcgcctctctctctctatctctctctatctctcttctcaccgagaatttgctccgatcctcttatggttacgacccgcctgccgtccgctgccacacagcagcggagttagtgactacgcaatcggtcgagctcgtcgtgaggctcttccgctcttggtcggtggtgctgtttcgcgtcctgggaaaaatggatgcggaggcggcgagaaggaagcaggtggcgcctccgcaggagaagaggaagcgcggccggctggagctgcggcggatccaggaccggacgagccggcaggtgcgcttctccaagcgccggagcgggctgttcaagaaggcccacgagctctccgtgctgtgcgacgccgaggtcgcgatggtcgtcttctcccccgccggccgcctctatcactacgcctccctaggcaccagcattgagaaaacattttgtcgttactgggaccttgccaacacagacattgatctcaatatcgaggcgcgagactcgagggacaactataatacacaggttaagcatataaatagttgatactatatcaatttactctcgtatacataaagcccatagttgtataagttctctttttttcactcacgtgagcaattctctggaacggttaatttaattgactatatatagttccttctacggcaccgtcgtatgcatggaaggataagaaatcgaaaacaagtggtatataatggattagaatatttatgatgataaggtactagataaaattacagtggtattcagaaaattattctacatatataacataaaatctcttggtgtcatggcggagataggacccatgaggcataatttgttccaaaaagatattagtatattattttctagacctaggggttatcttccaagctaatatacagttgcaagttaaaagtatcttcttttttcgc

SEQ ID NO: 3651 - DNA, 579 bp, Zea mays
  Clone ID: TF_ZmC497_3
acttccatcgcctctctcttctctctcttctctcttctcaccggatttgttccgatcctcttatggttacgacccgcctgccgtccgctgccacacagcagcggagttagtgactacgcaatcggtcgagctcgtcgtgaggctcttccgctcttggtcggtggtgctgtttcgcgtcctgggaaaaaggatgcggaggcggcgagaaggaagcaggtggcgcctccgcaggagaagaggaagcgcggccggctggagctgcggcggatccaggaccggacgagccggcaggtgcgcttctccaagcgccggagcgggctgttcaagaaggcccacgagctctccgtgctgtgcgacgccgaggtcgcgatggtcgtcttctcccccgccggccgcctctatcactacgcctccctaggcaccaggtgaagctactctccatcgtatgcatggttgagctggtgctttctgctgcttttgcttcttcttcttcctcgcattaaattttagatttattgcgttgacgaccgccctactcctactggagtagcttttgactcgatcgatatggataaactg

SEQ ID NO: 3652 - DNA, 791 bp, Zea mays
  Clone ID: TF_ZmC3515_2
gggtacctcgaggccggccgagcgtcccactgcccagccgctgtgcgttcgcgctctctcccacactgtctgcgacgactgcgtgggtgggtgggtgggctaccgccgccgcccgtcgccaggtgccgatctcttcaccggcgaagagcgtctgctagcgactcccacacccttgaccctcctctcgcgtctgccgtgcgagaacgtaccgccacgacgaacgatggggaagccgagcagggggcggcaacgcatcgagatccgtcgcatcgaagaaggcggccggctgcaggtgaccttctcgaagcgcaagtccggcctgcaaaagaaggccgccgagctctccatgctctgcggctcgccggtcgccgtcgtcatcttctcccccggcaggaaggtgttcgcgctgggcaccccctcggtcgaccacgtcctccgccgccacgctcctccgatccccggcgaaggagaggaggacgggctccttccggtgctccaggacggaaacgtcgtgatgagcagcagcgccatcgccgaccgcgcggaggtggagaacatcgtgcggcgtacggaggagaccaaggcgcgttcggtggcggagaaggcgcggatggacgccgtcgggaaggccgtgtggcaggccgcggcaaaggccggaaggaggttctggtgtgaggcggactccggtgagctcggggacgccgagctggcaggattcgccaaggcgctccatcggttcagggtcaacctgcagcgccatttggactcgctgtcggcgtctgctaataagc

SEQ ID NO: 3653 - DNA, 445 bp, Zea mays
  Clone ID: TF_LIB3076-018-Q1-K1-A4
ggccgacgccaagggccatggtgaagccttgaaagagaacgagcagggggcgccagaaagttgagatccgccgcatcgacaacaaggagagccgtcaagtcacccagtgcaagcgcaagggcgggctcctaaagaaggcctcggagctccatctcctctgtggtgcccaagtcgccatcatcgtcttcaagagaagggaccccgaaagaaaggaggtgcccgttccgccccgcggccaacgcgacgacggcggccttgccttcgcgatgggcaccctctccgtcgaccacgtgctccaccgctgtggcctgctccacgccgacgagggcctcaccgcgatccaggatgtgggcgccatcgtcgcatagcgtgccgctatggacgcgagagcggggcagaccgagcagaccatggcgctcgtggaggcggagaatgcgctgaatga

SEQ ID NO: 3654 - DNA, 596 bp, Zea mays
  unsure (1)..(596): unsure at all n locations
  Clone ID: TF_ZmC3479_1
ggagctctctatcctctgcgacgcggaggttggcctcatcatcttctccagcaccggcaggctctacgatttctccaacaccaacatgaaagctgtgatagaccgatatgggaaggcaaaagacgagcagcttggcaagaacgatgcaacttcagaactcatggtacggtgaggaaaatgtatacctatttctagctaactagcagttattggtcgtagtacacacgtgccatatgatgtatgttggtcggaccaagatcagaagtttagtccttcattactcacaaataatgacaatttgttgtgtttagctaatcagctagtcggctattcaaattttttgtgaaaggacatctagctgacttggttagttgatctgaatagcactcctcaggttctgagttcggcttctcgtggaagctcgacttcccgtgggagcgaatttcagtttttggggacatagattcgagggttttcttgaccttcatgagaatgtctttttagtataatgtatcggggctgccttaccacccatatgtnnnnaaacaagaaaatatttatgtattaagttagaaaaaatatttaaagttgccnct

SEQ ID NO: 3655 - DNA, 653 bp, Zea mays
  Clone ID: TF_ZmC1211241_1
tttttttttttttttttttgttcttttgtcggtctatttgttaaggatcaggttctctccctttttttttggcgaaaaaatgtaggcccctcagatatttgtttaatctgctcatacatctagctactagagatagcaagttaattaattatacgcaaagcaaattacagatctgttaaagttgaaccaagtctgttcatcggtaagaaattacatacagatatatgtctagctagctagggagagtcacgacgtagatgaatcgtacttggtgttggagaaatcgtagagcctgccggtgctggagaagatgatgaggccaacctccgcgtcgcagaggatagagagctccttcgccttcttcagcagcccgctccgcctcttggagaaggtcacctgcctgctcgtggagttgtctatcctccttatcactatcttccccctccccatccctccttctatctctcagatctagtctaggccggaccggatgggaaggaaggatcacacgggaagacgaagagctcgccggcggccggggggacgagcgatgactggtctgatgggggaattaaaggcggaagctatagcctagctactagaggccggttccattcctagccaccttccaaagagcggaacgggaagtgccg

SEQ ID NO: 3656 - DNA, 689 bp, Zea mays
  Clone ID: TF_ZmC1089_5
tgggaccctcgaggccggccgggtgtcgaaaaaatgtctgtgattttgttatatgaatgtaacgcgcaatgaaacatacaggactagctgcttgcttgacgatgcgtttgcgtgtatccgtataaattaaaggctataagccacatcgtatatgcgtaaaaaaaaaaaaaaaaaaaaaaaaaaaaaaaaaaaaaaaaaaacccatctcctgagtcctgcctgcgctcgcctcagctcctttcttccccgccccttggcttttgcttggttgcatcgggccggtcgagccggagaggaaaagctagctagcagctaccagctctcggccggcggtggtagtctgcctgcagctggggttagctgcaagggttgggagctagccatggggaggggtcgggtggagctgaagcggatcgagaacaagatcaaccgccaggtcaccttcgccaagcgccgcaacggcctgctcaagaaggcgtacgagctctccgtgctctgcgacgccgaagtcgcgctcatcatcttctccaaccgcggcaagctctacgagttctgcagcggacagagcattaccaaaacacttgagaggtatgaaaaaaacagttatggaggaccagatactgctgtacagaacaaggagaactgtgctgctgtaattgctgtttgattattattaattattaggggtt

SEQ ID NO: 3657 - DNA, 1011 bp, Zea mays
  Clone ID: TF_ZmC3819_1
gccacgagcgctgcggccctccaatttaaagcagcaacgacgggcaaagagcagctcggcgggggctgctgcagcgccgcgcgtttgcgagtccgggacgacgacatggggaggggccgcagcgagataaagcggatcgagaacccgacgcagcggcagtccaccttctacaagcgcagggacgggctcttcaagaaggcaagggagctcgccgtcctgtgcgacgtcgacctgctgctgctgctcttctccggctccgggaagctgtaccactacctctcgcccaccgtgcccactgtcaaggacctggtcgagaggtacgaggccgcgacgcacagcaaggtctgggccgacgttcgccaggagcggcgcgcggagctggagaaggcggagcggatgtgcgagctcatggagaaggagctgcggttcatgacggtggacgacggggagcagtacacggtgccgtcgctggagcagctggagcacagcctggaggcggccgtgcacagggtgcgctccgagaaggaccgcaagatcggcggcgagatcgactgcctccagaacattatcagaggacgccacgaggagcgctacgggttgtgcgacaagaacttcttgcaaatttggccgcagcttgctcattctcaggcctggaacaacggcggggaaggtggagggtcgaccccaccaagcggcggcggcctggaactcaaactgggattcaactgacgctggctggcttggaagctggaggatggatcgaagactatgcgctgcttcattgtaccctatcactctgtcaggctacctccccccctgcaccctgttggttatggtttaaaatggttgttgaccaaagttgtcctggatcaaacaaggctcagcttgatgttaatgagctgagggatctaatgtattattagccttatccggctcttgtttacgtgctcatgtatccatcgcaatccatgcacgttaggatagattgtctaaaatagttcaaatttcgtt

SEQ ID NO: 3658 - DNA, 236 bp, Zea mays
  unsure (1)..(236): unsure at all n locations
  Clone ID: TF_LIB4073-012-Q6-K1-E4
tctgtcttgcttgagctgagctcttgctgtctgtggacctctttgggagtggtgaacggaggatggggcgcggtaagatcgagatgcaagaggatcgagaactcgcaccaacagggaagtgaccttctccaagcgccgggccggactggtcaagaaggccagggtgatcggngtgctctgcgacggcggggtcggngtngtcattttgttcagcgggggctggctgcacgactact

SEQ ID NO: 3659 - DNA, 1173 bp, Zea mays
  Clone ID: TF_ZmC3515_1
ggccattgggtacctcgaggccggccggggactccgtcccactgcccagccgctgtgcgttcgcgctctctcccactctgtctgcgacgactgcgtgggtgggcgggctaccgccgccgcccgtcgccaggtgccgatctcttcacacccttgaccccctcctctcgcgtctgccgtgcgagaacgtaccgccacgacgagcgatggggaggccgagcagggggcggcagcgcatcgagatccgccgcatcgaggaaggcggccggctgcaggtgaccttctcgaagcgcaagtccggcctgcaaaagaaggccgccgagctctccctgctctgcggctcgccggtcgccgtcatcgtcttctcccccggcaggaaggtgttcgcgctgggcagtccctcggtcgaccacgtcctccgccgccacgctcctccgatccccagcgaaggagaggaggacgggctccttccggcgctccaggacggagacgtgatgagcagcagcgctatcgctgaccgcgcggaggtggagaacatcgtgcggcgtacggaggagaccaaggcgcgttcggtggcggagaaggcgcggatggacgccgtcgggaaggccgtgaggcaggccgcggcaaaggccggaaggaggttctggtgggaggcggactccggcgtgctcggggacgctgagctgccaggattcgccaaggcgctccgtcggctcagggtcaacctgcagcgccatttggactcgctgtcggcgtctgctaataagcaactgcagtaggagcggctgtgcaaactggctcatttcatttggtgttgcttaggcacttagggtatattactaatatttacaacgttaatatcatgctaaaagctaggtcttcacgcgtagaggcacgcccacggtgcatctcttaacactaaaagcgctactccttctcactccgcaagaagttttgttagcactttaagagcctgtttggttcgtgattaactgtgtcacactttgtctaaggttagtcgtctaaattgaagaactaaccttagtcataaaagttaggcaaagtgtggtaacttagtcatcaaaccaaacatgccctaaagctcgtgttgtgtaaggaaatcggcctgtaatcttcaactgaagagggtgagttggttttgggatcaggatc

SEQ ID NO: 3660 - DNA, 451 bp, Zea mays
  Clone ID: TF_LIB5116-070-A1-PF1-G2
gttacagcctttgcctggaaggaccaagaagaagaagaacagtatacgtgccacacaagccaagagaagatggggcgcgggaggacggagatgaagaagatccagaacgatgtgtcacggcgggccaccttcggcaagcgccgccgcggcctgctgaagaaggcgcacgagctcgccgtactctgcggcgtcgacctcggcctcctcgtcttcgacgacgacggcgccggcaagctgttcgactactgcgcccctaacacaagctggagcgagctaattgagcgctacgagagcatcaccaaacaccagttccagttccagggccaggggatacatcatgatgatcatcagcagcaaccgtcggcggatatcatcgcagggctgaggcgtgagggtgaccatctggaggccagcgtgacgaggcagaccggagaaaacctgtcatccactg

SEQ ID NO: 3661 - DNA, 706 bp, Zea mays
  unsure (1)..(706): unsure at all n locations
  Clone ID: TF_LIB4740-041-R1-K1-E12
actgttgtggtcaccggatgcgttgtgggatgtattttttagatcctccaggggccacaacttccatcgcctctctctatctctctctatctctcttctcaccgagaatttgttccgatcctcttatggttacgacccgcctgccgtccgctgccacacagcagcggagttagtgactacgcaatcggtcgagctcgtcgtgaggctcttccgctcttggtcggtggtgctgtttcgcgtcctgggaaaaatggatgcggaggcggcgagaaggaagcaggtggcgcctccgcaggagaagaggaagcgcggccggctggagctgcggcggatccaggaccggacgagccggcaggtgcgcttctccaagcgccggagcgggctgttcaagaaggcccacgagctctccgtgctgtgcagcnccgaggtcgcgatgggtcgtcttctcccccgccggccgcctctatcactacgcctccctaggcaccagcattgagaaaacaattttgtcgttactgggaccttgccaacacagancattgatctcaatatcgaggcgcgagactcgagggacaactatagacaccgtatcttatgagcaaggagcaccaacgctccttgcgcacaagatacgttctcacaactataatacacaggttaagcattaaaataagntgatactatatcaatttactctcgtatacat

SEQ ID NO: 3662 - DNA, 1121 bp, Zea mays
  Clone ID: TF_ZmC672_2
tcgggctcttcttttttaccctcgctggcgggtcgcctcacccgttcactccgtccatgacgaaacggcaagcgtcgccctctccaccgccaccagtccacctcctcgtcctcctccggtcacgcacgcagctagcttacccgccccgccactataaaaatccacctccaccccaccgcgcgtctacagttccacacacgcgtgcacgggcgggcaagcaccagaaaggaaaggcggaggccgcgcggcgggcgccagctgcagccaagagcccactagtagtagtagtagctagttcaccaccgcctgcttgcctcctttactttgccatatttgctagcgtttcctggattggggacgcttccgtttcgggaagccgtgaagggatcggccacgacgatggtgcgggggaagacggagctgaagcggatagagaacgcgacgagccggcaggtgaccttctcgaagcgccgcaacgggctgctcaagaaggccttcgagctctccgtgctctgcgatgctgaggtcgggctcgtcgtcttctccccgcgcggcaagctctacgagttcgccagcgccgccaggaccaaaagcctgaagaaaccgatgacagcatcgtacatgggggcaacgcggaggtcctgaattaatgcgcggccaatcggaggaagagtgagtggaaagaggcaggcgtgcccagtaactgtgggtggaaggattgctgctcatgggccatggctacaaacggagaagcgtcgtcatgtgacttctggtcgcttggcttgttcctccggcctgccaaagccacttttttcttggtttgtatttcggaaacaatcctttcttgtagtggtggtgccgattgacttttcttgcttgcgttatccaatcacatcatcagttccggacgagaaaaaaattgcgcggttgcgcctcgccgtcgctgctcatgcgttttgctgtgacgttggctacagtttgtagtagcatattaataattctttggttgggttgcctgcttttggtctgggaatatagtacatgcgatattgcgacactgtagtttcagcaagatctctataccttcgattttatgacgacaaaaaagtctgaatgtctag

SEQ ID NO: 3663 - DNA, 2015 bp, Zea mays
  unsure (1)..(2015): unsure at all n locations
  Clone ID: TF_ZmC672_4
gggaccctcgaggccggccgggacagttccacacacgcgtggcacgggcgggcaagcaccagaaaggaaaggcggaggccgcgcggcgggcgccagctgcagccaagagcccactagtagtagtagtagctagttcaccaccgcctgcttgcctcctttactttgccatatttgctagcgtttcctggattggggacgcttccgtttcgggaagccgtgaagggatcggccacgacgatggtgcgggggaagacggagctgaagcggatagagaacgcgacgagccggcaggtgaccttctcgaagcgccgcaacgggctgctcaagaaggccttcgagctctccgtgctctgcgatgctgaggtcgggctcgtcgtcttctccccgcgcggcaagctctacgagttcgccagcgccgccagcctccagaaaacaattgaccgctacaggacatacacaagggacaatgccattgtacacaattcctttcttgttttccacatcgtaattttcttctatttctttatccatatagaactttcttgtcatttcttgtttttggtctcatataatcaaggaaggggtataaactaaaatccagtcaaatttcacctataaaagaaagactactattccttagtaatgtataggaagaaggggtcatcttttttagggataggaaaatctcgtctatacggttcattctatatatatataatatttattttgtttttttagttaggaatttcgcctaaacaaaagaaatacaaaggatcttgggcaagagtatctgatcatatatgtattccaatacggaaggaggattttcaatgcgggatataaaaacatatctctctgtagcacccgtgctaagtactctatggtttggggctttagcaggtttattgatagaaatcaatcgtttattcccagatgctttgtcattcccttttttttaattctagttattcctatgcgagagatagaattcttcgtgacatgacgaaaatttcccctttttgaattcttttttagtatatgaagcaaaaagaaagaaaagatggataaggattgtattctttaattatttctctatgttttattacttaatttacgaatttcaaaaattttgtattctattggattggatttgttcgataattcgaagaattacaacaaaatctttagaaatcacatttttagttaggaacttctatggattttattcttcttcttttctttggatccaaaatagaagaataaaagaataggtataagaattaagttaagtcgatccaaaaaggaaaggaggttcatggccaagggcaaagatgttagaatccgagttattttggaatgtattagttgtgttcgaaagggttccaataaggaatcgacggggatttctagatatagtactcaaaagaatcgccacaatacgcccggacaattagaattaagaaaattttgtcgttattgtcgcaagcataccacccataatgaaataaagaaataggagcatcgtgtgttcgatttttccaaagaacagaaagagtaagaacttcttattaaatatatagaacatagatagaatactaaatacaaatcaactcatctgattttagcccgatattatttcatatgtatagagaggtttttatttttatatattgattttttatatttttatatagtatttcccggcgccctcgagatncctncacatggcggcgtccgagcagtatcagaggcccaaacaaannnnnnnnnnnnnnnnnnnnnnccnnnnnnncnnnnnnnnnnnnnnnnnnnnnnnnnnnnnnnnnnnnnnnnnnnnnnnnnnnnnnnnnnnnnnnnnnnnnnnnnnnnnnnnnnnnnnnnnnnnnnnnnnnnnnnnnnnnnnnnnnnnnnnnnnaataggtataagaattagttagcgatccaaaaggaaaggaggttcaggcagggcaaatgtagaatccgagtttttggaatgatatgtgtgttgaaagggt

SEQ ID NO: 3664 - DNA, 1195 bp, Zea mays
  Clone ID: TF_ZmC1460_6
tccgaaaccccggggcgtatggtagaggagattatagctcaaggaggagcctcgcggagctggaggctagtccaaactagtgggaggttgtgtgcagtgatcgatcgaggaagacgagaagcttttcgctgctagctaccgcccgcccggtgtctgtcgatctgtgacgaccgccaagccgaagccaaaaaggcagcagtagtcgtgagggggatggatctcggcatcgacgaccgcccgtccatggcgcggggcaaggtgcagctgcggcgcatcgagaacccggtgcaccggcaggtgaccttctgcaagcgccgcgccgggctgctcaaaaaggcccgggagctctccgtcctctgcgacgcccacgtcggcatcatcgtcttctccgcgcacggcaagctctacgacctcgccacctccgggaccatggaagagctgatcgagaggtacaggactgccagcagcatagaagcagccgacggctgcggcgacaataacagaatggacgcaaagcaagaaaccatggtgctgcaacaggaaatcaacctgctgcacgaaggcctgaggtacatctatatgaacagaacaaatgaacacatgaatgttgaagcactgaatgctctctgcaaagatgcagataatggctgtagaacaccaaagcactgaaaaagcaaggcatgtcaaaacccctgtacatattaactctacgaagacccgaggctttcagcacccatttacctcactaaaagtgtctgcgtgtacgcaggaaggcatgttgaaagctgccaacgagattctccaggaaaagatagtagagcagagtagtttgcttgacgtaggcatggtggtagcggaccagcagaatgggcgttttagcacagtcccactggtagaagaggtgatcagtagtaacccactgactgtactgagtggctattctagctgtaggggttcagagatgggctactccttctgaccgtaataacaaacagcctgggggctccttctgttgattactactagtgtgtaatacatacagtcaataaagtctgtaatgggttggttgttctgctgctttggtgtatcatattcgattattcgtatcatgtaggccttagataagcccttcaggagtgcccctggtattgtgtcgtcgtgccttttacttctccagaatgaagaaatattgtct

SEQ ID NO: 3665 - DNA, 444 bp, Zea mays
  Clone ID: TF_LIB3077-002-Q1-K1-D11
ccgaattcccgttcgaaccactcgatcccccactcttcacgaattccgcacgatactatgcgtttttgctacgtgggcttactaacaaaagtttgttttcctttaaaggtaaaacggcaaaatattcatatatctttttttcaactaatactgatcgagaacaatattatcatacaagtaacattctcaaatacacgaagttttttattaaacaaatccaatgatatctcagatttatgcgatgctcatgttgctttaattgttttctctaacaaaggaaaactctatgagttctcttctgatcccatcatggacaggatcctagaacgataccaacgacaaatatatgccccaactggttctgaatcacacgcaaatttgtctttggaatcttccaaactcatgtcaactattgaagtctttcaaaagaactttaagaacttt

SEQ ID NO: 3666 - DNA, 500 bp, Zea mays
  unsure (1)..(500): unsure at all n locations
  Clone ID: TF_LIB4744-023-R1-K1-A12
ctcgccggggcctttaangcagcgcctcacagggaaaagatctcctagcagctagccagctacagcctacagcaagagatcggcgcgttgattgcttggatcgaccgaccggccggggtggtcgccatgggacgcgggaagatcgagatcaagcggatcgagaactcgacgaaccggcaggtcaccttctccaagcgccggggcgggctgctcaagaaggccaacgagctcgccgtgttgtgctacgcgcgcgtcggcgtcgtcatcttctccagcaccggcaagatgttcgagtactccacccctgcctgcagcttgagggagcttattgagcagtatcagcatgctaccaacagccacttcgaggagataaaccatgatcagcaaatactgctggagatgacaaggatgattttcttgcgtctaaaaaaaaaaaaaaaaaaaaaaaaaaaaaaaaaaaaaaaaaaaaaaaaaggaaaaaaaaaaaaaaaaaagcggcc

SEQ ID NO: 3667 - DNA, 716 bp, Zea mays
  unsure (1)..(716): unsure at all n locations
  Clone ID: TF_LIB4762-104-Q1-K1-C2
cattgggaccctcgaggccggccggaagaagccctaccgcctcgcctctctcgttccccctcatcgccacgccagtcgcctccactcccagtcatctcccatcaccgacgacgtgtcgaggcgagagaagagggcgagtccaagtctagggttcccgccgcatcgacacgggcatcgcaccgcaccgcgaggggcgggcacggaggaagatggcaccgcgcgggcgcgtggagctgcggcggatcgaggacaaggcgagccggcaggtgcgcttctccaagcgccgcgcggggctgttcaagaaggccttcgagctggccctgctctgcgacgccgaggtcgcgctcctcgtcttttcccccggcggcaagctctatgagtactcctcctccagatgttggcaaaagaaaacaatggtggtgccggtgcaagtacaagcagccagatgttgctttactcggcagagcgtgcaaccgacaaatgaaacggggcgtgcatctgttgctaacggggcggtgccggtgccgcatactattgttgtgtagctgaggtttgtcaaggtggctgctggcaaggtagccgagggaagtggagttcaataacaggatgcggaaactgtgccgctccttgccgaacttaagccccgttacgttgtcgcnacaagtttattttctagcactgtgcttgctgccaaaaaaaaaaaaaaaaaagcggcc

SEQ ID NO: 3668 - DNA, 1095 bp, Zea mays
  Clone ID: TF_ZmC7457_1
ctcgaggccggccgggaagatagccctaccgcctcgcctctctcgttccccctcatcgccacgccagtcgcctccactcccagtcatctcccatcaccgacgacgtgtcgaggcgagagaagagggcgagtccaagtctagggttcccgccgcatcgacacgggcatcgcaccgcaccgcgaggggcgggcacggaggaagatggcaccgcgcgggcgcgtggagctgcggcggatcgaggacaaggcgagccggcaggtgcgcttctccaagcgccgcgcggggctgttcaagaaggccttcgagctggccctgctctgcgacgccgaggtcgcgctcctcgtcttttcccccggcggcaagctctatgagtactcctcctccagcatagaagatacatatgaccgctatcatcaatttgcgggagcaggaagaaaagtgaacggacataacaacgataaccgggatgtagctgcttcagatttacagtcgagacttaaggagatcgcaacatggtctaaacaaaacaacgctgaggagtcggatgccaatgaacttgagaaacttgaggaactcctgacaaatgctttgaggaatacgaaagccaaaaagatgttggcaaaagaaaacaatggtggtgccggtgcaagtacaagcagccagatgttgctttactcggcagagcgtgcaaccgacaaatgaaacggggcgtgcatctgttgctaacggggcggtgccggtgccgcatactattgttgtgtagctgaggtttgtcaaggtggctgctggcaaggttagccgaggaagtggagttcaataacaggatgcggaaactgtgccgctccttgccgaacttaagccccgttacgttgtcgcacaaagtttatttcctagcactgtgcttgctgcttatgtttgtttggatgtgccaacctgcagtgaccctcgtggagcctgggtctcacgctcctcttacctagtgtgatgtgcagaaaaagtgtgatgctgtaaaattatgtgattgcctagcagatgtcaaattttcaatcagtagctaactccttttaatggtaaaaaaaaagcggccaaaaactc

SEQ ID NO: 3669 - DNA, 716 bp, Zea mays
  Clone ID: TF_LIB4827-070-R1-N1-A7
ccggccgggacacatagaagcatcattcccctctcggctagcttcctcctctctccctcctcttcgtcttcctctttccttctcccttgggaaacctgctgcctttgagctttcttcttcgagtgctcccaccagatctcctcctccttaccttctttggcacgttcggcggcgcgcgcggagatagatagatcccgccatcgtcgtcgccgtccttgcttccgatcggagggccacaaccacaacctctcgctccttagcgtgcgcgcgcgagccagggtcaagaagagagctagctataggccggagatcgatggggaggggaaagatcgtgatccgcaggatcgataactccacgagccggcaggtgaccttctccaagcgccggaacgggatcttcaagaaggccaaggagctcgccatcctctgcgatgcggaggtcggcctcgtcatcttctccagcaccggccgcctctacgagtactctagcaccagcatgaaatcagttatagatcggtacggcaaggccaaggaagagcagcaagtcgtcgcaaatcccaactcggagcttaaggtttgctctagataattttttctctctattctgaagtgtttgcttgtttaactaaaagattgctatattttttttgctttcgttttgatatatatatcctttaagtttatggtttgcaaaaaaaaaaaaaaaaggggcggcc

SEQ ID NO: 3670 - DNA, 321 bp, Zea mays
  Clone ID: TF_LIB3136-040-P1-K1-B6-R2A
acgctcatgctgtattcactggtcgccggctatctacatctggagatccattattgagcgtaacaccaaagatacgatcggctcccctgctttctgggacatgggcccctagacgcgatacatacgggggatagagagcgcggcggcgtactgggtgaccttctccaagcgcctgcgcgtactgtgcaagaaggcgtaggaccttgccgtgctgtgcgacgccgacgtctcgctcgtcgagttctccgacaccggcaagctctagcaattcgtgagcctccagtgttgaatgacatcgttgacaggtacaggccacatttc

SEQ ID NO: 3671 - DNA, 860 bp, Zea mays
  Clone ID: TF_ZmC1145_12
gggtacctcgaggccggccgggctcccggcctgtcccctcacctccctccccctatctctccaccgccgcagctagctgcgacgtcatgcactcgccggcgccaccgccaccgcatactatctacaattagccagccgtaggcttacctatcctgtgtcaagcaagcctctcgcaagcaacaaggaaggaagctagctagttttatagctgctgtcggcggcggcggctgaagcgacgtgcctgagctaggatttaggttgagatcaggagagggagaaggcggcggcgatggggcgcgggaaggtgcagctgaagcggatcgagaacaagatcaaccgccaggtgacattctccaagcgccgctcggggctactcaagaaggcgcacgagatctccgtgctctgcgacgccgaggtcgcgctcatcatcttctccaccaagggcaagctctacgagtactctaccgattcatggtacgctctcggccccctccgttgcttacgtttcgacactgcccgctgcgtgctgccccatttccaagctgtttgaaactatgaattgaggtgatgcgtaattatctctgttcgaacttgttgagaatttttggaattatggttattgggtagacagacgtacagctctggttatgtgtagatgagtcgaagaggcgtgtagcgtgtcccgttcgtgcgcgcgctatatatatacggggtaattttatgctccgctttcgctggtatggcgttggtactgctctgtttggggaaatttttgctgccatgctgcatgtgctaattgcttgactaacttgacttctccgcagaacaccaatactatacatctcatctcgcccttattc

SEQ ID NO: 3672 - DNA, 750 bp, Zea mays
  Clone ID: TF_ZmC1145_16
cctcgaggccggccgggcggggcctgtcccctcacctccctccccctatctctccaccgccgcagctagctgcgacgtcatgcactcgccggcgccaccgccaccgcatactatctacaattagccagccgtaggcttacctatcctgtgtcaagcaagcctctcgcaagcaacaaggaaggaagctagctagttttatagctgctgtcggcggcggcggctgaagcgacgtgcctgagctaggatttaggttgagatcaggagagggagaaggcggcggcgatggggcgcgggaaggtgcagctgaagcggatcgagaacaagatcaaccgccaggtgacattctccaagcgccgctcggggctactcaagaaggcgcacgagatctccgtgctctgcgacgccgaggtcgcgctcatcatcttctccaccaagggcaagctctacgagtactctaccgattcatgactagtatatatgtggggaacttccacataccagaactgattgaaagagctagatacaatataatgcagtcagaaagtatggacaaaattcttgaacggtatgagcgctactcctatgcagaaaaggttctcatttccgcagaatatgaaactcaggaaaaaagattcggatcagaagtatgattttttcgtgttgatcaagttgttctgaacaaacgtatttgtgctctcttgcgagggatgattaactttgaattggtgccatgaatatagaaaactaaag

SEQ ID NO: 3673 - DNA, 1012 bp, Zea mays
  Clone ID: TF_ZmC3065_1
ccggccaagaattcgcctgcaatcttcggggtgatcgattacacagcattatgggtcgcgtgaagctacagatcaagaggatagagaacaacaccaatcggcaggtgaccttctccaagcgtcggaatggcctcatcaagaaggcctatgagctctccgttctatgcgacatcgacatcgcgctcatcatgttctcgccctccaatcgcctcagccacttctccggcaggcgcaggatcgaggacgtgatcacgaggtacatcaatctcccggagcacgacagaggaggagttgttcggaatagagagtatctgatgaagatgcttggtaaactcaaatgtgagggtaacatagccgaacaactcacacctaataaagagccaataaattccaacgtagaggagcttcagcaggagattaagacgtaccaacaccagatggaagtcttaaaggagcaacttagatctgacaacattgatgtcgatgaacgatttcgagacgtgtgagaaattcctcatggacaccctcacttgcgtggaggagcgaaagaaatatttgctgtgcaaccacgtggccccgttcgatccgtcggcctccaacatgcaacaacacgtagacgtacgtaggtgtctggtgtctttaataattatggttggaacacataattacttccgttgattcggttcagcgagtacgtaaccgtaattagtagagtacgtaattaacgattcaacgtggaggatgatcatgggtccagatgttcgccctgccgccggcgccgcctcaccaacaggagcaacaaggggacgacctaggaggcgccgccagcgcgttcggtggcgatgtctcgtggttcgccgatgggatgccgacgtcgtcgatctttgctgcgtcggacccaatcttgtactttaggtaggagaaattccattggatgggcgacatacagatatatatcacctctttttcgcttaagattgattatcacactattataaaaaaaaaataataa

SEQ ID NO: 3674 - DNA, 418 bp, Zea mays
  Clone ID: TF_LIB3068-061-Q1-K1-E2
acgcgttcgaccacgcgttcttccactcgttcggactttcttttactcactccatcttccccccggtgactttttcatagatgcatcgggcccatccaacctgataggaaaagctagctagcatttaccatctctaggccggcggctgtagtctgcctgcagctgatgttagctacaaacattgggagctagccatgtggagggatcccctggagctaaaacagatcgagaacaagatcaaccgccagagcaccttagtcaaacgcctcaacggcctgctcaagaatgcttacgaacacttcgagctctgcaacacctaagtctcactcaacattctcttcaaccgccgaaagctctacaagttctgcatccgacaaaacattaccaaaacacttgataggactaaaaaaacattatt

SEQ ID NO: 3675 - DNA, 594 bp, Zea mays
  Clone ID: TF_LIB4666-029-R1-K1-C10
cggggcaagtccggcctgcaaaagaaggcctccgagctctttctgctctgtggctcgcccgtcgccatcgtcatcttctcccccggcaaaaaggtgttcgcgctgggcactccctcagtcgaccacgtcctccgccgctatgctccgatccccggcgaagaagaggaggatgggctccttccggtgcttcaggacacagacgatgtgagcgctatcaccgaccgcgtggaggtggagggcattgtgcggcgaacggaggagaccaaggcgcgttcggtgatggagaaggcacggatggacgccatcgggaagacggtgaggcagaccgcggcaaaggccggaaggaagttctggtgggaggcggactccggcaagctcggggaggctgagctaccagaattcgccaaggtgctccgtcggctcagggtcaacctgcaacgccatttggactcgctgtcggcgtctactaggcagctgcagtaggagtggctgtgcaaaactgggtcattcgatttggttagggcttggatgtttaggcacttaggatagtgtcattgactacaaaaaaaatcaaaatgttagtgtgattagtct

SEQ ID NO: 3676 - DNA, 330 bp, Zea mays
  Clone ID: TF_LIB3245-215-P1-N1-E10
tgggttgttacaacagtatatgtggattataggtcaaggtccaatctcattgtagtatcataagcgatccttacaaacgagacaagcttgttctattgatgtctacgtcaccagcatctagctgaccacgagttactagtcaatctgacaccgaccgttcatggcttgtggtaaggagcaacttcggcgcgtcgagaaccctgtgcactggcaggtgacattttgtatgcgccgagcggggctgctcaagaaggcccttgagctctctgttctttgtgacgccagcgttggtattatcgttttttccgcgcacggtatgctcttttatct

SEQ ID NO: 3677 - DNA, 691 bp, Zea mays
  unsure (1)..(691): unsure at all n locations
  Clone ID: TF_LIB4185-025-R1-L1-C4
aattcggcacgagggggcactggtgaatgaacgagagtgacctgacccccgtgcggccgtccgccgtcaccgaccgagcgccgggtcccaccactccccgtccccaacccctcgcgctcgctccagcctccagcaaccgcgctccctgttcctttccttcccaggcggccaggcccagcagcgtgaagtgaggccagctagcctattatcagcctatggcggctcggattggagcggacgggaaggcgatggcacgccgcggccgcgtggagctgcggcggatcgaggaccgggtgagccggcaggtgcgcttctccaagcgccgctcggggctcttcaagaaggccttcgagctctccctgctctgcgacgccgaggtcgccctcatcgtcttctcccccgccggcaagctctacgagtacgcctccaccaggttgggcggcttccgaagtcattcagacctgcgtccgagcctacatcatcatttggtttgaatcgcggaacgatgtcgttcgtcactgcgttgttctaataacaaactaacatgtgagatcagctcactccgcaataaagtgcaggaccgctccatccggagccagaccacgatggatgagccaaaccatcagaccaaacacgctattagtacctgcttgtcgtgatcagagggaaagataaaaanacatattggatg

SEQ ID NO: 3678 - DNA, 676 bp, Zea mays
  Clone ID: TF_ZmC32383_4
gcacgagctgggcactggtgaatgaacgagagtgacctgacccccgtgcggccgtccgccgtcaccgaccgagcgccgggtcccaccactccccgtccccaacccctcgcgctcgctccagcctccagcaaccgcgctccctgttcctttccttcccaggcggccaggcccagcagcgtgaagtgaggccagctagcctattatcagcctatggcggctcggattggagcggacgggaaggcgatggcacgccgcggccgcgtggagctgcggcggatcgaggaccgggtgagccggcaggtgcgcttctccaagcgccgctcggggctcttcaagaaggccttcgagctctccctgctctgcgacgccgaggtcgccctcatcgtcttctcccccgccggcaagctctacgagtacgcctccaccagcatagaggatacatataaccgctatcagcaattttctggagaaggaaggaatataaatgacgatcgaaatagaaacgataacaaggatgaagcttcttcagatttgcagttgatgctgagcaagattgccacctggtctccccagagcaatgctgacgaatcagatgtagatgagctggagaagctggaaaatcttctgagaaatgctttgaaggatacgagatccacgaagattcagatgttggcga

SEQ ID NO: 3679 - DNA, 903 bp, Zea mays
  Clone ID: TF_793905
ctgcgtcgtctcctactcgatctatagctccttcgtcccccatcttcagaaattggaatttcttgcagtcgcttcgctggttctgctctctagcttttaactcgttcctgctctttcttcagaccgatctgagttgcgggccgtcgtccaaggcgaaaggaggacagccggcagcgacgagctccggcggcgacaggcaggggaggggcaagatcgagatcaagcacatcgagaacacgacgaaccggcaagtcaccttctgcaagcgtcgcaacagcctgctcaagaaggcgtacgagctctcggtgctctgcgacgccgaggtcgcgctcgtcgtcttctccagccgcggccgcctctacgagtacgccaacgtgtatcttgtgcctagatcctacacgctgcgcgcgtcagctgtttgcgttgtccaaattcggagcaagttcgctcccatctttctcgaggcaaaaccgcggggctggagggtcaattggggagctagctagctgctgcatcttttgctgtgtgatccttgctggttacacagaagacgcatttggcttgttggtgctgctcctcgtgcgagagaaggagccagtagtgccaccactgtccagcagcttgaggacttcaaggtcggtggctagtgcagcccccgcccaaagcttagctgacttctgcaaggattcctcctcttcagctgcacacggtctcctgaatattctacctaacatgttgtttctctaaggctactatgtgatctttttgttagtcacaatctattagttagaatcatagagatccttagaagcatagcaaaatcactttctgagtcttggtctttcctttcaagagtggacaatcagaccatagttgatatgcatcaagcactaccagtatctt

SEQ ID NO: 3680 - DNA, 657 bp, Zea mays
  Clone ID: TF_ZmC786_177
tcgagccggccgggccgggatcgggaaaccttcactccttctcctactcgatctatagctatgaagatcatatcgtacatctgcgtcgtctcctactcgatctatagctccttcgtcccccatcttcagaaattggaatttcttgcagtcgcttcgctggttctgctctctagcttttaactcgttcctgctctttcttcagaccgatctgagttgcgggccgtcgtccaaggcgaaaggaggacagccggcagcgacgagctccggcggcgacaggcaggggaggggcaagatcgagatcaagcacatcgagaacacgacgaaccggcaagtcaccttctgcaagcgtcgcaacagcctgctcaagaaggcgtacgagctctcggtgctctgcgacgccgaggtcgcgctcgtcgtcttctccagccgcggccgcctctacgagtacgccaacgtgtatcttgtgcctagatcctacacgctgcgcgcgtcagctgtttgcgttgtccaaattcggagcaagttcgctcccatctttctcgaggcaaaaccgcggggctggagggtcaattggggagctagctagctgctgcatcttttgctgtgtgatgtgagtgacttcattccgttatatgaactactgcgtgcatgctgtct

SEQ ID NO: 3681 - DNA, 570 bp, Zea mays
  Clone ID: TF_ZmC119_1122
tgtcgctttttttttttttttttttacacacacatatttaatagcattataattaatataatataagtaagtaccattcaatatctcataaataagcattgtcaaataactcatacataagtgtactctaaatccaaactaaaatactaatttaatatttgtccatcaactgtttatgctaatattaagcctaactaagtatatgtgaatttaagtctccacacttgtgcggccaccaaaatttaagtttcattccattttttccttggggtcatattctgcattacatgcttgaagggcaattgcttttagatctaatttaccatccaaattgatcgtcgacataatatctgttaccacaccaaacatctttgaagcggaacatacaaatgacctcaacatctctgtggcaaatatacaaagaaacaacactgaacaatattaggctaatttaaatttcttcattttccattatcggtctaccagaggcctagcaagcatagggcacttgacaagcttttgatggcacaaatttaaacaaggtttaacatttagacatacacatcaaac

SEQ ID NO: 3682 - DNA, 555 bp, Zea mays
  Clone ID: TF_LIB4758-033-R1-K1-D3
gggtacctcgaggccggccgggatcccttctgtgcgccgccaccacattgcagcgcacgaattgcacgtgaggtcaaagagggagctgtatactcagccaccgaactccaaaatcgccgccggagctaccctcaaccccgtgaggtcccaagaatctgaagatcatcctggagcctggaatcttgagtcccagtatgaagcaaagctcttgcctggcttgatctatcgaatgaagcagccaaaaatcgtgctgctgatttttgtttccggcaagattgttctgacaagagctaaggtgagagatgagacattgcttttgaaattatctatccagttctcgtaaagtcataaaagtccggcaatgctaagtacatggtaattgctaatggacaagaataattagggtatgttgttcaagtatgtgcccagttgttgttgttgtcccccttttattgttttgttttctgatttcgatggtaccattacctaggacgctcacgagacttctataatatactatccttctatggaaaaaaaaaaaaaaaaaaagcggcc

SEQ ID NO: 3683 - DNA, 1575 bp, Zea mays
  Clone ID: TF_ZmC21769_1
cattgggtacctcgaggccggccggggctccccctcccgtccaccgatacacaacccaactcccgcacgcatctacccccaccaccagacgacctcccccctcccccgcattctctcacgccgcctgcgctctccccctcgcgagatagacaaccctagctcccgtctccttgcttaccctcctctccaacccctctccgatctctataaaagacccgaatttcgaattccccctcgaacccgcgatccgcgctttccttcccgcccatttcggtctctgattcggcgcggattcgctgcgcgggagcccccgaggttgcgtgcgtgattcggatggcggagccggggctcgagggcagccagccggtggatctgtccaagcacccctctggcatcgtccccacgctccagaatatcgtatcaacagttaatttggattgtaaacttgacctcaaagcaatagctttgcaagcacgaaatgcggagtataacccaaagcgttttgctgcagtcatcatgagaataagagaacccaaaaccacggcactgatatttgcatcgggtaaaatggtatgtactggagcgaagagtgaacagcaatccaagcttgcagcaaggaagtatgcccgcattattcagaaacttggttttccagctaagtttaaggattttaagattcagaatattgttggctcttgtgatgtcaagtttccaattaggcttgagggccttgcatattctcatggtgccttctcaagttacgaaccagaactctttcctggccttatctatcggatgaaacaaccaaagattgttcttttaatttttgtttcaggcaagattgttttgactggagcaaaggtgagagaggagacctacactgccttcgaaaacatctatcctgtactgtcagagtttagaaaaattcagcaatgatgacatgtgatgtgaaggtcacgttcttcaaattacaagcttcctcgaggattctcgtgtgaccatgaattctaaatgtacataaaagtctggcggaacttatagcatcttgtaatctctgtgagctgcggtctgtcagtattgggtgggcttgctgtggtaactggtggacatgtcgagttcatccatttgggtaggccttggtgaacacggacgccccacatcatgtctcagtttgagtagtttgtgtgaactgaagggtacgtgcttctcccatgtggttgcagcgttaacttgagttgctaacaagagtagataaaattttgcccctgcttcgtctttgaggcaggagtccttcaaagtctcttctgagtatgtttcagtgtgatgtgcgatgatgaaaaggctggcgctgtatgtaacgtgggacaagggcaaagggcaagggcaatgtactgacgactggttgtaagttatctgttgtatttgagtttgagatgctgtagcgtttgacatggggaaaaaaaaaaaaaaatgaacttgtggaggaaccagtcagtcgaccgttctatttgtgtggccctctgctactgactaatgtggcctgttccaaatgtcgctgcgattttcgtttctttt

SEQ ID NO: 3684 - DNA, 1417 bp, Zea mays
  Clone ID: TF_ZmC21769_2
attccccctcgaacccgtgacacgcgcgctcctttcccgcccatttaggcctctgattcggcgcggattcggcgcgcagccgccgaggttgcgtgcgtgattgggatggcggagccggggctcgaggacagccagccggtggatctgtccaagcacccctccggcatcgtccccacgctccagaatattgtatcaacagttaatttggattgtaaacttgacctcaaagcaatagctttgcaagcaagaaatgcggagtataacccaaagcgttttgctgcagtaatcatgagaataagagaacccaaaaccacggcactgatatttgcatcgggtaaaatggtatgtactggagctaagagcgagcagcaatctaagcttgcagcaagaaagtatgctcgtattattcagaaacttggttttccagctaaattcaaggactttaagattcagaatattgttggctcttgtgatgtaaagtttccaattaggcttgagggccttgcctattctcatggtgccttctcaagttacgaaccagaactctttcctggccttatctatcggatgaaacaaccaaagattgttcttttaatttttgtttcaggcaagattgttttgactggagcaaaggtgagagaggagacctacactgccttcgaaaacatctatcctgtgctggcagagtttcgaaaagttcagcaatgatgacctgttgtgaaggtcacatccttctaattacaagcttccttgatgattttcgtgtgaccataaattctaactgtgtacataaaaagtctggcggaatttatagcatcttgtaatttctgtgagctgctgtctggcatgattgggtgggcttgtcgtggtagctggtggaattgtcaagatgatccgtttgggtagaggccctggtgaacacggacaccacattatgtcgcagtgtgagtagtttgtgtgagctgcagggtacatgcttgtcccatgtggttgcagcgttaacttgagtgctaacaagagtagataaattttggcctgcttcgtctttgatacacgagtccttcaaagtctcttctgagtatgtttcagtgtgatgtgcgatgatgaaaaggctggcgctgtatgtaacgtgggacaagggcaagggcaatgtactgacgactggttgtaagttatctgttgtattttagtttgagatgctgtagcgtttgacattggggtaaatcttgctggttatgaccgtatggaggaaccggtcgattgaccatgctattggtgtgactctttgttagagacaataatgtgcacttaaaccgtgcaatcaaacgatctgatgtatgcaagctattttagatgaaagatttcaaatataaaattgctataggttaaataaagcagggattaaatataaaatagt

SEQ ID NO: 3685 - DNA, 728 bp, Zea mays
  unsure (1)..(728): unsure at all n locations
  Clone ID: TF_LIB4727-003-R1-K1-F7
gggattttagcttctatatgacttgcttgctcttaggtttttctattgaatgcagtctttctcagttatgatgataatgatataatgtcacatgctggtttttgctaagttttctctctattattatatttttatcttgacccttttatctgtaaacagcgttttgctgcagtcatcatgagaataagagaacccaaaaccacagcactgatatttgcatcgggtaaaatggtatgtactggagcgaagagtgaacagcaatccaagcttgcagcaaggaagtatgcccgcattattcagaaacttggttttccagctaagtttaaggtaactttttcatacttgtgtacattgacctgttctttgaacaatatgtacatcagttgctaagttgctgttctaagccagggttttaagatccagaatattgttggctcttgtgatgtcaagtttccaattaggcttgagggccttgcatattctcatggtgccttctcaagtgtatgtccaaggatggtttattttatcaccacagtaattcttttaccctttttgtctgcattcttggataatgacatttttcatttgttttatagtacgaaccagaactctttcctggccttatctatcggatgaaacaaccaaagattggtcttttaatttttggttcaggcaagattgttttgactggagcanaggtgagagaggagacctacactggcttcgaa

SEQ ID NO: 3686 - DNA, 832 bp, Zea mays
  Clone ID: TF_ZmC418581_1
aaatattcttaatctgctgagggttttgtgaataataactgtttcactgtttgcatgcagtatgctcgcatcatcagaagcttgggtttccagcaaaattcaaggacttcaagattcagaacattgttaggtcctgtgatgtcattttcagaacattgttcggtcctgtgatgtcaaatccccaatcaggctcgagggtcttgcatactctcacggtgctttctcaagttatgaaacagagctcttctctggcttgatctatcgaatgaagcggcaaaaaatcatgctgctgatttttgtttccggcaagattgttctgacaagagctaaggtgagagatgagacgtacactgcttttgaaaatatctatccagtcctcacaaagttcagaaaagtccggcaatgttaagtacatggtaattactaatgggcatgggtaattagggcatgctgttcaactatgtgcccagttgttgttgttgtcccctttttatcgttttgtttcctgatggtacgggtgatcacattttcagaaaacttaagttcggcacttggtgtatgtagataacttaggaatgggcaaatgctgttgctggccgccagctctaacttccaagtgtacatatttcgtaggagcctatgcatacgctgcccatcagtttcccatgagacctggtgctgtgcacttgttgattgatgtccacacagctcaattatttgtggcaagaataattagggtatgttgttcaagtgtttgcccagttgttgtccccccttttatcattttgttttctgatttcgacgataccattaactgggaccctcacgggac

SEQ ID NO: 3687 - DNA, 608 bp, Zea mays
  Clone ID: TF_LIB4719-004-R1-K1-B12
tctggccgggatcgatgccggcatggcggcggcgcgcggcgtccaggtaacgcgtgaactaggacacagaaccgacggagagaccatggagggggtgatgcggaaggtcgagcctaacataactgcggcgtcaccagaaccggcggatcgaccgaggacggacgctaggggagcgcccgcggctaccgcatcgcgtagcgtacgcgtcgctctacgcaggcgctggactacaccgcacacctgatgcagccagccgctcaccggcaatgaggacgctgtcggcgctgaactcgtatacgggactggtgccgacagcaactaggatatggggaacgaggattatcaaatggcagcaaggctaaaagctacttagcagacgaggggctatgatgagcgctatgtgttcataggctaaaccttgggagaggatgaccacgacatagctagcaaaactgagagagaaggtaccaacgaactagaatgacctgttgcaaagagctcggtgagaggacgaacgaacatgaaaaagagggcctacgccgcagctttagggggttgagcgtggcacaagcggggacctactgtacacagggctatagctgctatct

SEQ ID NO: 3688 - DNA, 759 bp, Zea mays
  unsure (1)..(759): unsure at all n locations
  Clone ID: TF_LIB4969-021-Q1-XP1-A8
gccggccgggttgggctcattcctctctgctctgctctgctccaccaccctgatgacgacgaggccagacggcagcgccgccacgcccgcggacaagcagctcgtggcggcctccaacggcaacggcaacccgctggccgtccgcaaggcgccctccaaggaccggcacagcaaggtggacgggcgaggccggcgcatccgcatgcccatcatctgcgccgctcgcgtgttccagctcacgagggagctcgggcacaagtccgacggacagaccatcgagtggctgctcaggcaggccgagccctccatcatcgccgccaccggcaccggcaccacgccggcctccttctccacctcgtccccgtcatcgctccgctcctcctcgtcctccacagccggcgtccacccgcacgccgccccggcccaggggttctgggcgctgccggcgcgggccgacttcggacagctctggagcttcgcggccgcgccggagatgatggtcgctgcggctgcagcagcagcgccgggcatggccggggaggcgtccgccgccagggtcggcaactacctccccgtcgcgcagggcaacctcaacctgctggcctccttctccggcgggcctgctcccacagcggccgccggacgggccgaggaggagaccgcccgctaagggtcgtcaattcccagtctctctgtgtgtggctcaatccgggatagacagtgtcactctcacccaactctccatttctttntttgggg

SEQ ID NO: 3689 - DNA, 713 bp, Zea mays
  unsure (1)..(713): unsure at all n locations
  Clone ID: TF_LIB4171-030-R1-L1-H3
ttttcggcacgagggtccagtgtgccagcgcgtgccagagccggagaaaaatgctggcacgattgtaggagcacgggcgatgcactaggcgcgggcagcgtagggataagacagcagcacagcagccgggccgacggctggacgtggccggcgcgcatgaccagcaagcagcacgccggggagcaccagccgttgccgcattccagcagcgacaggcaccgagccgaaaatcgccaggcgccagcccacgccgccaggcctagtgctccctcataaaagcgtcgcattcctctcacggtcacggcactcgccgcgccagcagccagcctatgagcagcgcttgcggcggcggcggttgtagggaatggaggcagcagccgtgggcgacggcgcgccagcgggccgctcccatcagggcgccaagcgcgcgcgcggcggcgccgtgaagggcagcgagacggaagtggcggcgtggggccagccgccgccgctcccgccgccgccgggcccgggggcggggtcccggatctcccgcgtgggggcgagcgggggcaaggaccgccacagcaaggtgtacacgaccaagggcatccgcgacggccgcgtgcgcctgtccgcgcccaccgccatccagttctacgacctgcangaccggctcggcttcgaccagcccagcaaggccatcgaatgggtcatcaacgccggcgccttcg

SEQ ID NO: 3690 - DNA, 592 bp, Zea mays
  unsure (1)..(592): unsure at all n locations
  Clone ID: TF_LIB4827-005-R1-N1-C8
ccggccgggtccgcatcccggccatggtggcggcgcgcgtcttccagctcacgcgtgaactcggacaccgcaccgacggagagaccatcgagtggttgctgcgccaggccgagccttccataatcgccgccaccggcaccggtgtcacgaccgaggaggcgcccccgtctctcgtccccgtcgcccccatcgcgtcctcagtgtcccttacgccggtcccgtactacaccgcgctcctcatgcaaccaccgcccaccgccaatgagtcccctgtcgcctctgcatccgtatctggcactgttgcggataacaactaggctaggtggaagaggattatcaaatggcagttaggctaaaagttagttagtggttagggtttattatgtgtgctatgtggtcatggcttattaccttgggagaggattacggtgatttagctagcaaaactgattgagaatgtaacaacagaaggaatgacatcttttaaagtgttttttgagtcatactggtgttgcaaacgaagtcttatctcttgtgatatgtctagtgcttctgatttctattaaaaaaaaaaaaaaaaanaggggcggcc

SEQ ID NO: 3691 - DNA, 633 bp, Zea mays
  unsure (1)..(633): unsure at all n locations
  Clone ID: TF_LIB4699-001-R1-K1-A9
ccgtactgccttgccccctactttgcctcgcttagcttaggcggcgctgatacccactctcgccgtccttgttgccgcggcgctctgctcacgatggagttccgcgatgcatgtgctgctcgcggctcggggcgcgcgtgctggtcgacgcgccgcaagcgcacgagatggacatgggtgagacgaccgcgccgacgcccgagacgagcaccacaacctgggccgcgcagtatgatctggtcgaggctaaggtcgaccagtagttcatgctccacgaccaggagcaggagcagtaccagcttcagccgaacctgcggatacatattgaccaggcgtcagcggcagcccaggacgatcgcggtggacttaaggagcagcagaagcatgatgcatgtggtggggcagatcgggggattggatgcagcaggcgctcgcccccaagcggagctacaacaaggaccgtcacaccaaggacgacgggaggggccgacggatccggatgccggcgctctgcgccgagcggatcttacagctcacgcgggagctcggccacaagtccgacggcgagactgtgcagtggctgctgcagcaggccgagccggccatcgtcgccgncaccggcacgggcaccat

SEQ ID NO: 3692 - DNA, 1557 bp, Zea mays
  Clone ID: TF_ZmC819_1
gagctagccggacgaattcgggcgtgcggcttcgagctctcgcttatatcagcgccgcgcgcgccggccggcggccggaggagccactatcatccccggcgtttgattcggccagagcagcggccatggtcgaatatatttgatctctctcgatctgatctgagctgagccggctggtggcccgggaaggacgaagtgtgtcgccacctataatttgatgatgtttgtgtcatcatgatcggtggctagcagaataagagatgataagcggcaacctcaacaatgaagagctggggggcggcgggtgcaccaaggccgaggggccgggcgcggccggcggcgccggcgccgtcgtcgcaaagagtcccgtgctgtcgagctcccggcactggccgccgtcgacggagtcgaggatcgtgcgcgtgtcgcgggtcttcggcggcaaggaccggcacagcaaggtgaggacggtcaaggggctgcgcgaccggcgcgtgcggctgtccgtgccgacggcgatccagctctacgacctccaggaccggctgggcctcagccagccgagcaaggtggtggactggctgctcgacgccgcgcaggacgagatcgacaagctgcctccgctccagttcccgccgcaagggcaggacctcgtcgcccatctcccgccgtccatggtggcgcccttcgccaacgttgcagccgaccgggccgccgccgccgctgccgccgcgaacgcgtcggccgcgatggccgaaggcggcaaacgccactgccacggaggcatcaaagggctcatgggcatgggcctcaacaattctatcggcctcgccaacgccaccatgccgctggctcacggcttgtactacacgcccggtgagtcttggaccaatggaggcaatgccgccgtccatgatcatcaggtgagccacggcggcacctcgcctcagacggtggctcaccactcgccgttctcgtctctgctgtctcttgctgctccggggccccagctcgtcttctactcgccggaaggcggcggcttcgccatgaaagaagccaccgatcatcagttcgctgtagatagcctcgatcactcgcaaggccagctctcactgagctcagctagaagcttccttcaccccggcaaccagggatgatattaggtcactgatctctactgctccaagaaggtacgtagaacaataaagcttggtgtagtagtaatcaagtactcgtttgaaggctccgtaaagcttgcaactgcagttttgagatgttattgtttggtatgatcgagtagaggggctctagcgtagagagctgctagcatgcatagtaattaaggttaattttgcaggacatgcaatgcaattcgttgcttcttttttatacaaggaagtaaccggtcatggggtgtgtggtgtgtgtgtgtgttggcaatgtaataacaattttataattcgttcttgaatttgtgcttagctagattgcgttcctttttagactttgttttcatatatactcgatcaatccataccaatatttcgaggccgggcc

SEQ ID NO: 3693 - DNA, 837 bp, Zea mays
  Clone ID: TF_LIB5117-027-A1-PF1-F8
agctacagctccagctccactccctcactccagtcttctccccctccttctcttttgcgcgctggcccctgccgtttcggacccgccgcgctccggtccccgctccgccgccgccgcccgtccccgtcgaccccctcctccgccccttcagaggaagctgcggactggcatgagctagggggccatggaagaggcagacaaggaccgcaattcctgcaagcgcctgcgagcggtaggcggcggcggcgactcggcggatgcgtggcggactttccgggtggcgcgtgctgcggcgggcggcaaggaccggcacagcaaggtggtgacctcgcgcggcctccgcgaccgccgcatccggctctcggtgcagacggccattcagttctatgacatccaggaccgcctgggcgtcgaccagcccagcaaggccatcgaatggctcatccaagccgccgccaccgccatcgatggtctcccgtcgctggactgctccttcgccctccctgtcgcttccccagcagcagaagacgccgcggaggtcagcacctcggagaccagcaagggctctgtgctctcgctcgccaacggccctgccgacaatgacaatgccactcaccaagccaatgcatacaacgggggcagtgccaatggcacgttcgccgagctcctgcactgctccaacgctgccgacaagccaatgcagcatcagcatcagcagccgacgcttgcctactacgcccgctccgggttcacacatcgcacccatgtccttcgagatgattccccgctccccctctcccaggacaacaaaacgccacacccacacaacatgcctct

SEQ ID NO: 3694 - DNA, 1821 bp, Zea mays
  Clone ID: TF_ZmC1215_2
cgcgtccgatcttctccttcccccggcaatcgtcctagctgcaacgcactcggcctgtcgacaaacccaaccagaactccataaaatagtgtcgatcaccacaggcaaacctccctccccgtttctctctctttcactctttttctctctccaagaaataattgactccaacgccaagcgccacaagcacaagcccttgcttgcttgatgtcactctttcgctctcgctagctctaacgccaccgctgacggcgctgccgagcctccagtccaccgcccaacgtcatacaccaagtcaggtcagcagccccacaagaacacttcgtaggtcagcaaatccattattagtaccgatatttctccaggtccctgaagagaaagcatcgtcttgtgtatttatatataccatggcctgatcggctatggacgtcaccggagatgccggcggaggtcgccgccccaacttccctttgcagctgctggaaaagaaagaggaacagccctgctctacgtccccagcggttgctgtgggtgctggggctaatgggtcgggagagatgcagatgaagaaggtggcggcgccgaagcgcacatcctccaaggacaggcacacgaaggtggacgggcgcgggaggcgcatccggatgcctgcaatttgcgcggctcgggtgttccagctgacaagggagctggggcacaagacggacggcgagacgatcgagtggctgctgcagcaggcgaagcccgcggtggtggcggccacgggcacgggcaccatcccggccaacttcacctcgctcaacatctctctccgctcctcgggctcttccttctccatcccagcgcacctccgtgcggccggcccacgcttcggcggcgcgcggggggacccgtgggagcgcgtcgtgggagtgggactcgggttcggcgccgccgccgaggaccctccgtccgctacgtcctcggcgtcgtctcctctgctgctgagtttccactccggcagcgtcggtcttgacgtgtcgccgtcgccgtcgtctgccgccgccggctccgacctgtcgaagaaacggaggtgggagcaggaaatgcagcagcagcatcagcagcaataccaccagcagcagcagatggccgggtacacgacgcagagccaaatgccaggcgccgtgtggatggtgccgagcgcgagcagcaacgctcaagctgccgcagcggctggcggtggcggcagcaacgccaacgagtcgatctggacgttcccgcagccagcaagcggcggcggcggcggcgcggcgaccgtgtaccgcggcgtgccgagtgggctacatttcatgaacttccccgcggcgcccatggcgctggtccccggtggtgggcagcagctcgggctcggcggccccgtgcccgtgggcggcgccggcaacgacagtagtggcagtgccagcggcggcggcggcggcgagggccacatggggatcctcgccgcgctgaacgcgtaccgagcacatagtgccgtctcggacgctgcgccagagcagaacggagcggaaggcggctctcgtcagcaccagcagcacggcggcggcggtgagcgacaggagagcgtgagtcctcccagcgacggctcgtagcgtcttcggagttcggaggcgtgtgcgtgcactggtctgctatggcgtctctctctctttctctctctctcctgtgttaattagtctgtgcttctcgacttatcgtttgcggtttttgttaattggttgcactgttgtggcctcctctggctccttcacattcttgcaaggatcatacagagtttggttt

SEQ ID NO: 3695 - DNA, 1729 bp, Zea mays
  Clone ID: TF_ZmC456_1
cacggagcctgatttggtttgctttttgttgcccagactcggagggagttggtgcctctgtgtctctgtgtgtgtggagatggaccccaagttccccccacccccaccgctaaacaaaacggagcccaccaccgcgacgaccaccaccacctcgaccgcgcagcagcagcagcagcagctggatcctaaggactaccagcagcagcagcagcagccggcgcagcacctgcaaatccaaatccaccagtcgtagcaggacggaggcggcggagggaaggagcagcagcagctgcaggtggtggcgcagcccggggagaggaggcagcaggcgctcgcgcccaagcggagctccaacaaggaccgacacaccaaggtcgacggcaggggccggcggatccggatgcccgcgctctgcgccgcgcggatcttccagctcacgcgggaactcggccacaagtccgacggcgagaccgtccagtggctgctgcagcaggccgagccggccatcgtcgccgccaccggcacgggcaccataccggcgtccgcgctcgcctccgtcgcgccctcgctcccgtcgcccacctccgggctcgccaggccgcaccaccacatgtgggcgccgtccgccggcttctcctcgccctccttcctgaactctgccgccgcgggcacgggcgatgccgccggtatcatgcagcggatggggatccccgcgggcttcgagctgccgggagcctccgccgccggagccaccctcggcgccggcggccacatcggctttgcgcccatgttcgctggacacgccgccgccatgccggggctcgagctcgggctatcgcaggacggccacatcggcgtgctcgccgcgcagtcgatcagccagttctaccaccaggtgggtgctgccgccggcggcggcggccagatgcatcacgcgcacgggcaccatcatcaccatcaccagcagcaggaggacggggaggacgaccgcgaggacggcgagtccgatgacgagtctgggcagtagtagtgtaaccgttcaaccttttgcgttgctgaatcttccctcaagttggaaggagagaaaagtgtatgcgtgcagccacgggatgcttctgctactcttggactgttgttggtcgagttctgatggatttttgtgttcatttttttctcgtgtggtatccaaactcaacggaggcctctcttgctgtgaggacttgcggattcgagatcatcctcagttcttcctacaatctcatggagtggatgatcgccacagccttctctccgacttccaggtgtatactagctgagaaaatgatggattggatcgatcacccttgagtgagtgccttatttgttattgcagtgtgtagatattcaggtaattttgcagttagagaggtgttctttttattgtagtagtgatccacgttttaaaacaatcaaggtattctcctccacaggctgtctatgcaatgcaagtatagtacaattctagttcatgaccacgcataccacttttctccttctctgatatgtctgtgatctgtttctgactagatattcaggtaattttgcagttagagaggtgttctttttattggagtaaacatccacgttttaaaacaatcaaggtattcgccggcaattcgaccatcctccacaggctgtctatgcatcataaacatgatacgtatacaactcgagggggggcccggtaaaa

SEQ ID NO: 3696 - DNA, 1833 bp, Zea mays
  Clone ID: TF_ZmC456_3
ttctctctcttctcttcgattctctttctctctctccttcccccgccccctcgcctcccctctcccacccccaccaagcaccgccggtcactatccctccttggtcttctccctcctcagagcagggaggggaagcggaagagggaggcgagagcacgggaaacctgatctgatttgcttttggtcgccacaagagaagggagttggtgcagtttgtaggcgtgcctctgtgtctccgtgtgtgtggagatggaccccaagttccccacacccctagcgctaaacaaaacggagcccaccaccgcgacgaccaccaccacctcgaccgcgcagcatcatcagctggatcctaaggactaccagcagcagacggcgcagcaccaggagcagcagcagcaccaccatcacccccacctgcaaatccaaatccaccagccgccgccgccgccgcaggacgggggcggcggagtgaaggagcagcagcagctgctgcaggtggtggcgcagcccggggatcggaggcagcaggcgctcgcccccaagcggagctccaacaaggaccgccacaccaaggtcgacggcaggggccgccggatccggatgccggcgctctgcgccgcgcggatcttccagctcacgcgggagctcggccacaagtccgacggcgagactgtgcagtggctgctgcagcaggccgagccggccatcgtcgccgccaccggcacgggcaccataccggcgtccgcgctcgcctccgtcgcgccctcgctcccgtcgcctacctccgggctcgccaggccgcaccaccaccacccgcaccacatgtgggcgccgtccgccggcttctcctcgccctccttcctgaattccgcgggcgcgggcgacggcaccggtatcggcggcatcatgcagcggatgggggtccccgcgggcctggagctgccgggaggcggcgccgccggcggccacatcggctttgcgcccatgttcgctggacacgccgcggccatgccggggctcgagctcggcctctcgcaggacggtcacatcggcgtgctcgccgcgcagtcgatcagccagttctaccaccaggtgggtgccgctgccggcggcagtggccagatgcagcacccgcacgggcaccagcatcaccatcatcagcagcaggaggacggggaggacgaccgcgaggacggcgagtctgatgacgagtctgggcagtagtgtagtcgttcaaccttgcgttttctgggtcttccctcaagtggaggaggagagaaaagtgtatgcgtgcagccacggaatgcttctgctactcctggattcttgttggtcgatggatttttatgttttttttttctctcgtgtggtatccaaactcggcggaggcctctcttgctgtgaagacttgcgggctcaagatcatcctcacttcttcctacaatctcatggggtggatgatcgccacagccttctctccgacttccaggtgtataatagctgaaaacttgatggattggaccaatcacccttgagtgagtgccttatttgttatattgcaaagtgtgtagatattcaggtaattttgcagttagagaggtgttctttttattggagtaaacatccacgttttaaaacaatcaaggtattcgccggcaattcgaccatcctccacaggctgtctatgcatcataaacatgatacgtatacaattctagtccatgatcactcaaaaaaaaattttcctcccctaatacgtctggtctgtttctgacgagatttcttcttcttttgtgtgatgaaacatgcacgtcctagttttttgcttgaatc

SEQ ID NO: 3697 - DNA, 741 bp, Zea mays
  unsure (1)..(741): unsure at all n locations
  Clone ID: TF_LIB5026-027-Q1-XP1-H8
gccggccgggctgcagtcactctcccccgtcacctcaaaaatctatccaaccccaccggtccaccaccgccagccacctctccctcgctctcactcaggtcccccgcaacacgacgagaggcagcaggaccggaaggcgccatggccaccacccgcgacgtctccgccgcctccgcggccgccatgttccacgtgtaccagcccatgccgatgccatccacggcggcggcccccgcgaaggcgggcaagaaggagggcggcaaggaccggcacagcaaggtgaacgggcgcgggcggcgcgtgcggatgccgatcgtgtgcgcggcgcgcgtgttccagctgacccgcgagctggggctcaagtcggacgggcagaccatcgagtggctgctccgccaggccgagccctccatcgtggccgccacgggctccggcaccaccccggccgtcttcgtctcctcctccgcgccgtccacgtcctcctcctcccactcccactcccactaccagcaccagcagcagcagcaggccaccgtcgtcgtcctgggcaagcgcccgcgcgaggaaggcggcgagnccgcggcggcgtccgtgccggcgttctgggcggcggcgccgcggacgacggcggcagcggacgccagctggggcttctcgccgctggaggnccagcaggcggcggcggggtacgtgcccatggcacaggcgcagcagcagcagcagcaacaccaccacctcaac

SEQ ID NO: 3698 - DNA, 417 bp, Zea mays
  unsure (1)..(417): unsure at all n locations
  Clone ID: TF_5268663
cgcggcgcgggtgttccagctgacccgcgagctcggccacaagtccgacggcgagaccatcgagtggctgctgcagcaggcggagccggccatcctggcggctaccggcaccggcaccatcccggccaactactcctcgcttaacatctccatccgctccggcgccgccgcccccgccgcccgcgccgcgccgttcccggcgctcgcgctccacccgcaccaccaccaccaggcggcccccgcgcacgacatgtccgncatgatggctgggtaccatcaccaccttctcccgccgcagccggagccgcaggaggaccccagcgccggcgacgcctacatgcggaagcgctaccgggaggacctgttcaaggaggacgacgagcgccaggatccgagcgcgcccaaagcgcgcgagca

SEQ ID NO: 3699 - DNA, 1443 bp, Zea mays
  Clone ID: TF_ZmC1215_1
ccgggctagctccggcacacgaaggtggacgggcgcgggacgcgcatccggatgcctgcaatttggcggctcgggtgttccagatgaccgatattcctccagctccctgagcaggaaaaaaacatctttgtgtggctgcagcacagcgggtctaatcggctatggacgccaccggagatgccggcggaggtcgccgccccaacttccctttgcagcttctggagaagaaggaggaacagccttgctccacgtccccagcagctgctgtgggtgctggggctgctgggtcgggagagatgcagatgaagaaggtggcgccgccgaaacgcacatcgagcaaggaccggcacacgaaggtggacgggcgcgggcggcgcatccggatgccggcaatctgcgcagctcgggtgttccagctgacgagggagctggggcacaggacggacggcgagacaatcgagtggctgctgcagcaggcggagcccgcggtgatcgcggccacgggcaccggcaccatcccggccaacttcacctcgctcaacatttctctccgctcctcgggctcctccttctccatcccagcgcacctccgtgctgccggttcgcccggcccacgcttcagcggcgcgcggggagacccgtgggagcgcgtcgtaggcctcgggttcggcggcgccgagggtcctccatctgctacttcgtctccgctgctgctaagcttccactccggcagcgtcggccttgacgtgtcatcaccgtcgtcgtcgtctgctgccgccaactccgacctgtccaagaaacggcggtgggagcaagaaatgcagcagcagcagcagcagcaataccagcagcagatggccgggtacacgcagagccaaatgccaggaaccgtgtggatggtgccgagcagcaacgctcaggccgcagcagcggctggcggaggcggcagcagcagcaacgagtcgatctggacgttcccgccgcaaccaggaagcggcgacggcggcgcggcgcccgtgtaccgcggcgtgccgagtgggctacatttcatgaatttccccgcgccgatggcgctgatccccggtgggcagcagctcgggctcggccacgaaaatggcggcagcagcagcggaggcgagggccacatgggggtcctcgccgcgctcaacgcgtaccgggcgcatgccgtcacggtggctgcgccggcggcgcagaacggagcggaaggcggctctagtcagcagcagcagcgtggcggcggcgagcgacaagacagcatgagccccagcgacgacgactcgtaggtcttctcggaggcttgtgcatgcactggtccgctaaggcgtccctcctgtttttaatctgcgcttctcttgacttatcgtttgcgttttcttcggtttgcgttattatagccttctctggctccttcacattctatag

SEQ ID NO: 3700 - DNA, 584 bp, Zea mays
  Clone ID: TF_LIB5046-008-R1-K1-G3
agagatcaccacactgctcttagtgccaggacctagagaggggagcgtggagagggcatcagggggccttggagtcccatcagtaaagcacatgtttcctttctgtgattcctcaagccccatggacttaccgctttaccaacaactgcagctaagcccgtcttccccaaagacggaccaatccagcagcttctactgctacccatgctcccctcccttcgccgccgccgacgccagctttcccctcagctaccagatcggtagtgccgcggccgccgacgccacccctccacaagccgtgatcaactcgccggctacagagctgggcgcctgcgccagtggtgcagaaggatccggcgccagcctcgacagggcggctgccgcggcgaggaaagaccggcacagcaagatatgcaccgccggcgggatgagggaccgccggatgcggctctcccttgacgtcgcgcgcaaattcttcgcgctgcaggacatgcttggcttcgacaaggcaagcaagacggtacagtggctcctcaacacgtccaagtccgccatccaggagatcatggccgacgacgcgtctt

SEQ ID NO: 3701 - DNA, 922 bp, Zea mays
  Clone ID: TF_ZmC445848_1
aattcggcacgaggctgagcttcccttttcctccgtcccgtcacgcctgattgcctcgtttgtcagtcatcactagccgccacccaccaccaccaccgttgctggcggcagtcactccagtcagcccctcctccctctacgctccccaaaaatcgcgcctcccgagttcgtccgcccgatcaaccgccgccctcgccagtcgccacgccagatctgacgacgacggacctcaccgccgcgccgatcgcttgctctcgtcccgtcccgcacgcaccctcattcgcacacccaccaccactccgattacttcgtacgcgccctccgaattgcgcccgtccgggtgggaagccgacgccgcgggcggcaatgcggggcgtgccggccggggggacgtggtaggggtccgccgtcgccgccgccaccgccgcgatggaggtggaggccgtgggctgcgtcggcgcggggggcaagcgggcgcgggcgaaaggcgcgggcgcggagccggagcctaagcgccgcgcggtggcgatggccgtgccggcgcccgccgccgcgccgtgggcgcagcagcaccctgcctcgcggatctaccgcatctcccggggctccggcggcaaggaccgccacagcaaggtgtacacggacaagggcatccgggaccgccgcgtccgcctctccgtcgccaccgtcatccagttctacgacctgcaggaccgcctcggctacgaccagcccagcaaggccatcgagtggctcatcaggggcgccggcgacgccatcgacaagctcccctcgctcgacaccgccggaagcttacccgcgcacccggccttcgccaaggaccacgccccgcctgctggtgacaacgacgaccaccagcagcagcagcagctcacgaggtccggatgcaacagcacgtccg

SEQ ID NO: 3702 - DNA, 678 bp, Zea mays
  Clone ID: TF_ZmC8497_1
cattgggtacctcgaggccggccgggtgtaaaaccgtccgacgcgagccccacctccgcgctcgcacgcggaaggagagggacgagggagccaccgtcaccgagcgcggttacaagaaaatccaatctctcccccacgctcgtttcgactcgcgccatggaggcgcaggcgcaggacaacagggcggaggatggggacggcgcgcggcaacacgtagccggcggcgtcgcggcgacggggatggctatgggcgcgatccccatgcacgggttcatggtcccgaagccagagccggtggagttcttcggcgggatggccgtggtgcgaagcaagccgccgccgcggaaccgcgaccggcacaccaaggtggagggccgggggcggcggatccgcatgcccgcggcgtgcgcggccaggatcttccagctgacgcgggagctagggcacaagtccgacggcgagaccatccggtggctgctgcagcagtcggagcccgccatcatcgccgccaccggcaccggcacggtcccggcgatcgcgaccacggtcgacggcgtgctccgcatccccacgcagtcctcgtcgtcctccagcccctcgtccctcaccaccgtggtcgacggcgacgaggcgtccgccaagcgccgccggaagctgcagccgacgcgagcggccctc

SEQ ID NO: 3703 - DNA, 733 bp, Zea mays
  Clone ID: TF_ZmC212532_2
ctctcattctcgtctccccccatgctagctgctgcagctctcaagctagctggcagctagggtttacaccgatccggggtccggtcgccgccggccggcggaagcgggcaatcgagctccgcgacgtcgagatctgcttaattgctaggtggtcgccgcgccggcagccccggcacagagaaagtcaattgctctttgcaggggttgctgctcgttttaaaagagatcctttgcagtggatgatacaccgacacgcagctagccagcagggacaccgcgagatggcgggcgccgtcgggctaacaagacgatgataaggggcggcaaccaccagcaggcggcggacgtcgaggaggagctagcccggaacagcaggcacgccgccgccgtggcgacgtcgcggcaatggtcggcgcagacggagtcgcgcatcgtgcgcgtctcccgcgtcttcggcggcaaggaccgccacagcaaggtgaagaccgtcaagggcctgcgcgaccggcgggtgcgcctctccgtgccgacggcgatccagctctacgacctgcaggaccgcctcggcctcaaccagcctagcaaggtcgtcgactggctgctcaacgccgcgcgccacgagatcgacaagctgccgccgctgcagttcccgccgcaggacctcatggttggtcacctgacgccccacaacatgccgctgatggtgcacgacgagaagttcggacacctcgcc

SEQ ID NO: 3704 - DNA, 869 bp, Zea mays
  Clone ID: TF_ZmC819_2
cctcgaggccggcccgccgccagctgggacatcgtcccgtttgattctcagccgtagtaggagccatggtcgaagctatttgatctatctctgagctgagctgagctgggccggcaatttgatgatgcttgtgtgtgtgatcatgagtggataataagagatgataagcggcaacctcaccaatgaagacctgggggccgggcgcacgcgcaccaaggccgaggggccgacgaccgcggccgtggccggcgccgtcgtcgcaaagagtcccgtgctgccgagctcccggcaatggccgccgtcaacggagtccaggatcgtgcgcgtgtcgcgggtcttcggcggcaaggaccggcacagcaaggtgaggacggtcaaggggctgcgcgaccggcgcgtgcggctgtccgtgccgacggcgatacagctctacgagctccaggaccggctgggcctcagccagccgagcaaggtggtggactggctgctcgacgccgcgcagcacgagatcgacaagctgcctccgcttcagttcccaccgcaggcagcgcaggacctcgtcgcccatctgccgccgccatccatggtggcgcccttcgcagccgaccgggccgaggccgacggcgacaaacgccactgccacgccggcgtcaaagggctcatgggcctcaacaattccatccgcctcgtcaacgccaccatgccgctggctcacggcttgtactacacgcccggcgagtcttggaccgtaatgccgatgatgccgccgccctcatcacggctcacgactcgcctcatctctgctgtctctctgctccgctcagctcgttatgtattgctatgctggctctgtgggagagagtgttgat

SEQ ID NO: 3705 - DNA, 2236 bp, Zea mays
  Clone ID: TF_ZmC1447_2
atggcggcggcgggcgtttctccggcatttctccttcgtttgctctcccgatgttcagatctgagcgggttttgtgtcgggcggctcaagttccagccgcggtgtcgggtacctcggcaaggtcgaagtgatcgcagtcacttcgccctttcactgaccgacctgataggaaaacagcgccgctcgcgctgctccgactgctgtgccacccaccggggtaagactgacaacagccgagttcagcctcgggggcaacaggaagctgcgcctcgcccgaccttaggcctcggcctcgggaggaggtctccgcctcgcccgaccccaggaagctccgcctcgcccgaccttaggcctcggcctcgaaaggaggtctccgcctcgcccgaccccaaggctcggactcagcttcggcctcgggaggaatcgcgtcctcgcccgaccccggcctcggcctcaggagaagtctccgcctcgcccgaccttgggctcggaccgaccgcgccacaggggatacatcattaccctaccctagctaactcaggctacgagggaacaagatcggcgtcccatctggctcgccccggcgtcgcagcaccggcccgagtactccgttgtcccgttgtccgctcccactccactccggcccagctgcgtgctgctcccgtgctccggcaccggcaggcggataagcccagcaggcaagcatgcaggagactaggagaggaggagagctcagctgcagcactgcacgcgcgctcccctccccttgctggccaaatcgatcggtccccttcaggctccaggctccggagcttgctttacttcagatttgcgcgattccccttccaaaaagaaccaatcggtttgctactagatcggtgcgcgaggctagactttttctgggaattcaaccggcgaatgggcagggacggcggccgcgtgcgcatgagccgcgtattggcaactggggatgagcgcggcatgggcgaggtagcaggcgtggagcgcgccgcctgcaagcgcccgcgcggcgcgctcgacggcggcgggtcggcgtcggcggccgcgtggccggcgtgccgggtggcgcgcgccgcggccggcggcaaggaccgccacagtaaggtggtgacggcgcgggggctccgggaccgccgcgtccgcctctcggtgcccacggccatccagttctacgacatccaggaccgcctcggcgtcgaccagcccagcaaggccatcgagtggctcatccgcgccgccgccgccgccatcgacggcctcccgtcgctcgactgctccttcgtcttcccccacgccgccgcctctccgccgggcggcgctgccgacgacgccgagctcagcacctccgagaccagcaagagctccgttctctcgcttgccaacgccccggttgacaacaccgccgccaccgccgctcactctcagcaagccaatcacgcctacaacaacaacgccgccgccggtggtggcgcgttcgccgagctgatcctgcactgctccgccaacaacagcagcaagccaatgcagcagcacccgacgctcgcttactacgccacccagcccccgaacgctcactccgcgtcggccatgtccttcgagacgatgctgccccacttctccttccttcaggagcagtctcaccacgcaatcgccttcgaccggggcacacttcagtccaatgccgccgttgctgcgccgctgtggccgacgtctcagcatgcgtgcctgctgcagaggttcgccgcttctccagctgatgccaccggactgccgtcgttctttcttggaagcggtgctgctggtgcttctccggtggtgccggccaatgcagagccgaggcttcagctctgggacttcaagcaggaacggaagacctgatgcattccagaagcaaattcattccatcataaggctgcaacaccatctagtggagggtgttctggacaaagaaagcttgtaccttaaaacaggagcattcaagaagctggagtggttgtatgaagagcttttgaactgcttaagcattagtgtagctttggtgctttgtgactgatcagatatggaacagctagagtgatatagatgtagggtttttgaacaatagttggagtgatatgaaacattagtgatctagttgtgaatgatattataattgtaatacttttgtgaacatataattgtggtgcttttgtgtttaaaaaaaaaggaaagaaaa

SEQ ID NO: 3706 - DNA, 663 bp, Zea mays
  Clone ID: TF_ZM4320.C3.o16.fg
atggccaccacccgcgaggtctccagcagcgccgccgccatgttccacgtctaccagacgataccgatgccgacgccatcgacggcagcggccggcggcggcggcgccatggtgtcggtgtcggcccccgcgaagccgggcaagaaggagggcggcggcaaggaccggcacagcaaggtgaacgggcgcgggcggcgcgtgcgcatgccgatcgtgtgcgcggcgcgcgtgttccagctcacccgcgagctggggctcaagtccgacggccagaccattgagtggctgctccgccaggccgagccctccatcgtggccgccacgggctccggcaccaccccggccgtcttcgtctcctcctccgcgccgtccacgttctcctcctcctcccactaccaccaccagcagcaggccaccgtcgtcctcggcaagcgcccgcgcgaggaaggcgacgccgcggggtccgtgttctgggccgcgctgccggcggcgccgcgggccacggaggcctggggcttctcgccgctggaggcgcaggcggcggcggccgcggccgcggcggcgtacgtcccgatggcgcaggcgcaggcgcagcaccaccacctcaacctgctcgccgcgctctccggcgccgcgaggcgcgccgaggaggagacccggtga

SEQ ID NO: 3707 - DNA, 1192 bp, Zea mays
  Clone ID: TF_ZmC12025_1
gctgggggtgtggttttttttttacaaaaaaaaagaagccgcttttataaatggctccacaccggaggggccaaggactggcgcggccctatccctatccggctatccccatcggcttcctccccacaagtcgtgtccaccaccaacaaactcgtggggtgggtgccacgagacagtgcgtggccatggcctctcgcgacggcgccaccttccaagtgtaccgggccatgcccgcgccgacgccgatgtctctggcgtccgccgctccagccgcagccgccgccgacgccgcggcgccgaagaaggcgggcgcgggcgcgggaaaggaccggcacagcaaggtgaacgggcgcgggcggcgcgtgcggatgccgatcgtgtgcgcggcgcgcgtgttccagctgacccgcgagctggggctcaagtcggacgggcagaccatcgagtggctgctccggcaggccgagccctcgatcctggcggccacggggtccggcaccacccccgccgtcttctcctgctcctccgcaccgtccacctccgcggccagcgccggtgccggcgccggcgccggtgtctccctcccgctcctcgggaagcgcccgcgcgaggagcacgagccggcggtggcggtggcagtggcgccggcgccgttctgggccaccctgcaggcgcggcccgtggcggcggcgtgggggctctcgccggcgcaggaggcggcggcgcaggcgtacgcgtcggtggcggcgcagggacaccacctcaacctgctctccgtgctctccggcgccgcgaggcagtcggaggaggagtcccggtgactgcctgcatgccgccgccgccgcactgttgctacgtaatcgcatgcgtcgacgcgtggtggcatgccgcgcgcatgcgtctcgtttccgtgcatctccggggggtgcgttgcgcgtgttttccctgtggttttgcggtgtgagaggaacgcggcgagctggacaaggaggatccagagcgcgagatcggatcggggttagcggctgtagatagcattcgtcaggttcgtgtttgtgataatgagctcgccgtagcgcgcgcggtggttatgtggtgtggttatgtatgcatgcatgcatgccgaattgtcaactgatctgaatcctaacactaaataatgcattgcacgtcccggtgtgtgcaattccgc

SEQ ID NO: 3708 - DNA, 534 bp, Zea mays
  Clone ID: TF_ZmC386130_1
atcgtgcggtctgccgccgggcgcaaggaccgccacagcaaggtgtgcaccgcgcgcgggctgcgcgaccgccgtgtccgcctcgccgcgcacacggccatccggttctacgacgtgcaggaccggctaggctacgaccgccccagcaaagccgtcgactggctcatccgtaacgctaaggccgccatcgacgagctttcggccgaccgggaagaggggcagcctgccgcggaggcagcggatgccactactaccgagccggccgagcaggtgacctcgacgtcctacgggttcgccatcggtggtgtggccggctccttcatgccacattcggtcggtgccgatgacgtctccggctccggctccggctccggctccggcaacgtcaagtctttgttcccctcgtcgtcgacaacgagcactacccccacccaggacgagtacaggggctccccgccggaccttctgtcgcgcacgaccagcagcaaccagcctcaggagctttgcctcactctccagtctaccaataaccac

SEQ ID NO: 3709 - DNA, 584 bp, Zea mays
  unsure (1)..(584): unsure at all n locations
  Clone ID: TF_LIB3354-089-Q6-N6-C3
canacggacgccgcggcgatggtggtggaggccatgggcggcgccgggggcaagcggggcagggccaagggcgcgggcgcgggcgccgagccggagcccaagctacgcgcgatggcggtggccgtgccgtctcccgccgcctcgccgtgggcgcagcagcacccggcctcgcggatctgccgcgtttcccgggcctcctgcggcaaggaccgtcacagcaaggtgtacacggacaagggcattagggaccgcctcgtcacgatctctaccgtcgccaccgccatccagttctacgacctgcatgaccgtctcggctacgaccagcccatcaaggccatcgagtggctcatcagggccgctgccgaggccatcgacaagctctcctcgctcgacgcctccgtgggcttccccgcgcacctggccttcgccaaggaccactcctagcctgtcggtgacgacgacgaccaccaccaccagcagcagcatctcacgaggtccggatgcagcagtacgtccgagaccagcaagggctacgtactgtccctctcccgctccgagagccgggtcaaggcgcgggagcgcgc

SEQ ID NO: 3710 - DNA, 1334 bp, Zea mays
  Clone ID: TF_2051978
gccttggagtcccatcagtaaagcacatgtttcctttctgtgattcctcaagccccatggacttaccgctttaccaacaactgcagctaagcccgtcttccccaaagacggaccaatccagcagcttctactgctacccatgctcccctcccttcgccgccgccgacgccagctttcccctcagctaccagatcggtagtgccgcggccgccgacgccacccctccacaagccgtgatcaactcgccggacctgccggtgcaggcgctgatggaccacgcgccggcgccggctacagagctgggcgcctgcgccagtggtgcagaaggatccggcgccagcctcgacagggcggctgccgcggcgaggaaagaccggcacagcaagatatgcaccgccggcgggatgagggaccgccggatgcggctctcccttgacgtcgcgcgcaaattcttcgcgctgcaggacatgcttggcttcgacaaggcaagcaagacggtacagtggctcctcaacacgtccaagtccgccatccaggagatcatggccgacgacgcgtcttcggagtgcgtggaggacggctccagcagcctctccgtcgacggcaagcacaacccggcagagcagctgggaggaggaggagatcagaagcccaagggtaattgccgcggcgaggggaagaagccggccaaggcaagtaaagcggcggccaccccgaagccgccaagaaaatcggccaataacgcacaccaggtccccgacaaggagacgagggcgaaagcgagggagagggcgagggagcggaccaaggagaagcaccggatgcgctgggtaaagcttgcgtccgcaattgacgtggaggcggcggctgcctcggtgccgagcgacaggccgagctcgaacaatttgagccaccactcatcgttgtccatgaatatgccttgtgctgccgctgaattggaggagagggagaggtgttcatcagctctcagcaatagatcagcaggtaggatgcaagaaatcacaggggcgagcgacgtggtcctgggctttggcaacggaggatacggcgacggcggcggcaactactactgccaagagcaatgggaactcggtggagtcgtctttcagcagaactcacgcttctactgaacactacgggcgcactagacttcgtaattggctgtgtgacgatgaactaagtttggtcatcgcatgatgatgtattatagctagctagcatgcactgtggcgttgattcaataatggaattaatcggtgtcgtcgatttggtgatttccgaactgaaaaaaaaaaaaaaaaaaaaaaaaaaaa

SEQ ID NO: 3711 - DNA, 661 bp, Zea mays
  Clone ID: TF_ZmC585932_1
tccccgaagagtgaaaggcgtcttcgtctcgacttgcttcccctccgagagaccgacctacccatccaatccatacactttcctgcaaagggtaggggatagacagggattctaaggctccgctccacaccaagagtagcgaagatctctgatttgagagagggaagcatcgaatcagccgacaggaggaggtctcagtcaccaacccagcagcagccatgagtgccatgaagttttgccgtgaatgcaacaacatcttgtatcccaaggaggaccgggaccagaaggtgctcctcttcgcctgcaggaactgcgaccaccaggaggttgcagacaacaactgtgtctaccgcaacgtggtgcaccacagcgctggagagttcacccaggtgctccaggacgtcgccggcgacccaacacttccccgcaccaaggaagtccggtgcgccgtctgtggtcacggcgaagctgtcttcttccaggccaccgcgagaggtgaggatgggatgacgctcttcttcgtctgctgcaacccgagctgcggtcatcggtggagagaatgatgtgtccatcacccaaccgatgacggatttcaccgatgcacagtctgagagaagttgttttttctttcttcccaagagatattttccccagtagcatg

SEQ ID NO: 3712 - DNA, 662 bp, Zea mays
  Clone ID: TF_LIB5116-028-A1-PF1-D6
cattacaggaaataagagatctactggaccaggtaaatgcatgcgacccatatagagttgctgtgacagtggagtcggccttgtttgagaggatcgggcgttccactgggacccacaaggtgaaatacaggtcgatactgttcaacctaaaggcggacaacaaccctgacttccggcggagggtgctgctgggcgaggtgaggcccgggagcctggtggatatgccagcggacgagatggcgagcgacgctcggaagctggagaaccagcagatcaaggagaaggccctgtttgactgcgagcgcgcgtcggcgcccaaggcgtcgacggaccagttcaagtgcgggcggtgtgggcagcgcaagacgacctactaccagctgcagacgcggagtgccgacgagcccatgacgacgtttgtgacgtgcgtcaactgcaacaaccactggaagttctgctgagcgctgctgcggacttgtcggaccgctagcgcgtttttcctgttagtgatgccgtctcagtcttgacaggtaggttgggttggtcctgtttttcgtatgcttaggaggatactgttttcgtctgttgttttttctgtgtttgggaaccctgatttattcagattgtgtactagttgaccgcataaatgttgttggatgaag

SEQ ID NO: 3713 - DNA, 384 bp, Zea mays
  Clone ID: TF_ZmC176903_1
cgagacttgggcaagcgagtcatgacaggtgatatctcgcccgacaggtttgtcaacatgtcggatgaggagctcaagagcgaggatcaacgcaagatggaaatcgagctggagaaggagaacatgaagaaggcccaggtaccaatggccgagaagagcatcagtgacagtctggaatgcggcaagtgtaagaagaagcgtgtcagctacacccaggcgcagacacgaagtgccgatgaaccgatgacgacattttgcgagtgtatgaactgcggtaatcgttggaagttctcgtaaagtggcaacgagagaggagttttacggttgatagcgccacgtctgctccaaggggttgaaagacagcatttcaacgagctttttatt

SEQ ID NO: 3714 - DNA, 1013 bp, Zea mays
  Clone ID: TF_ZmC28241_1
gcaggtcggggcgcccaagatcccccctcccactcaacgacttgctgcaaagaggaatacgattcagcttagctcagctccaccaccaccaagaacaagatctcgacgaagcagccagacgacaggcaggtagcaccggggtcaacgcggcagacaaacaggctctcccgctcgtcagctagcagccatgagtaccatgaagttttgccgtgaatgcaacaacatcctgtaccccaaggaggaccgggagcagaaggtgctcctctacgcctgccggaactgcgaccaccaggaggtcgcggacaacaactgcgtgtaccggaacgtggtgcaccacagcgccggggagttcacccaggtgctccaggacgtggccggcgaccccacgctgccccgcaccaagtccgtgcgctgctcctcctgcggccacggcgaggccgtcttcttccaggccactgcgagaggggaggaagggatgacgctcttcttcgtctgctgcaacccgagctgcggcaaccgttggagagaataatggacggttcctctggcgcaacagccaggacgacatgattttttttgcaagattttcatccgacagacctgctgctcccccccatatgagcatgtcaactgattggattggattggattggattgtactactatgttcccagtgcgttcagacatttcaataacttgccggcagggtaaacttccctgtggcctgtgcttcattcatttgcatcaaagaaaggatgagatgaggaaaactttttccatgttcgaatgattccctctgcacctaaaggatgagatgaagaaaggatgagatgaggaaaattaccgtcaggtgaggtggagaaactgtcctcacttcacatgacacagggttatgcaagttctctctctatatttctgttttctttttaccaatttctgcagctcatggttatgcaagtacaaattcttgaacagccacgtgcttaattaaaaaaaaaaaaaaaaaaaaaaaa

SEQ ID NO: 3715 - DNA, 1220 bp, Zea mays
  Clone ID: TF_ZmC2003_1
atgggtatgagaatccaatcttatgatgaccagttacttcatttagctgctgacatagctcaaaggttgttgcccgtatttgacactcctaccccggccgggatcggttcagaccagacccaatacacgtttctttaccctgaacttttcgctactccatcgagggcagagccgccgccgtttcttcaatctcgcagcgccggcgcttcatcttccctcccttttttactcgcgatcggcacgcaggcggcggctgcggcgctcaggctcgggctctgcgactgcgtcagcggcttcccctccggcctctcgccagtcaccgcgcgccctcggccccggtcctctgcacaccggccggtgaccctgcgtgcttgcctttctcctcccgcctccggtggatcgtcaacggcgcccggccccggcggcagcgctgcgcgcgtctcgagggcagcgggagccagcagccgctgctccaccaaggcggaagcattttggaaccctgaactctgggctttaagaagacactactgctgcaaccatgagcaccatgaagttttgtcgcgagtgcaacaacattctgtaccccaaggaggacagggacaggcgcaccctgttctttgcatgtcgcaactgcgagcatcaggaggtctctgacaataactgtgtctatcggaacgaggtgcaccatactgctggggagcgaacacaggtcttgcaggatgtagcttctgatccaactcttcccagaaccaagactgtccgctgcaatctctgtgggcatggagaggctgttttcttccaggccgcagcaagaggggaggaggggatgaccctgttctttgtgtgctgcagccctgattgtggtcatcggtggagggaatgatgcgatgaaatcttcgctctaatagttgtttcatcagagcatgaaacttaacttgttttgtagttttcttggactatgtatttcgaatctgacctaagattaatgagagaatgtctttccaataaaaaattaaaaaaaaaaaaaaaaaaaaaaaaaaaaaaaaaaaaaaaaaaaaaaaaaaaaaaaaaaaaaaaaaaaaaaaaaaaaaaaaaaaaaaaaaaaaaaaaaaaaaaaaaaaaaagggggggggtcgttttaaaaggaaccaaattttatttacccggttgctatggaaagataaataatttttttttttggggggtcccttaaaaattaa

SEQ ID NO: 3716 - DNA, 623 bp, Zea mays
  Clone ID: TF_LIB4828-016-R1-N1-F12
ccggccgggggaccaagccctataaaccagggtttttgtaaggaaaatccccgtcgttctcgcgtctggagctcggcggcggagcagggcggcagggggagggcgatggaattctgcccggtgtgtgggattctgctgcagatcgatccgggcaccggaagccaccgcctgcgcctcttctgccccgtctgcccctacgtctgccccatcctgaacaagatcgtgaagaaggcgaggttggtcaaaaaggaggtggagcccatctccagcacggcggatgagatgaaatcggcccctaagaccgcagttacatgccaaagatgcaaccatggagaagcatacttcaagcagatgcagattcgatcagctgatgaaccgatgacaacaatatacaggtgttgcaaagaagaatgccagcatgaatggagagaggactgaccatagcattcgcactttgcttacacttcgctccctgtgcttcttcagttttgagtgttgggatgtcctgttgcacatgtaatgcttctaatcagcgtatacttaagtacaaatttttggaaatgtatgttctatactatggcatcgctttttggctacaaaaaaaaaaaaaaaaatttgcggcc

SEQ ID NO: 3717 - DNA, 820 bp, Zea mays
  Clone ID: TF_ZmC10090_1
cactccatagggcgattgggatcctcgaggccggccgggccattgggccaacatcgggcccattaaattgatatactcgagcacgcccgggacggcggcgctcggttccgtggcggggagtgttttccaggcggcggcgcggtagcgtgaaaccgggcgaccgagcaagcgacggccatggcgttctggcagacgcgcgattttctcttctgtggcatatgcggcaccctcctcaccttcgactccgtccgctccgcctcctgccctctatgcggcttcaagcgcgatgccaaagaaattgaagggaaagaaatacagtacacgatgaccgccgaggatattcgaagagggttaaagacacaaacggaggacgttgttgggcaaagaccagtgacaaataaagcctgtccaaaatgcgaccatccaaaagctgaattttacaacatacagatgcgttcagcagatgagggagagacgacgttctacatgtgtaaaggatgcggctgtaatttcaaagacgaatgaggagttatcctaccacttctacggatatatggcattggtgccgaagaaatttccagcgttgacagactagtactccctccgccctttttttatttatcatcgtctagttcaaaaatgaacggccgataaatattcgagaattgcaatctactccttgacattgttacattacatggatgcgcagatccatgcgttgtgcaaactttcttttgatggaacctgttttgtattttattcgagtgtgtagatgtctacttgcaacctttttacatctattccaaactataagacgttt

SEQ ID NO: 3718 - DNA, 774 bp, Zea mays
  Clone ID: TF_ZmC206_1
ccggccgggaaaccgacccatcatatcatcaccctgagagatccgtcccgccaatacggaccaagcccaataaaccagggtttttgtaaggaaaatccccgtcgttctcgcgtctggagctcggcggcggagcagggcggcagggggagggcgatggaattctgcccggtgtgtgggattctgctgcagatcgatccgggcaccggaagccaccgcctgcgcctcttctgccccgtctgcccctacgtctgccccatcctgaacaagatcgtgaagaaggcgaggttggtcaaaaaggaggtggagcccatctccagcacggcggatgagatgaaatcggcccctaagaccgcagttacatgccaaagatgcaaccatggagaagcatacttcaagcagatgcagattcgatcagctgatgaaccgatgacaacaatatacaggtgttgcaaagaagaatgccagcatgaatggagagaggactgaccatagcattcgcactttgcttacacttcgctccctgtgcttcttcagttttgagtgttgggatgtcctgttgcacatgtaatgcttctaatcagcgtatacttaagtacaaatttttggaaatgtatgttctatactatggcatcgctttttggctgcaaaagacattgcatgacacatcatctagagttatttgtgatgatgatctcaatcatcagtgagagctcacttaaaaaaattcattgagttaaaaaaaaaaaccaatgcttttttggaaaatttgcggtc

SEQ ID NO: 3719 - DNA, 584 bp, Zea mays
  Clone ID: TF_ZmC206_2
gctgacgtctggagctcggcggcggagaagggcggcagggggagggcgatggaattctgcccggtgtgtgggatgctgctgcagatcgatccgggcaccgcaagccaccgcctgcgcctcttctgctccgtctgcccctacgtctgccccatccagaacaagattgtgaagaaggcgaggttggtcaagaaggaggtggagcccatcttcagcacggcggacgagatgaagtcggcccctaagaccgcagttacatgccaaagatgcaatcatggagaagcatacttcaagcagatgcagattcgatcagctgatgaaccgatgacaacaatatacaggtgttgcaaagaggaatgccagcatgaatggagagaggactgatcttaacattcacgctttgcttacactacgctccctgtgcttcttcagtttttgagtgttgatatgtcctgttgcacatgtaatgcttcttttaatcagcgtgtacctatggcatcgctttttggttgctagagacatttcatgttgcgcttagtaggtcaatcttaacggaaagtttcattaaaaaaaaaaaaaaaggcggc

SEQ ID NO: 3720 - DNA, 1573 bp, Zea mays
  unsure (1)..(1573): unsure at all n locations
  Clone ID: TF_ZmC11532_1
ggcgattgggtttcctcgaggccggccgggctggcctggccggtctgcctcgtccgcttctctctcacccttcctccccctcctctcctgtgggtgctccctccctctccggctctccgcctctcccccgccccccaagcccaaatcaccgcgcctcgccccacagcaccggttgcgtgggaggagggaggaaggaaggaggggaggcggctgtcgggcgagatgagcgactcctactgccccgactgcaagaagcatacggaggtggcgttcgaccattcggcgggggacacggtgtgcaccgagtgcggcctcgtcctcgaggcgcactccgtcgacgagacctccgagtggcgtaccttcgccaacgagtccaacgacaacgaccccgtccgcgtcggcggcccctccaacccgctcctcaccgacggcggcctctccaccgtcatcgccaagcccaacggcgcccagggcgacttcctctcctcctccctcggcaggtggcagaaccgcggctccaaccccgaccgatccctcatcctcgccttccgcaccatcgccaacatggctgacaggctaggtcttgtggctactattaaggaccgagcaaatgaaatcttcaagaaaattgaagatctcaagtctattaggggaagaaatcaagatgccatattagccgcatgtctatatattgcttgtagacaagaagatcgccctagaactgtgaaagaaatatgttcggttgctaatggggccacgaagaaagaaattggcagagccaaagaatttatagtgaaacaactggaagttgagatggggcaatctatggagatgggaaccattcatgctggagattttctgaggcgtttctgttcaactcttggaatgaccaatcaagctgttaacgcagccaaggaggcagttcagcgctcagaggagcttgatataaggaggagcccaatctcaattgcagccgccgtcatttacatgataacccaactctcagaggacaagaagccacttaaagatatatccttggctactggtgtggcagaaggcaccatcagaaattcgtacaaggatctgtatccctacgcctcaaggctcatcccgaatacctacgccaaggaagaagacctgaagaatctctgcacaccttaggaagctttactttttttcccttctgttatataaatcggaattagatttgtcaaagaggagtgagtgaagttgttcctgttgtgaccgactgtactgagcaatgtgtcgtcgccggcgcgcttaactttgtggatggaccaatgagaacataagttgtcatcatcagatcgaatttcttttcagagcacctaccaaataaaaaaagccgggatacgtatactcactctttagaacaagatcgggaaggacaacgggaaggcgcacatcccccacgcgcccgacgaggactncaccctgctgcgaacccactaacacgactgctaagacagggggtgcgacgcgataggggtggtcaacgcgacggacggaaaaaaggcggagaaggaggggaaggcaaaactgacactgcacg

SEQ ID NO: 3721 - DNA, 907 bp, Zea mays
  unsure (1)..(907): unsure at all n locations
  Clone ID: TF_ZmC11532_3
cctcgagggccgtgccgacnngctaacagagcanntcccaggctccccggccgggagacatctatacccccacccacccaaccttcggcagtccccatcctctcctgtgggcgctccctctccccggcccccaaatcaccgcgcctccctcgccacgcctcacagggccggttgcgtaggagaaaggagaaaggaaggaggggaggcggtcgtcgggcgagatgagcgactccttctgccccgactgcaagaagcatacggaggtggcgttcgaccactcggcgggggacatggtgtgcaccgagtgcggcctcgtcctcgaggcgcactccgtcgacgagacctccgagtggcgcaccttcgcgaacgagtccaacgacaacgaccccgtccgtgtcggtggccccaccaacccgctcctcaccgatggcggcctctccaccgtcatcgccaagcccaacggtgcgcagggcgacttcctatcctcctccctcggcaggtggcagaaccgcggctccaaccccgaccgatccctcatcctcgccttccgcaccatcgccaacatggctgaccggctaggtcttgtggctactattaaggaccgagcaaatgaaatctacaagaaagttgaagatctcaaatctatcaggggaagaaatcaagatgccatattagctgcatgcctatatattgcttgtagacaagaagatcggcctagaactgtgaaagaaatatgttcagttgctaatggggccacaaagaaagaaattggcagagcaaaagaatttatagtgaaacaactgggaagttgagatggggcaatctatggagatgggaaccattcacgctgnaattttctgagaagtttctggtcaactcttgggatgaacaatcaagctggtagggc

SEQ ID NO: 3722 - DNA, 948 bp, Zea mays
  Clone ID: TF_ZmC11532_5
agaaattcttgacttcctagatactagaattcataaccatgcaacactcagttcgtctatttttcttgatttgtgttcgattgttgcagaaatatgttcagttgctaatggggccacaaagaaagaaattggcagagcaaaagaatttatagtgaaacaactggaagttgagatggggcaatctatggagatgggaaccattcacgcttcagattttctgagacgtttctgctcaactcttgggatgaacaatcaagctgttagcgcagccaaggatgcagttcagcgctcggaggagcttgatataaggaggagcccaatctcaattgcagccgccgtcatttacatgataacccaactctcagaggacaagaagccacttaaagatatatccttggctactggtgtggcagaaggcaccatcagaaattcgtacaaggatctgtatccctacgcctcaaggctcatcccgaatacctacgccaaggaagaagacctgaagaatctctgcacaccttaggaagctttactttttttcccttctgttatataaatcggaattagatttgtcaaagaggagtgagtgaagttgttcctgttgtgaccgactgtactgagcaatgtgtcgtcgccggcgcgcttaactttgtggatggaccaatgagaacataagttgtcatcatcagatcgaatttcttttcagagcacctgccacctgaagatttttttgggatagcaaaggtgtcgttttcgtatactccctttgggaaaggatgtagatagcaagcagtccttggaagtgcacaagattttatttaaaagaacaggattctgttccccatcttcaaaaaaaaaaaacatttatccgccaccgcggtggagtttggatggctgctccattgtgttttcccctgtgactgatatacaggtattgattctggagaatct

SEQ ID NO: 3723 - DNA, 1526 bp, Zea mays
  Clone ID: TF_ZmC11532_4
tcccacgcgtccgccctaatggtgtgtttggtttgtggagtcaccatatgcttcatgaggtgatgcatcataagttcttcccataaattttggtggactcaatccactcatcatgtatatactaattattagcttatgaggaataagatgatgatggatcaactcattctattccataaaccaaataaaaaagtgaggagtgagaagaagatgaaccacttcattcttcaaaccaaacacaccctaagtgattcatgttatgtatatgtatggtagccttttttctctttttgaagatagatgacatgtttaacacttccctaaatactcattgagtcattgaacatattgttgcttcctgtgttcgatagaacaataacttatagcttaattcagctaaattactgatatgtagtactccctccattaaaaaatggtaatcatattagaccagagaaaaagtcattcaaaatagattttgaccatcaatttctcttgtaatgtaaagtcgacggtctaaaaataaataccatcttataggcacttttaacacaaatctattgatgcagattatatgctctaaactttaatggaatttgattagttggtcaaaatttatgaagtttgactttttctctggccaaatatgattaccacttctgaacggagggagtaattatttgtttttgtctttactcttcaaggaccgagcaaatgaaatctacaagaaagttgaagatctcaaatctatcaggggaagaaatcaagatgccatattagctgcatgcctatatattgcttgtagacaagaagatcggcctagaactgtgaaagaaatatgttcagttgctaatggggccacaaagaaagaaattggcagagcaaaagaatttatagtgaaacaactggaagttgagatggggcaatctatggagatgggaaccattcacgctggaaattttctgagacgtttctgctcaactcttgggatgaacaatcaagctgttagggcagcccaggatgcagttaagcactcggaggagcttgatataaggaggagcccaatctcaattgcagccgctgtcatttatatgataacccaactctcagaggacaagaagccacttaaagatatatccttggctactggtgtggcagaaggcaccatcagaaattcgtacaaggatctgtatccttatgcctcaaggctcatcccgaatacctacgccaaggaagaagacctgaagaatctctgcacaccttaggaagcttactttttccccctttctgttactacataaatcggaattagatttgtcaaagaggagtgagtgaagttgttcctcgttgtgacagtaccgggcaaggtgtcgtccccgctgtgcttaactttatgatggaatttcttttcagagcacctaccacctgaagatttgtgggatacgtatactcacttctgaaagaatgtagatagcaagcagctggacaagcacaagattttaatttaaaacatgattttgttctcc

SEQ ID NO: 3724 - DNA, 1099 bp, Zea mays
  Clone ID: TF_ZmC246942_1
ccggccgggaaaaaaaagcgggtgtgggaggttgggcaggagacgtttttttttccaccgtcgccgccgcccctgcttgccgctgcgcgcccccgcctcccacgcaggtcgtctgctccgaagccggtggccgaagctcgcgtcgccctctccctcaccggattcatcgtccgagccctcgctagagctcgtgacctcgccgtcgccggagccctcactctcactggattcgtgtcctcgccggagctcgcgctaacctgctcgaccacacctcgccgcccgcggccatctcacacccactccgcgcgaccgcggtcctctcctcacctatcggtcgttcctgtcctcgcgaggaagacgacgcctcaagctatcctccctccctctcgatctgatccggagtggctcacgttttcctattcctcgccagcggcagaggcggcaaccgtcgatccgtgtcaatcctctattagattggtatgagctgatcacccctggttgtgtagttccttctgcaatggtttactgcactcactgtgctgattactgcccctccataaaggaccctgacaaaggatacatatgttgtggtacatgtgggaaggttcttgatcaggaggtatacactgatgagcctacttttgttaaggataacacaggacagagtcgcttagctggaagtattcttgcaagcattgagtctggatattcgatttctcatcaaagaaccttagacaaaggtagggatgagattaggcagattgtcaataacttacatgtcagcggtggagaaactgtcgttagcaaggcttatcgcttctatgagctagctgtcgaccgtaattttaccaggggccgtagaacaagccatgttgcagctgcttgcctttacattgcctgcaggcaaagtaagaaggcttatcttcttattgatttctctgattatctccaaataagtgtttacgtgctaggtgctgtttttctccagctctgccaagttttgctactcgcggatcatccagttgttcagaaacttgtagatcccagccttttcatccatcgctttaccaaatgtttgctggaaaaaagagataatgct

SEQ ID NO: 3725 - DNA, 1735 bp, Zea mays
  Clone ID: TF_ZmC9889_2
gacctcgccacagccatcgatcccgccccgtctccttcccccggcgacgaagatgacgaggacccctttctccccgcgggcttcgtctccgccttctcggctttctccctcgagcgccaccccgtcctcgcccgctccgcctccaccttctctggacacctcgccgagctcgagcgcgcgctcgctgtcgactccgccaccgcggcctccaacccggaccccgccggccccatggtctccgtcgacagcctccgcgcctacctccagatcgtcgacgtcgcctccatactcaggctcgacagggacatagcggatcacgctttcgagctcttcaaggattgctcgtccgcgacttgcctcaggaatcggagcgtcgaggcgctcgcgaccgccgcgctcgtgcaggctatccgcgaggcgcagcaaccacggacgctgcaggaaatctctactgctagcaatcttcctcaaaaggagataggaaaatacatcaaaatactcggcgaatctctgaaactgagtcaaccacttaacagcaactcaatagctgttcatatgcccagattttgcagcttgctccagctgaataaatctgctcaggaacttgcagctcatattggtgaggtggttgccaataagtgcttctgcacacggcggaatcccataagtatatctgctgctgctatctaccttgcatgtcagcttgaagacaaacgcaaaactcaggcagagatctgtaaggttacgggcctcacggaggtcacactacgcaaagtgtacaaagaactgttggagaattgggatgatttgctcccccctgactatacacctgccacaccaccagagaaagcttttcccatgaccaacatttactcagggcgctcagcgagtggcaaggatatgtatcaggataagatattcgagagtattaagcaaaaatgccctgagcctgcagagcctgaccacatggtcgtggtgaaagaagagggagacaagaaaacagctgctcttggccgtccgcctacaaaacttgaccatcctgagttaggcaaggtgttccggccaccaaatgcccctttctcaacatctcctaaatctgatcgtgacaaaacggaaactagcttacgtggattcaaccttaatgaggtatcatgtgcaatggactctgatagaacagacatcacagtgaaaccaacttttggtgatcgattgtcaaatgatcccaatgcgaatccatctcccaacaggcagcctttaccctggcagcttaagcaaggggcgcctgcaactgctccatcatattcaaggcttcgcgagcagcagtcgggcctggatcttgtagctgctctgaagggggttgggaaaaggagtcctggggatagtgatgtccgggataaagaagggaagtgaataattggtgctttgtagatggggaacgactattaagtgttaaatttgcaactatggtcggatcacgatccaaagttccagaggactcgcacacctaagtcttgcttgcacaacgttgttgctttgtagatgtatgtctgtagtagagttagtttagccacctctatggctcaatcactctgtatttcttttgcctcatgccggggctgtgaaatgtcatttcaggcgcattagcttctgttgtaaaattttactagtgtttatgaattatttatctgactaaagaggtgtttactttttaggaactaaaaaaaaaaaaaaaaaa

SEQ ID NO: 3726 - DNA, 1657 bp, Zea mays
  Clone ID: TF_ZmC11532_2
gggtacctcgaggccggccgggaacgttcggcagtccccatcctctcctgtgggcgctccctctccccggcccccaaatcaccgcgcctccctcgccacgcctcacagggccggttgcgtaggagaaaggagaaaggaaggaggggaggcggtcgtcgggcgagatgagcgactccttctgccccgactgcaagaagcatacggaggtggcgttcgaccactcggcgggggacatggtgtgcaccgagtgcggcctcgtcctcgaggcgcactccgtcgacgagacctccgagtggcgcaccttcgcgaacgagtccaacgacaacgaccccgtccgtgtcggtggccccaccaacccgctcctcaccgatggcggcctctccaccgtcatcgccaagcccaacggtgcgcagggcgacttcctatcctcctccctcggcaggtggcagaaccgcggctccaaccccgaccgatccctcatcctcgccttccgcaccatcgccaacatggctgaccggctaggtcttgtggctactattaagttctgcgttccacattcctaggttccaaacataccctaatggtgtgtttggtttgtggagtcaccatatgcttcatgaggaccgagcaaatgaaatctacaagaaagttgaagatctcaaatctatcaggggaagaaatcaagatgccatattagctgcatgcctatatattgcttgtagacaagaagatcggcctagaactgtgaaagaaatatgttcagttgctaatggggccacaaagaaagaaattggcagagcaaaagaatttatagtgaaacaactggaagttgagatggggcaatctatggagatgggaaccattcacgctggaaattttctgagacgtttctgctcaactcttgggatgaacaatcaagctgttagggcagcccaggatgcagttaagcactcggaggagcttgatataaggaggagccctatctcaattgcagccgctgtcatttatatgataacccaactctcagaggacaagaagccacttaaagatatatccttggctactggtgtagcagaaggcaccatcagaaattcgtacaaggatctgtatccttatgcctcaaggctcatcccgaatacctacgccaaggaagaagacctgaagaatctctgcacaccttaggaggcttacttttttccccctttctgttactacataattcggaattagatttgtcaaagaggagtgagtgaagttgttcctcgttgtgactgtaccgggcaaggtgtcgtccccgccgtgcttaactttatgatggaatttcttttcagagcacctaccacctgaagatttgtgggatacgtatactcacttcggaaagaatgtagatagcaagcagttggacaagcacaagattttaatttaaaacatgattttgttctccatcttctgaagaaaccatcacttgtccatcttcattcgaagtgccctccttgataccaagagaattgttagttgtctaaaattaggtaaaattatgatatgtttggactggcaaccccaatctagtcccattaactcctatgtattatgaattaataaggtgccgttccgttttcacggaacggagacttggaacaaaaaaaaaaaaacaagg

SEQ ID NO: 3727 - DNA, 2261 bp, Zea mays
  Clone ID: TF_ZmC9889_1
cattgggtacctcgaggccggccggggggtctctgcccatctccaacctcgagagcccaccaaacccaaagcccaggcctctccgtccccaatcccccatccggcttgccccccatgtcgtcgcagtgcccctactgccgcgcgtcggggccggcgcggtgcgcgacgacgcagccgccgctctcgcgcgccgtctccgagtgctccgcctgcgcccgaatcgtcctcgagcgccacctccacacgcaccccttcttccccctcctcccctcactccatccgctcccccttgtcacccccgacctcgccacagccatcgatcccgccccatctccttcccccggcgacgaagatgacgaggacccctttctccccgcgggcttcgtctccgccttctcggctttctccctcgagcgccaccccgtcctcgcccgctccgcctccaccttctccggacacctcgccgagctcgagcgcgcgctcgctgtcgactccgccaccgcggcctccaacccggaccccgccggccccatggtctccgtcgacagcctccgcgcctacctccagatcgtcgacgtcgcctccatactcaggctcgacagggacatagcggatcacgctttcgagctcttcaaggattgctcgtccgcgacttgcctcaggaatcggagcgtcgaggcgctcgcgaccgccgcgctcgtgcaggctatccgcgaggcgcagcaaccacggacgctgcaggaaatctctactgctagcaatcttcctcaaaaggagataggaaaatacatcaaaatactcggcgaatctctgaaactgagtcaaccacttaacagcaactcaatagctgttcatatgcccagattttgcagcttgctccagctgaataaatctgctcaggaacttgcagctcatattggtgaggtggttgttaataagtgcttctgcacacggcggaatcccataagtatatctgctgctgctatctaccttgcatgtcagcttgaagacaaacgcaaaactcaggcagagatctgtaaggttacgggcctcacggaggtcacactacgcaaagtgtacaaagaactgttggagaattgggatgatttgctcccccctgactatacgcctgccacaccaccagagaaagcttttcccatgaccaacatttactcagggcgctcagcgagtggcaaggatatgtatcaggataagatattcgagagtattaagcaaaaatgccctgagcctgcagagcctgaccacatggtcgtggtgaaagaagaggaagacaagaaaacagctgctcttggccgtccgcctacaaaacttgaccatcctgagttgggcaaggtgttccggccaccaaatgcccctttctcaacatctcctaaatctgatcgtgacaaaacggaaactagcttacgtggattcaaccttaatgaggtatcatgtgcaatggactctgatagaacagacatcacagtgaaaccaacttttggtgatcgattgtcaaatgatcccaatgcgaatccatctcccaacaggcagcctttaccctggcagcttaagcaaggggcgcctgcaactgctccatcatattcaaggcttcgcgagcagcagtcgggcctggatcttgtagctgctctgaagggggttgggaaaaggagtcctggggatagtgatgtccgggataaagaagggaagtgaatagttggtgccttgtagatggggaacgactcttaagtgttaaatttgcaactatggtcggatcacgatccaaaggcccagaggactcgcacacctaagtcttgtctgtagtagagttagtttagccacctctatggctctatcactctgtatttcttttgcctcaggccggggctgtgaaatgtcatttcaggcgcattagcttctgttgtaaaattttactagtgtttatgaattatttatctgactaaagaggtgtttactttttaggaactaatttttaatctttccattttattccattttaatccctacattgttaaacactgaaactaatactttattttagtttttgtatttggcacttatggactaaaatgaaataaaatagaaagactaaaaattagtctctaaaagttattccttccatttctttttagttgtcgctagatagttcaattttgcactatttagcgacaactaaaacgaaacggatggagtcaccatgtttcgtgcaatgaaatgcagttccttcaaaaaaaaaaaaaaaa

SEQ ID NO: 3728 - DNA, 641 bp, Zea mays
  unsure (1)..(641): unsure at all n locations
  Clone ID: TF_LIB3689-252-Q1-K6-A10
ngacatccctctctctctctctcggtgggggaccgcaccactctcgctcggtgtgtgggagagagaggaggggagggagctaggctggcatggccggccgcttgagctgcgcatgcctacaattcagtaccagtactagcaaagcaagctaggtaggagtaacacctccccaattgctgactggtactgagttagccatcccgtcgtcccggcagtcacttctacaagtacgcacgcagctacccagcagggcggctatactaatccctccctgcctctgccttccttccgaggaccgccgcggcgggccggggtgcgcgcacccgccatgcagcagcagcaccagggtggcggcggcggcggtggcggaggctcacagttcggggccccgccgccggacatgggccccttctcgccgacgccggctgctaccggtcccatgccgctgagcagcaggcctccgtcggcgcagccgcagcagcaaccgaggaccagctacgaagaattggcgcccatggtgcctggggccgccgctgccagtggcttcgacgacgagacgatgggtagtgggcggcggcggcggcgggtcgtcgggcgcgtccagcaaccggtggccgcgggaggagacgcaggcgctcatc

SEQ ID NO: 3729 - DNA, 434 bp, Zea mays
  Clone ID: TF_ZmC150952_1
caagaagcgccccgaggactccaaaacctgcccctactaccaccagctcgacgcgctctaccgcagcaaggcgctcgcgtcgtcgtcgtccgggcccggtgcagctccggcgctgccgccgccgccgccgccgccgcagcgcccagatcagcaggctgctgctgcggcgccgcccgtcaccgtcgtgctagccccggtgccactgtcccagacggggcctcacggcaacggaaacggcaacggcaatgggtgcgcgggcaggggcagctcggacaatggcggcggcggctccgggggcatgcagaagcagcaggcgagcaacggcggggttgctgccgccaggttctccgccgtggatggcgccggtggcaatggcgttgcgacgaacaagcgagaagaaggcatcgtcaggaaggaggaagcggtggcggcgg

SEQ ID NO: 3730 - DNA, 628 bp, Zea mays
  Clone ID: TF_ZmC434646_1
ggcgtacaaggtatttaatgattccttggaccagtgattaacagtagtatcatcatatcatatataggagtttacataataacagctagctagaagcagcagcagatgcatgcagggggtagctaataacaaaagggagggataaaagctagtagtactgatttagtagcaagaaaaagaaagaaagaacgaacgaacaaattaaacagatggggcccagctcgggctcgtatcgtcctttggggttggcgcatccatggcgccatgcatgcaatgcagttagctactcatcctcggggccatggttttccacctgggggtcctgaccatggccggccctccccttgccaatgccgtcctcctttccgggaaaatcctaagggccgccggcctgtccaccttaattattagggttattattattgcccccgccgccggaggcctgttccttgtccatcccaaaccccggggggccgtagcgcacgtgggggtacttgaccaccgggtccagaagttccgagctcgcctgctttgcctggcccaagcgggagtagaggcggtccagctcgtcaaagtaggggcacgttttggggtgcgccggccgttttttgccgctctccttggcctt

SEQ ID NO: 3731 - DNA, 550 bp, Zea mays
  unsure (1)..(550): unsure at all n locations
  Clone ID: TF_16923001
ttttttttnnnnnnnnnnnnnnnnnnnnncgtttttttttccttctcctgagcaagaatccaacaaacaagtagtgccacgcatcagaagaagatttatatgatcgatcgactagctagtgctagctagcagtagatcgatcgatcgatcgatcgacgcatggaggcttatgcatgatggaggtagctagctttttttaatttgtgcactacggatgatgagcgagtaggagtagggcgtgcgtgggttgtttggtccggggtgcgcgcgaagccctgcgcgtggaggcgcgcggagacggcctcccagagcgccttgttgcgcttggtggtgaggaaggagtgatcgaggtcggcgcgcacggcgaggaaggcggccgtctcggcgtgggaccactgcgggaggcgctcccgctcgaggctcgcgctggaggcggcggagacggagggcacctgcgggggcgggggcggcatgggaaagtgcggcggccacggggagaggagcgggtggtagggattggataaggagctgttgaggtggtggaagggat

SEQ ID NO: 3732 - DNA, 734 bp, Zea mays
  unsure (1)..(734): unsure at all n locations
  Clone ID: TF_ZmC228430_1
ctggagtagcttgcaggctgggttatcaccgacacgccaacaatgcaggaataagatgagacgtggacaagtactacaggcgcaccaaggacgcccgagccgggcgccagggagggaagtactacagcttcttatcgcacctcgaggcgctgcacgcctcggcgccgcctttgccacccccgccctcgggcatgaccacggtgcaagctggccctcatcagccgatggaaatggcatggacggcgggccctacggtgctgggccctgccgccgtcgccggcctgccggacctcagcttctcgtcgatgtccgagtccgactcagagtacgactcggacgacgacgacgaccactctggtgcgggggaggagggcctcagcgggggcgagtgcgacagggagatgatggccaccttcgagaggatgatgaagcagttcacggagaagcaagacgccatgcagcgcgtgttcctggagacgctggagcggtgcgaggcagagcgcacggcgcgcgaggaggcgtggcggcgccaggaggtcgcccgcatgaaccgcgagcgcgagcagctcgccagggagcgcgccgccgcggcctcccgcgacgccgcgctgatcgcgttcctccagcgtgtcggcggggggcagggcgagcccgcgcggctccctccgcacggcgccggcgtcgtgcccccgccgcctatgccggactgcgcccctccgtcgccncggcgccac

SEQ ID NO: 3733 - DNA, 2143 bp, Zea mays
  Clone ID: TF_ZmC22174_1
gccggccgggttcaaaaaagtgtttatctctatcggccgctcgggccggcacctcgtgtgtctgtttctccggcctgggctctgggctcgggcgtagtccagttgccaccaaccgagccagagagagaacaaagaacgggtgaaagaaatctcggaaaggttccagatttcctcgaggtggaggcctccttttcctcggccgaatcgctcgttcgctttctctctctctttcctcccatcgagcatgcattcttttctgctgctgcgaccgtaggatcggcgtccagcagcctcgccgcgtcggtatggttttcccttggcccacacatcctagctcttccgcattcttgaatttcgtggtcgaggattagggggtttctcgtgcgctggtccaatttcgcgctaatcgtcctgttcctgcctcggattactcgccttctcgtggtccccatctgttcttggcgttcgcacgcttgccgtgcggcgggcagggctgcagcagcagccggcagcgcgtgcatcttgcgaccccctttccaagaaccagctgcaagctttggccttttccgcctgccgtacccgaaatcccgcaagaaactccacccaagaaaaaagcggcgcccttttggctggctggctgccattcctcacgccccacgagtttggtgaggctttgaaacgagcacagttcacaagacagtgaggctgcggtgggtgtttcctcgtcggagatggagggaaatttgccgccgcaaaccatggtcccaggcggaggccccttcgatctggggcagccgttccacttcgccgtccaaccccaggcgctccaggtttaccaggatgtcttcgctgcccccgccgcgagccagatgccggagctcggcaatgtggtgaaggcctcgctgagcgacgaggaggagggcggcgacggccacctcgaccgcggcaaggcggcagccgcctcccagtggcaccgggtcaagtggaccagcggcatggtcaagctgctggtgtcggccgtgtcctacatcgacgaggacgtggacgcggaccacgggaccagcagcgggaggaggaagcacgccgtgctcaagaggatgggcaagtggaagctggtctcctcggccatgaccgagaggggtttcgctgtgtcgccgcagcagtgcgaggacaagttcaacgacctcaacaagaggtacaagaggctcactgagatcctcggccggggaagggcttgccagatcgtcgagaagccagagctccttgaacagttgagcctatctgggaagctcagggaggaggccaagaagcatctcaactccaagcatctgcactacgaggagatgtgctcctaccacaacaggaaccgctactgcctgcttgatgatcctgtccttcagaggtccctgcggatggcgcttagggctccagctgaacagggaaagcaatgcttgtttggctatgatgacgaggatgatcagatgttgctttctgatgatgatgatgattatgatgatgacgagttgaatgacgatctggaggccggtgctgaggatcatggtcctcacagagttcatgccaccgagaaactgaaacatgatcatgagggacattgtgggtctcatctgtcagaagttgcagccattgacatgaacagaatgaacttcgaaggatctggtggtccatcctctgagaagaatttaagttatatgcgtgttcaaatcgagaggcagcgtctgaaaataaaatctcagatgctgagaattgagcagaggcatttcaagtggctgaagttcagcaaggagaaggacagggagctgcagaaaatgaagctggagaatgaaaggatggcgctggaaaatgagcgattggagctggagctgaagcttaaggaaattgagataggcatcaaaccaaagaggatttagagattgcaggatgcaagtggtagagctagggaacttttagagtttctggtaaccattttatctattgtagtaccttacaaattaggatatgttacatagtttcatcttcgctaactgcatatcagttaagttaataactctgttggtttcaagcatttgcaataagtacagtttaccacctgaaaatggtgcttaatgttatcattgccttatcc

SEQ ID NO: 3734 - DNA, 396 bp, Zea mays
  Clone ID: TF_LIB3068-006-Q1-K1-A4
agagatcgtcgtccgcgctccgccgccgtcggagtcgcaggacacggcggggttcggtggcggcgcgccgtcgccgtcgaggtggcccaaggcggaggtgcacgcgctgatccagctgcgcacggagctggagacgcggtaccaggactccgggcccaagtgcccgctgtgggaggacatctcgtcggggatgcggcggctcgggtacaaccggagcgccaagcgctgcaaggagaagtgggagaacatcaacaagtacttcaagaaggtgaaggagagcaacaagaagcgccccgaggactccaagacctgcccctactaccaccagctcgacgcgctgtaccgcagcaaggcgctcgcgtcgtcgtcgtccgggcccggtgcagctccggcgct

SEQ ID NO: 3735 - DNA, 741 bp, Zea mays
  Clone ID: TF_ZmC226195_1
cctctgggagcaggtctccaggaagctggctgagaaggggtacaaccgcagcgccaagaagtgtaaggagaagttcgagaacgtgcacaagtactacaagcgcaccaaggagagccgagccggccggaacgacggcaagacgtatcgattcttcacgcagctggaggccctgcacggcaccggggcggctcccgcgtcggtggcggcgtcgcaggtgccccctgcgatctctggcggggtgtccggggcagcggggccgttagccgtgcgcttgcctgccgagccaccgcctgcggtgtcgggcggcgtggggatgccgatgacgaccgtgggctacccgagcttctcgacgtccaacacggaggactacacggacgaggacgactccgacgacgagggcacagaggagctggtgggtggcggcgggaacgagcgcgggaagaggaagagggtgtcagagggcggcgcctcggtcgccggcggaggcagcgggaagatgatgaggttcttcgagggcctgatgaagcaggtgatggagcggcaggaggcgatgcaacagaggttcttggaggccatcgagaagcgtgagcaggaccgcatgatccgcgaggaggcgtggcggcggcaggagatgacccgcctcgcgcgcgtagcaggagatcctggcgcaggagcccgccatggccgcctcacgcgacgcttgcgtcctctcctttatacagaagatcaccggacagacca

SEQ ID NO: 3736 - DNA, 1672 bp, Zea mays
  Clone ID: TF_ZmC1297_1
ctctcacaggtcacaggctcacagcacactgccactccgaaaccccaagcgccaccaccgaaaccccaagcgccaccaggaccaggcagcctcctccgtcctctcttctccccgcgccgccgcggccatgctcctctccgggcctccgccggtgcccaccccgccgctcctcctcccggagagcagtggcgaggacggcggccacgattcctcctcccgcgccgcggcagcggtgggatcggcgccaaagaggcgcgcagagacatgggtccgtgaggagaccctttgcctcatcgcgctgcgccgggaaatggacgcccacttcaacacctccaagtccaacaagcacctatgggaggccatctccgcccggatgcgggaccaagggttcgaccgctccccgaccatgtgcaccgacaagtggcgcaacctgctcaaggagttcaagaaggcgcgcagccactctcggaacagcggcggcggctctggctctggagggaacggcaacgccaagatggcgtactacaaggagatcgacgacctgctcaagcgccgcggaaaggctacgggaagcggcaccgccggctgcgttggcagtagtgccgggaagagccccaaatcaaattgcaagattgattcctacctgcagttcaccacagataacggctttgaggacgctaacattccctttggtcctgtggaagcaaatggtagaacgatactgagcattgatgatcgtttggaggatgacaggcatcagcttcccttgacggctgctgatgcagttgcaaccaatggtgtgaacccgtggaattggagagacacctctactgatggtggagataaccgtggcaattttggtgggagagtcattttagtgaagtggggtgattacactaaaaggattggaattgatggtactcctgaagcaattaaggaagccatcaaatcggcatttggactaagaacaaggcgcgctttctggcttgaagatgaagatgaggttgttcgaaccttggacagagacatgccagttggaacatacacacttaatcttgatgatgggatgacaatcaaactctgtgatgcaagccgcatgcagacgccagaagacaagacattttacactgaagaggactttcgagatttcctgtctcggcgtggctggacatttctcagggagtatggaggctatagaaacgttgatagccttgatgatctccggcctggtgtgatgtatcaggggctgcggtcgcttggtgactgattttgcaacatctactttggccagacatgtcgaagtggaattgctagcagtgccatttagtgtaaatttaagtaaggccatccagattccagatatatgagcggtcctctcgcatttgtggagcaaaacttgcctccacttatcttttcttcagttcacactcatgtcggagccgcctctgtgactagtatgcaggttcaggcttatgtaaaatgtagccgcgtgcaattggagtgtgcagctaatgatcctccagataactagcttgttctaccattccttgtaaaaatgtggaatgatcctccagctaatgtaaaatgtggcaagtgaagcaaatgtaccctgcaatattgtacttgtaaaaatgtgcaattggagcttgttctaccattccttgcagtaaaa

SEQ ID NO: 3737 - DNA, 2375 bp, Zea mays
  Clone ID: TF_ZmC100578_1
tctggccggcagccgcaccgccccgcagttgcacgccctcgccgcgccagtatccccgacgccccagcagcagttgccggcatcctgcgccgccccgccgttgcacgccttccccgcgccagtatccgcgccgccgccgttgagttcaataccactgctgacagggccgatgcagccagcgcccatatcatcggcggccccagccccggcaccggtggatcttacaagggcccacgcagctacccagcaggaaggcttcagcttctcttccatgtcggactcggagtccgacgacgagcccggggacgacgacatgacggcggagacaggcggaaaccaggaccgcctcggcaagcggaagcgcggcgacggcggcggcagcggcagcaacaagatgatgtctttcttcgaggggctcatgcagcaggtcgtcgacaggcaggaggaaatgcagcggccgttcctggagaccatggagaagcgggaggcggagcgcacggctcgggaggaggcgtggcgcaggcaggaggtcgcccgcctcaaccgcgagcaggagcagctcgctcaggagcgcgccgccgcggcctccagggacgccgccatcatcgccttcctccagcgcatcagcgggcagtccgtgcagccccctgctaccgccgttgttgtcccaatgccggcaccggtgtcagtccataccacgccgccgaaacaaccttctcgccagcagcagcaaccgccgccgccgtcgccccaggcgacaccgcagtcgaagccaatctcagccgcgccgctccagcagcaaccgccacagcagcaaccgaaggatacgtcgcagcaggacgccggcacgccgcgcagcttgcccccggcgtctagccagtcactcgagctggtgcccttcgccgccacggagcatcacgtcgattccgggctaggaggaggggatggaggtgcggcgtcgtcatcgcggtggcccaagacggaggtgcacgcgctcatccagctgcgcatggacctggacatgcgctaccaggagacaggtcccaagggtcctctctgggaggatatttcgtccgggatgcggcggctgggatacaaccggagctccaagcggtgcaaggagaagtgggagaacatcaacaagtactacaagaaggtgaaggagagcaacaagaagcggcccgaggactccaagacctgcccatacttccaccagctcgaggccatctacaacagaaagcacctcagcagcctcacaaccgcggccacatcgtccaccgccgccgccgccgccgctcctcgtcccgcctacccagatcagctgaacccgagcaggcaagagatagaggggaagaacatcaacgatgacaagaggaacaacggtggatcaggtggaggcacgcaggtgccgaccagcaatggcgagacagcgacgacgacgacgacgacgcccgtcgcgttcgacgccgacaccggcatgaagaagccagaagacatcgtcagggagttgaacgagcacccgcgtcgggagttcacgacggaggacgagacggacagcgacgacatgggcgacgagtacaccgacgacggcgaggaaggcgaagacgacggcaaaatgcagtacaggatacagttccagaggccgaacccgggcggcaccaacaccgcgccagcaccggcagcagcgacgacggctgcgccagcggtgccgacttcggctccgaccagcaccttcctcgccatggttcaataggggcgcgggcggcacccctctcaaaccgtacgtacgtatatgcgtccaaaccaaaaacctgcgcgcatcaccgtcacctcctcctttactttaccagtccaccaagcatgcaccatcagtccatcacactgttctcttgttcatcctgtaatcccccgtgccattccattatttattgatttgtttcgtgtataataagatccccaccgttgcggaggatgcagagtgaggctgcggtggtagagcaaaaaggaagagtccagtccctcagtaataacttatttataggtcatcgtcgatcgcgttaaacgagaactgtacatcgatgtaacagtcagtccatgatgtttttcctcccttttttttttagttactcccttcccgggacggcagtatacaagtttgtataagggtatacaagaattacagacagttcaagcaacctggagcttgcggaggtgagaaggtgtttttgccgttgggaatctacattttttttgtcgatcctttttcttttaacagtggatataattaaatcctgttacttgttacagtgtacattaatcgtgttgttattccagtactctgccctttgtggcaaatatacatgagcagttttacc

SEQ ID NO: 3738 - DNA, 1049 bp, Zea mays
  Clone ID: TF_ZmC1297_2
ctctcacaggtcacaggctcacagcacactgccactccgaaaccccaagcgccaccaggaccaggcagcctcctccgtcctatctcctccaagtccaacaagcacctatgggaggccatctccgcccggatgcgggaccaagggttcgaccgctccccgaccatgtgcaccgacaagtggcgcaacctgctcaaggagttcaagaaggcgcgcagccactctcggaacagcggcggcggctctggctctggagggaacggcaacgccaagatggcgtactacaaggagatcgacgacctgctcaagcgccgcggaaaggctacgggaagcggcaccgccggctgcgttggcagtagtgccgggaagagccccaaatcaaattgcaagattgattcctacctgcagttcaccacagataacggctttgaggacgctaacattccctttggtcctgtggaagcaaatggtagaacgatactgagcattgatgatcgtttggaggatgacaggcatcagcttcccttgacggctgctgatgcagttgcaaccaatggtgtgaacccgtggaattggagagacacctctactgatggtggagataaccgtggcaattttggtgggagagtcattttagtgaagtggggtgattacactaaaaggattggaattgatggtactcctgaagcaattaaggaagccatcaaatcggcatttggactaagaacaaggcgcgctttctggcttgaagatgaagatgaggttgttcgaaccttggacagagacatgccagttggaacatacacacttaatcttgatgatggtacttgtgaactctcgtcttagtcgtagtgtgaaattttactctatgaataactaggtctgtataggatgtagtgatgttgttatgccttgtctaagggacgaagggaaatgtggaaattagaaagaaactgacatggacaactagtgaataacggttcgtattatttcaaactccttttccgtctggatggtagagcgtatagactcataaaaatttgtgtgcgtgg

SEQ ID NO: 3739 - DNA, 500 bp, Zea mays
  unsure (1)..(500): unsure at all n locations
  Clone ID: TF_LIB4738-050-Q1-K1-A4
ctcgagnngccggccgggaaaaaaaaaaaaaaaaaaaaaaaaaaaaaaaaaaaaaaaaaaaaaaaaaaaaaaaaaaaaaaaaaaaaaaaaattggcgggcagaggcgggcagaggcgagaagcaagaaaaaaaacgaggggagcaaggaaatcgaggcaagaaagcaagggcagaggcgcaaagcctgcaatctgctgtcccccgtcgccgccgttgcctcgccgttgcaatcgaggcaagaaagttagggagtgctggcgttgggcaagtcgctctgggcctttggggaaacgggggctggaggggcggcaagataatggaggccggcggcccggaagcggggggaagggacaagagggtgccgcagtggggcgtgcaggaaacacgggagctgatcgtggcccgcagggagatggagcggaaggccgtcncggcgcgccgcaacgccaagacgatgtgggaggccgtcgcggcgcggctccgggagcgaggctaccga

SEQ ID NO: 3740 - DNA, 382 bp, Zea mays
  Clone ID: TF_uC-zmflteosinte110f02b1
cgcttatccgggtgcggacggggctggaggggcggttccaggagcccgggctcaagggcccgctgtgggaggaggtgagcgcgcgcatggcggtggcggtctacggtcgcagcgccgagcgctgcaaggagaagtgggagaacatcaacaagtacttgcgcaaggccaaggagagcggcaagaagcgaccggcgcacgccaggacgtgcccctacttcaacgagctggaccgactctactcccgcttgggccaggcaaagcaggcgagctgagtgctgttggacgcggtggtcaagtaccctcgacgtgcgctacggcccgtcgggggtaggtatggacagggcgcaggccttcggtggcgggggcacatataatgacacta

SEQ ID NO: 3741 - DNA, 750 bp, Zea mays
  Clone ID: TF_LIB4767-039-A1-K1-G7
cattgggtacctcgaggccggccgggaagactatcagaaggtgaaggagagcaacaagaagcggcccgaggactccaagacctgcccatacttccaccagctcgaggccatctacaacagaaagcacctccgcagtctcacaaccgcggcgggtcgtcgggcgcgtccagcaaccggtggccgcgggaggagacgcaggcgctcatcaggatccggtcggagatggacgcaaccttccgcgacgcgacgctcaaaggccccctctgggaggacgtctccaggaagcttgccgacctgggctacaagaggagcgccaagaagtgcaaggagaagtttgagaacgtgcacaagtactacaagcgcacaaaggaaggccgcgccggcaggcaggacggcaagagctaccgcttcttcgaggagctggaggcgttgcacgcagccgcgccgcagccgccaccacagcacttgccggcagccagcaccgccccgcagttgcacgccctcgccgcgccagtatccccgccgccccagcagcagttgccggcatccagcgccgccccgccgttgcacgccttccccgcgccagtatccgcgccgccgccgctcctcgtcccgcctacccagatcagctgaacccgagcaggcaagagatagaggggaagaacatcaacgatgacaagagggacaacggtggatcaggtggaggcacgcaggtgccgaccagcaatggcgagacagcgacgacgacga

SEQ ID NO: 3742 - DNA, 660 bp, Zea mays
  Clone ID: TF_LIB3689-215-Q6-K6-F4
gactagttctagatcgcggcggccgctcgcgatctagaactagcccacgcgtccgcggacgcgtgggcggcgcacagcaggtggagatgccgccgccattctcgccggctggcggcgccgggcagcggatctcgctggcggaggcgccgtcgcccatcagcagccggccgccggcatcgacgccggcgaagcagtacgacgagctcggcgcgtccggcgccggcgccgtgggcttcgacgccgagggcctggccgccgcagcagctggcgaggagggcgccagcggcggctcggcgggcaaccggtggccgcggcaggagacgctggagctgctcaagatccggtccgacatggacgccgccttccgggacgccaccctcaagggtcccctctgggagcaggtctccagtcccaccactacgctgccaagaacggaggcaccgggaacgggaacggcggcggcgcatcagagcacggctccagaggcatgcaaacgcaggcgagcaacggcagcgttggagccagcaggttcgtcggcgaaggcggcggcgcggcctcggcggcgaagaagccagaggacattatgaaggagatgatggagcagaggcaggcgccgcagcagcagcagcagcagacgcaggcggtgggtcagtggctata

SEQ ID NO: 3743 - DNA, 1309 bp, Zea mays
  Clone ID: TF_ZmC3461_1
gccgccacagcagaagccgccaatgccgcaacagcaaagcatggacattgtcatggtgccggccgagacgacgccgcacgccgacatcccggtgcacgaggggtccagtggcggcgcggcgtcctcccggtggcccaaggcggaggttcacgcgctgatacagctgcggagcaaccttgacacccggtaccaggaggttgggcccaaggggcccctctgggaggagatctccgccggcataaggcggatgggttacaaccggaacgcgaagcggtgcaaggaaaagtgggagaacatcaacaagtacttcaagaaggtgaaggagagcaacaacagccggatcgtctttcctgggcatggtccagtgatcgatccgtctgcgcgcacccaggcattatcccccggtgactctcatcctcctccacttctccatggcttcttttctttctctcgctcgcatgtgacatttgtgtctacccacctgtcgcctccatgcatgctcgtccatatctctagttctctacacctctaaaccaaaaatcacaagaactatctccctcagctcctccatgctccggcaattctccattcctcatatatgcacctagcaacacctcgatccatgtcgtgtcgtcgtcgctgctgcatgcctacccccctttttttgattcgttgctgtgttaattatagtggtcgcctctttagatgttacagtaaaaaaatattggcggtgatgcggttatttattgatttgttctggtaattaataagaaccctcaagctttggggtgttcacggagaggttgagttgatgcggtgaaaacagcacgtgaaagggtaatgagagatcgatcgcgcggttaaggagacaaggtgacaagaaaggcagatgacgcagtgggtgtttgcactgttactgcggtaaattttgtgcatgcggctactactctacagtgggctagtttgttgcaagggagctgcggaaaaaaatggaaaagaagagcttgctcgtcatgtgccatgaagaacagtcagtttgatgcatgcgggatttttatatttatccttgttttcccctctttttcatttttcaccatttcttttatgttctgcaacaagtaaactgtccattaagtattacctaagttttttctttctttctttctttctcaaactgctgttaccgaaatttacagtgtatacttgagaaatgttatatgttaaaattcttgctgttaattataaaaaatattgcaattgctttcaaaaaggattttataaaaaaaaaaaaaaaaggtggagtctccag

SEQ ID NO: 3744 - DNA, 425 bp, Zea mays
  Clone ID: TF_ZmC87468_1
attttgggaagctcgccgacctgggctacaagagaagcgccaagaagtgcaaggagaagttcgagaacgtgcacaagtactacaagcgcacaaaggaaggccgcaccggcaggcaggacggcaagagctaccgcttcttcgacgagctggaggccttgcacgcagccgcgccgcagccacagccgccgctacagaagcagcagcagcagttgccgccagcgagcaccaccgctccaccgttgcacgccttcgccgcgccagtatccgcgccgccgccgataagttcaatgccaccgtcgacggggccgatgcaaccagcgcccatatcgtcggcggcaccggcggtgcaggtccagacactcgtggagcttgccggggcccaccagcccctcaacctgctgcaaggcttcagcttctcttccatg

SEQ ID NO: 3745 - DNA, 649 bp, Zea mays
  unsure (1)..(649): unsure at all n locations
  Clone ID: TF_LIB4172-051-R1-L1-B3
aattcggcacgaggagcctccttcccttctccactcttatccctctctgagtggtaacacacctggcgacgtgcacgagtgcgcgtgtgcgggagcagtagctgtactgtaagcatgcagcagcagcagcacgggggaggcggcggagcaagcggtggaggcccagcgcagcagttctgcgcacagcaggtggagatgccgctgccattctcgccggtcggcggcgctgggcagcggatctcgctggcggaggcaccgtcgcccatcagcagcgccgggcgcggcgcccggcgccggctcagcagtatgacgagctcggcccgtccggcgccggcgcagtgggctttgacgccgagggcctggccgccgccgcagctggtgaggatggcgccagcggcggctcggcgggcaaccggtggccgcggcaggagacgctggagctgctcaagatccggtcggacatggacaccgccttccgggacgccaccctcaaggcccccctctgggagcaggtctccaggaagctggctgagaaagggtacaanccggagcgccaagaagtgcaaggagaagttcgagaacgtgcacaagtactacaagcgcacaaaggagagccgcgccggccggaacgacggcaagacgtaccgat

SEQ ID NO: 3746 - DNA, 2341 bp, Zea mays
  Clone ID: TF_ZmC1882_3
ccatactggtgactggaaaattgatgaatcaccagtggatggaaaaaaatttgaccgacaagcattggaggagctctccaaagaaggtgttactcttatgatgagtgactcaacaaatgttctttcccctggaagatcaatcagcgaatctgttgttgctggttcattgctgcgacatatttcggaagcaaaaggaagagtaattacgacacaatttgcttcaaacatacatcgaattgggagcatcaaagctgctgcagatttaactggtcgaaaaatggtgtttgttggaatgtcactcaggacataccttgaagctgctttcaaggatggaaaggcaccactggatccatcaaccttgcaatcaaggtagaggatatggatgcgtatgcccctaaagatcttttggttgtcactacaggttcacaaggagagccacgtgcagctctgaatcttgcatcttatgggggaagtcacgctcttaaactatcaaaagaggatgtccttctttattcagctaaggttattcctggaaatgagacacgggtaatgaagatgatgaatcgtctcactgatcttggcccaaaaattatcatgggtaaagattctggcctgcatacctctgggcatgcctaccgagaggagctggaggaagttcttcggattgttaaaccacaacatttcttgcctgttcatggagaactcctatttctcaaagaacatgaattacttggaagatcaactggcatacggcacacaactgtaataaaaaatggagagatgcttggtgtgtcacatctaagaaacagaagagttttgtccaatgggtttgtttcattagggaaggaggatcttcagctcatgtatagtgatggtgataaggcttttggtacatccactgatctctgcgttgatgagagactaagaattgcatctgatggcattatttttgtaagtatggagatcttccgacctcagaaggaacatgggttagcgcagtcaggtttgaaaggaaaatttaagattaccacaagatgtctatggcttgataatggaagattattggacgcactctacaaagcagctcatgctgcattgtcaagctgtcctgtgaattgtccacatagtcacatggagaggatggtagctgaaatcttgaggaaaatggtacggaagtatagtggaaagaggcctgacgtcattgctgttgctacagagaacaccacagcaggtttctcagaacacctcgacactaaagcatctggaaattttggaccgtcctcagctactagccacctgagcaggagtccagctacgagtcttgaaggcagttataaaacacacccagacaacccagaggtggatgctgaagaaatccttcccgagactgtgagaacaacacccgacgatgcaaccacaagctccaatggcgaagcattattctcttcagatttacatcagcctaaaacattggagcacttttgggagtcattcaaatcccctacagctgtcaaaattgcacggatcgtcaatggggggaacaaacaaaatttcggcaagattggcataatgggtcaggactcattaatccagtcagctcctgctccagttaaatcctcaaaaaagaacaagtggaaacctgaggaaatcaagagcttaatacagatgcgtggcgagatgaatgagagatttcagagtgtgaaaggaagaatggtcctgtgggaggagatttccgacaacatgttgaagcaaggaataagtcgtactccggcacagtgcaaatcgctttggacatcgttagttcagaaatacgaggaaagcaagaaggacgcggagagcatgaagacgtggccgtatttctcggccatggataggatcctatcgcagcaaggggaaatggcaaccaaaggatagagaaggctgtagcttagtggtagaagtttagaacatttgatatgttgtagcagagcccagtcagtgtagtgaggatatgtactgtgtacaggtacaacacctggcgatttattgggaccggattcccttgttctgagtaaggtcgacggtcggtagctcgagatcgagatggcgatttactgtgcatgtgcatcaatatacgtgcttgcggaccacgcgttagatcatcacggggtagccaggagcgctttatttttagcaacaggcaaacatgtgtggttttatttgccaaataacgtttgtaactcctataatgtaaaagcccacccggtaggcgaacggcgaacccctaaaagaccactgatgtatcatatgtttttaggagttatgtaatcgcccgcccggcaaaaacgtggtctttttttcc

SEQ ID NO: 3747 - DNA, 1931 bp, Zea mays
  unsure (1)..(1931): unsure at all n locations
  Clone ID: TF_21214403
ccacgcgtccgaaaggaagagtaattacgacacagtttgcctcaaacatacatcgaattgggagcatcaaagctgctgcagatttaactggtcgnnnnntggtatttgttggaatgtcactcaggacataccttgaagctgctttcaaggatggaaaggcaccactggatccatcaaccttgatcaaggtagaggatatggatgcgtatgcccctaaagatcttttggttgtcactacaggttcacaaggagagccacgtgcagctctgaatcttgcatcttatnnnnnaagtcacgctcnnnnnnnnnnnnnnnnnnnnnnnnnnnnnnnnnnnnnnnnnnttattcctggaaatgagacacgggtaatgaagatgatgaatcgtctcactgatcttggcccnnnnnttatcatgggtaaagattctggcctgcatacctctgggcatgcctaccgagaggagctggaggaagttcttcggattgttaaaccacaacatttcttgcctgttcatggagaactcctatttctcaaagaacatgaatcacttggaagatcaactggcatacggcacacaactgtaatnnnnnntggagaaatgcttggtgtatcgcatctaagaaacagaagagttttgtccaatgggtttgtttcattagggaaggaggatcttcagctcatgtatagtgatggtgataaagcttttggtacnnnnnnnnnnnnnnnnnnnnnnnnnnnnnnnnnnnnnnnnnnnnnnnnnnnnnnnnnnnnnnnnnnnnnnnnnnnnnnnnnnnnnnnnnnnnnnnnnttagcgcagtctggtttgaaaggaaaatttaagattacgacaagatgtctatggcttgataatggaagattgttagacgcactctacaaagcagctcatgctgcattgtcaagctgtcctgtgaattgtccacttagtcacatggagaggatggtagctgaaatcttgaggaaaatggtacggaagtatagtgggaagaggcctgacgtcattgcggttgctatggagaacaccacagcaagtatctcagaacacctcgatgctaaatcatctggaaattttggaccttcctcagctactagccatctgagcaggagtccagctatgactcttgaaggcagttannnnnnnnnnnnnnnnnnnnnnnnnntggatgctgaagaaacccttcctgaggccgcgagaacagcaccagatgatgcaaccacaagttccaatggtgaagcattcttctcttcagatttacatcagcctaaaacattggagcacttctgggagtcattcaaatctcctacagctgttaaaattgcacggattgtcaatnnnnnnaagaagcaaaatctcggcaagattggcataatgggtaaggactcatcaatccagtcagctccggctccagctaaatcttcnnnnnngaacaagtggaaacctgaggaaatcaagagcttaatacagatgcgtggcgagatgaatgagagatttcagagcgtgaaaggaagaatggtcctgtgggaggagatttccgacaacatgttgaagcaaggaataagtcgtactccggcacagtgcaaatcgctttggacatcgttagttcagaaatacgaggaaagcaagaaggacgcggagagcatgaagacgtggccgtatttctcggccatagataggatcctttcgcagcaaggggaaatggcaaccaaaggatagagaaggctgtagcttagtggtagaagtttagaacatttgatatgttgtagcagagcccagtcagtgtagtgaggatataagatgaaatgtactgtgtacaggtactgaggtacagcacctggcaatttattgggaccggattcccttgttctaagtaaggtcgacgatcggtagcacgagatctagatggcaatttat

SEQ ID NO: 3748 - DNA, 389 bp, Zea mays
  Clone ID: TF_ZmC151302_1
gggagaacatcaacaagtacttccgcaaggccaaggagagcggcaagaagcggccggcgcacgccaagacgtgcccctacttcgacgagctggaccggctctactcccggtcggccgacggcgggggaggcgaggccaggcagctggggagctcagagctgctggacgcggtgatcaagtaccccgacgtgcgctacgggccgccggtgttcggtggcggcaatgctaataatgaaggtggagaggacgacgacagcgacggggaggaggaggaggaggaggaggaggacggcattggcaaggggagggccggggatgatcaggacgacgaggtggacaacgatgatgagtagctagctaacagtacccccacccctcgctcgcatgca

SEQ ID NO: 3749 - DNA, 340 bp, Zea mays
  Clone ID: TF_ZmC170123_1
cggcgggtccacgccgtcgcggtggcccaaggaggaagtggaggcgctgatccagatgcggaacgagaagggcgagaagtaccacgacgcgggggccaaggggcccctttgggaggacatcgccgccgcgatgcgggggatagggtacagccggagcgccaagcggtgcaaggaaaagtgggagaacatcaacaagtactacaagaaggtgaaggagagcaacaagaggcgccccgaggactccaagacctgtccttacttccaccagctcgacgccatgtaccgcaacaaacaccgcagcggcacaggcggcagaacggcacccagaacgaacatggcc

SEQ ID NO: 3750 - DNA, 1693 bp, Zea mays
  Clone ID: TF_ZmC36384_1
aaagaggaagtcacgaaccagcaatgcatatcattttgccatcaacacaagagcagtacagcagaccatcgttgtgtggggtccagaacagaccggccaatctagcgttacgagactagggtagaaagttatctgccggacgagggatgaatgttaaacttctgtccattgctgacagagaaaccaattatctctcaagcatattagcattggtctgtagacctacttggcagtatgatacttacaaccacaattaaacataaaattagctttgcgctactaaacaactgaaaaaaagagccctatgaacctagtacagatgctgaaagaaattgaacaatcacatgtcataatgtcaacaaatgtaggagctacaaagaattgataaaataaggtgagaaaatgtccacttctgcagctaaaccctgatgaaacgaaaagcaagcttatcctgctatagatcttcctgcaggagtttgttcaacagagtggtcaggagtgcatcccttttttcagctcgtgcttcttctctcatccttcttcgctcctcccgttccatccacgagtgttccagcaacaaccgctcctgctccagcctctgcattgtcagccgccattgttgttcaaaaaccacccgctcctgggcgcgtctctcgatcatctcccgccaccggacatcaatgtgctgttgctgcaccaggaaatcctgcagcagttcatggatgctcgaaattcctgttcttgacttctcagacattctttgatgttgctgtttcttgtcatcagctttcctctttctgttgtgcatcggcttctcatcgtcactttcttcaccatcatcgtccttgtcgtcagactccccagatgaccggtcaccaccaggtcgcttcagtttcgttttgacagaaactccagattcagactcaaggagttgttgctgcatatttctagcacgctctgtgaagacaccatgcagctcatcaaagaagggacactgcctaccattttctggatcagaagtttctttccccttgtagcggttgacgaggttcttccacttgcacttgcactgctcggcggttcgtcggtagcctcgctcccggaggcgcgccgcgacggcctcccacatcgtcttggcgctgcggcgcgccgcgacggtctcccgctccatctccccgcgcgccatgattagctcccgcgtctcctgcacgccccactgcggtaccctctcgtcccttccccccgctcccgcgccgaccaccaggcaaagatgaacccactatgtgtccaaacaataaacaatcggccagtctctgtaagtaggaactgggttttcttgagcataaacgtagatacattataatgccaagcttgaagccggcctccatcatctcgccgcccctccagcccccgtctccccagaggcccagagcgacttgcccaacgccagcactccctaactttcttgcctcgattgcaacggcgaggcagcggcggcgacgggggacagcagattgcaggctctgcgcctctgcccttgctttcttgcctcgatttccttgctcccctcgtttttcttcttgcttctcgccgctgcctgcctctgcctgccattacttttctgcccattcacacagctcggtctcagagaaaggggcctgccgcattcacactagctcccggcacggccggc

SEQ ID NO: 3751 - DNA, 137 bp, Zea mays
  Clone ID: TF_700082065H1
cgcgcactgcttcaagtgcacgcatcccagctgcctggtgaagaagaaggttgagcgctcgcgcgatgggcacgtcacggagatcatctacaagggcacgcgcaaccacccgatgcccacgcagagccgccggccag

SEQ ID NO: 3752 - DNA, 1093 bp, Zea mays
  Clone ID: TF_700572485_FLI
gcttttgctcctgtatcagcgcacagtgatgcatctctcctggagtctcaagaagcacttgatgtctcctcaacactgtctaatgaagaggacgagagggcaacacatggcactgtttctatagagtgtgatggtgatgaagctgagactgtatctaaaagaaggaagctggaactagatgctttagaagctactcttactgctactacctccaccaccagtaccatcgacatggggcctgcagcctcaagagctgtccgggagcctagggttgttgttcagaccacaagtgaggtagacattcttgacgacggttatcggtggcgcaagtatgggcagaaggttgttaagggcaatccaaatccaagtgcgcaagcatgtggaaagagcatcgcacgatctgaaatcagtcatcacaacgtatgagggaaagcacaaccatgaagttccagcagccagaaatagtgggcaaggcagttccagcgctccatctgcatcacaagctggtggttctcaccgtaggcaagaacctgcacaggccagctttgctcacttcggtacggcttctttcagctcgttcggtctcccaccgagtggtcagttgggaccaacaactggcaatttcggcttcgggatggttcccccaggcatgacgatcccagtgccctctctaggatcgcttgcccctgtaaagatggttggaaattcatcagctatgcaggggtacccagggcttatggtgccgggagaaccaaaggtagagcctgtctcgcaaccactcatccaaatggcaaatgcatctccaccagcttaccaacagatattgagcaggcctcctttcggtcaccagatgtaaataataggaaagagaaaggggataatagatttgcttcagcttgtatacatgatagctacgctgcaacatggctttagtgttcatggatcgtccaattttttatttctattttatttttctgcccacgcatgtctttgaagcaaagaatgctgaggatgataccctgtcgtgcctgttgtaatcacgtaaaggatacctttcgtctttttgagactcgaaattggaaaacgatcaatc

SEQ ID NO: 3753 - DNA, 568 bp, Zea mays
  Clone ID: TF_ZmC1372_1
agtcaaagttgcactaactacatggaaatggatcgaagggagaaagtacctgattttctggatgttcttgatgaacttctggccgtacttcttccactcgtacccgtcctcgggcaccaccatcagctggctgccgttgccggcctctgcctccgccgccgccgtctcctcgtcgtcgtcctcctccctcctttggtttctctcttctcctccgctcactctgcatgcatcactacagttgtggctagaaacgttagctacgcataaatcgtcgtcgtcgagaacctaacctatctgttgggtgcttaattactttataatccgcttcgtctacagtgatgcagaactagtagtatatagcagcgtaaactaggcggttcatacttagatctatttatttgctccaagcagccagggatgatatttgagacgtatacataggaaagtgagtctatatatagttcatatatagtattaggccacgcatacatatatcatgaacttgaacgacatctgtttgtggacgacaatatatatacatctccatgttgctgcatgagaatttgac

SEQ ID NO: 3754 - DNA, 1681 bp, Zea mays
  Clone ID: TF_ZmC746_7
tcgagccggccgggaagcgtagtcttagcgggcagctctgatcgatttccgtcccgcttcgtgtcactcagtccctcgctcccggcctccctctcgggtcgaccacacctcaccgccgcgtacctcgctccagtccagtcctacctggacggcctgccaacacaaccaagagggcatttctcaccatcgtcccatggcgtcgacggagatggagatgggcgtcgtaggcggcggcgtcaatagcagtggaggaggcagctgcggcgggctggtggtgacggagctgagccacatcaaggagctggtgaggcagctggaggtgcacctcggtggctccccggacctgtgcaagcacctggcctcgcagatcttctccctcaccgagcgctccatcggcctcatcacctcctcctccagctccagcggcctcgacggcgcccgccggaagcgctccgggggcgagggcggcctcgcctcgccgctctcggccacgcccaccagcggggtgaccgacgggccgttcaagaacaccaagaagaggtgaacctcgccatccatcgctaatgctttgtcgttgattgctcaaggcaagccaaggcaatggacagacacaaccggtcgaacgaactgtgtctgactctttcgctgattactgctctttgaacccggccggctcgcaccacggggctggaacagcggaggcagagggtgagctcggccggcggcgagaacccggtcgacgacggccgtagctggaggaagtacggccagaaggagattctcggagccaagcacccaaggttagcacatctatctcactcaaacacgtattgttgatttggattggaaccgcgctctgtctgacgacctccgtcgtgccaaacctcgcaggggctactaccgctgctcgcaccgctactcgcaggggtgccaggcgacgaagcaggtgcagcgcaccgacgaggacccgacgctgtacgacgtcatctaccacggcgaacacacctgcgccccccacaggccggcggcggcggagcacaacccggacgcgcgcggccacctgcagaccctgagcgccggcctcacggtgaagaccgagggactgccggacccgccgcggggccggggcgccgccacgcccttgtacctctccgcctcctccacgccgccgtccacgtcggagaactggggcgtgtcgcccgcgacctcgggctccacccacgtcgcctccttccggccgttcgaggccgccgagtggcgggggcaggccgagcaccaggaagtggtgtccgcgctcgtggccgccatcgcgccgccgcccgccgtcgacagcctcgacgacctgctcatcgacatagatctagacgacatcgcgagcttcttcgcgtgacccgcgcgttgtagcagccgatgtggcgtagtatgtgaccgagccctctggctctgcttcctgaaactggaacagaacagaggagggaagagcaccaaagctctgcttcctggggtccatgcagatgcaggatgcaggcgtaaaaacctaggagatgaacaagagtagagactgcatttttttacccctctttttttgttaatctttttcctctttcagaggactgagggtagtgtttgtattgtattattgatttttaatgccaatgggaaaaataagatccttcgtgcc

SEQ ID NO: 3755 - DNA, 257 bp, Zea mays
  Clone ID: TF_18383748
gggcagccctggcgctgctgcagcggtagtagccgcgcgggtagggggaccccttgatgggcttctgcccgtacttgcgccacgagtagtcgtcggcggggatgtccgacgacgcgggcgcgtgggggtggggcggctgcgaccccgccgcggccgcgggcacgcgcaccgtgcgccttgacagcatcccctgccgggcgcgcttcttcttggaggagcagtggcaccgctcggcggggtgggggtggtgcgcctgg

SEQ ID NO: 3756 - DNA, 767 bp, Zea mays
  Clone ID: TF_ZmC746_4
cgggatcaaaaaaaaaaaaaaaaaaaaaaaaacaaacgcgaacaacgcccataaaggggcagcttctgatccgagctcccgtcccgcttcgtggtcacttccagtcctctcgtctcccgggctcccggcccttctcgggtcgaccacacctcaccgccgcgtacctcgctccagtccagtcctacctggacggcctgccaacacaaccaagagggcatttctcagttctcaccatcgtcccatggcgtcgacggagatggagatgggcgtcgtaggcggcggcgtcaatagcagtggaggaggcagctgcggcgggctggtggtgacggagctgagccacatcaaggagctggtgaggcagctggaggtgcacctcggcgggtccccggacctgtgcaagcacctggcctcgcagatcttctccctcaccgagcgctccatcggcctcatcacctcctccaacctcgacggcgcccggcggcggaagcgacccgcgggcgacgccggcctcgcctcgccgctctcggcgacgcccaccagcgacgtcaccgacgggcctttccagaccaccaagaagaagaggaaggtgatggaacagcggaggcagagggtgagctctgccggcggcgagaacccggtcgaggacggccatagctggaggaagtacggccagaaggagatcctcggagccaagcacccaaggtgctactacccatgcgcatctcgctcctcgcaggggtgcccggcgacgaagcaggtgcagcgca

SEQ ID NO: 3757 - DNA, 861 bp, Zea mays
  unsure (1)..(861): unsure at all n locations
  Clone ID: TF_LIB4746-103-R1-K1-B6
cattgggtacctcgaggccggccaggacctgtagccgtcatccacgcgcaaggggaggggtagagtcatgcgctgcggacagtctcacctcacctgtgacctgtcccccttcttgcagatcctacttccggtgcacgcacaggcacacgcagagctgtcaggcaagcaagcatgtgcagcgcacggacggcgacccgctgctcttcgacgtcgtgtaccacggcagccacacgtgcgcccaggcccagggcgccgccgcgcgccccgtcaaccagccggctcagcagcaaacggacacggagcagacgacctccccggggttccaggcagggcccgccgtgctgccgttctcgctccgtccggcctccaacaagccgccgggcgccgacgacgccggcgacggcgcgacgagcagccgtttcatcgcgaccggctgtactgtcaccgcgtctcctttcgtgtccccggcgacttcagagtgccgaatagttagcggcggcggcggcggctacgcggtggaaaggtgggcgggtgggcgncgncgtgaccatgggccggcgtccggaacgtgtctgacgttgagctcgccgccacgaccaactcgcttatggctatgggagagatggatttcatgttcccgctggacgccgccaatttcttggagctggagaacccggccagctattgctaaatgacacaaacgtgcttgtccctactggtttagcgcggaaacatattattgataggtaaagacgacaaagctaaacgaacaagcgtaattagctctctcgcttagtgcttggcatgtaagtctgcaaggccacgcggagccaatagntatgtaaattttagctctctaaa

SEQ ID NO: 3758 - DNA, 590 bp, Zea mays
  Clone ID: TF_ZmC12542_1
accgcgacgacccccgctacgtcatcaccacctacgacggcgtccacaaccacgcaagccccgcagccgctgccatcagccagtacggcggcggtggattctatagcccgccgcacagcggctcgccgtcggccgcctcctactcgggctccttcgtcctctgacttctccgggccttgacccagagtgatctacctgctttatcccagtcgtaggatgagaagagtgttcagacttcagagacatcagttcagcagccggctaaattcggacctgattgtagaatttttacacttgtgcagtacaagttatactatttaagctagaagcgaagcgtactctacttacacctcaattattggttacctcttgtgacgactgacgaggcatcataatcgtcactaggataattgatcacgcatgtttttcgcttaattagtttctgtgtatacatatgaagtttgccgtatagctgataggctgctgatttaacttgacttctctttgttcggtattagaccccaagatcaacatttacgccgaacagatgcattgtaacagtgaaggaatattttatggttttttcagat

SEQ ID NO: 3759 - DNA, 381 bp, Zea mays
  Clone ID: TF_jC-zmshLIB3569P036h02b1
gctacgcgtgcgtgttttcgaggggagaatttttacgaaccgttaaacaacacgaggaagagtctgggacgggaacatctggagcaaacggcgagcaccgccgatggcgagaacccggacgacgaccgccgtcgctggaggaagtacgtggcagaaagaaattctaggagccaatcacctaaggggctactaccgctgttcacaccgatactcgcaggggtgccacgcgacgaaccaggtgccccgcaccgacaaggaccagacgctgtactacattatctaccactgtgaacacaccagggccccccacaggccggcgggggggtaacacaacccagactcgcgcaggcacctgcgaaccctgaacgccgggccgacggg

SEQ ID NO: 3760 - DNA, 978 bp, Zea mays
  unsure (1)..(978): unsure at all n locations
  Clone ID: TF_ZmC7978_155
aactaaattccttaggtttagttgatggcttttatggggttacaaagtgtcgaaaaaaaatgtgttttcaacaatggacacatcatattcctctcgtttacgacctgttccaggtggactagacggttcaaggtgtggttcaggactagacggttcaaggtgtggttcattggagaatccatggttgtgctttgagatgtacatgacaaacaatgtgttgggatcattgttgttcggctgcaaaatctttgttgcgctgcatcctgtcgactttctccaaatgcatgtgcagtaagaccttgggaatatgtagccaaatatattcttttctccaaactttttccactacgacctgttccaggtggactagacgattcaaggtgtggttcattggagaatgcatggttgtgcgtatagatgtacatgacaaacaatgtgttgggatcattgctgttcggctgcaaaatctttgttgcgctgcatcctgtcgactttctccaaatgcatgtgcagtaagacctataaaggtggcgatcaactttaagagttggtccacaactcgggacatatcatcagagtggggctgaagcagcccgatatacgcagtgaagcaattcagcggtccaacagccacaggcaaggttgggaacagtcgtaactcttacccgatctcctttttcttgggaatatgtagccaaatatattcttttctcncaaacttttcccacttgctgccatnncatccaagagatttgggtatgggtcaacagtttcttagcaccatnnntgcttnnccttgtcaggataaattcccttcccattaaccanntttgtgnnngctgataaatggttcttncccatntgaacttcnncnaaccaannatncaagctttaaagggcacctgacnnanactttaaannatttgaannacagacaagnngnaataggcatttatnntgatcaacagctntttgcag

SEQ ID NO: 3761 - DNA, 515 bp, Zea mays
  unsure (1)..(515): unsure at all n locations
  Clone ID: TF_ZmC735051_1
attgggtacctcgaggccggccgggaaatncgtaagctcggaattcgtagtagtagtatcgagcaaaagacgtggcgccgccgtggcgctgatagatgcggccatggacagtaacggcgagtgctcggcccccaccctcagcgccgcgcttctgcccctcttcggcccaccgccggagccgctgccggagagtctcgaggacaagctgaggcgggtgagcgaggagaaccggaggctggccgccgcgctggacgccatactcgccgaccgctccaccccgcgagcgctgtccacgtcgtcgccggccgggggcactgcggtggccgccgcggagccgccgcggcccaaggtccggacggatgtgtgcgcgcgccgagccgtatgacgccgacaccaaccaccttagggactgctaccagtggcgcaagtacggccagaaggtgacgcgggacaacccgcatccgagatcctacttccgctgggcgtacgcgccctcctgccccgtcaagaagaag

SEQ ID NO: 3762 - DNA, 345 bp, Zea mays
  Clone ID: TF_LIB3245-169-P1-N1-B3
ctataacacttgaggctacaacaccaggtttaacgcctggttgtggggctgtaaaagagcaaaagattattgctcatgctggaaagatgagtgatggatacagatggcgtacgtatggacagtaaattcctaacggaaaccaaaccccatgagttattacctttgcacccacggtggatgccctgtccttaaacaatttaataaagcaccagatgatgataacaatatttttgtaacttattaaagcaaacacaatcaccactaacctttcataatcattatcatacctatttctttaattagtacaatcatatacaaccatctttcaacccaacaacataattt

SEQ ID NO: 3763 - DNA, 802 bp, Zea mays
  unsure (1)..(802): unsure at all n locations
  Clone ID: TF_LIB4705-005-R1-M1-A11
ctcagcaactgtacctttatatatcctgtagaaataacatttacgaagaacaggaaggaagccgtgtatctacaaaccatgtctcatttacaggtttttaatcgagtatatacacttgggcaggtgaaagttgtcatctactatagttctccaggggaacgactgttggcatttacaaccaatggccttaatgacaacataatatacgccacgcagccagcagggtgcgctggcttttggaagggcacaaacagaagagctcgcccttgctacaaccagtgactgcttgctcactgctactggaaatgagtgagagaacagaaatgatttaccctgctacgcactctaaaattttacgttatttcatcttcctcttttaggtgcatagaagaagctgaggatgtgtttcgtaagtctgccattctgcgactactggatgctgaactctggaccctgtgtggtacgctggtggaacatgacccattggcattggcagcggcatggctactgttcctggctgctggaacatcatggctgtgcttcccttcgtacgttgttatgatggcatttgggtcttggggatgatctttcaatatgcttcttcacatcgcacccttgatacgtgcatttgtagtaactcctcgggtgggggattcccctttaccactttctgtccatacttgcgccatcgataaccatcatccagaagatcaacctcactatttgtttgcacaattatcctttgagctggagtgggcacatngtcttctgtttgcatttgtagccaggacatccattgcca

SEQ ID NO: 3764 - DNA, 1015 bp, Zea mays
  Clone ID: TF_ZmC1093_1
ggacaaagttggctcgtcctcaggtataggttttgtatttttcgggcgacaccatgcctccggatccacttctgcccatacttcctccatttatatccatcgaagtgcggtgcttgtgtcacaattgaacctgtgtgttgtgcattcttcctaagagaagggggtaactattttaagcccaagtaaatgacacacaagtaaacatatatatataaacttcttttgctacacaccttctcttatttccaatttctttagcttcctcccccagcatgtggctctccacgccgctattcttaccacgttttcttctatatttgataagattggcctgcttcttactgttatcaccaggttcgagaaaggagaggaccttacctgaggaactggatatatcttgaaagatttgctgaacaagcttctcctgcctactacagggatcaagtgttggtacgataaggtcatataggcccttcatgagagccctttggtgttcaatctcgttgagcaccacttggcagccactacgagtggaagattcaaggatgttcatttgatgttctctaaaatgtatctcgctataaactatatataatagctggactttggagctggaggtgctaggtttatgcagctttaggcatctatttatacaagcaagctagtagcagcagcacacacagtatgatatgagcatggtggagggaatggatcgtttttcaaattttctcactggagaagactagggaggagcaatgtccctgtccaacggtggtatgtggtacaactaaaggatgggtggcagtgtctacatcactcgcatgacgttcatggaaggaaacatgcatatagctaggggcaataattcttgaggctgttatagggaggagcaggcaacgttgctgtacatacacaggccctaggacagggacatgcttcattgacctctaatggtaaatgataccgagtcgtttcgaaattcctgcaaaataaactagtcaatctcatcttacac

SEQ ID NO: 3765 - DNA, 890 bp, Zea mays
  Clone ID: TF_ZmC35722_1
gcccgttctctgttggccaagcttctgctcctgaacttaacatgatctacaagacccgcggcataatcttacagagtagatatatcgtatattaaatacaaactaaactaggccattattcacagctcgatccatcaacatgccctggctccactccaccctacctaccgtctcctactctcctccaacacacagcaggtcgaccagtcgtcgtccggccgtcagtactcagcagcatacatgccgccggtgatggagccgaacacaatgtcttccagatcgaacgtgtcgtcgtaccccaagtgcgccacgcccgagaggccgccgccgccgaaccagtgctgctgctgctgctgcagctggaggccagacgtcacgtcgccctggtccgggccgggcgtggcggtccgcaccgcctcggccgtggcagcggagctccccgccggggtgaggctgctaagcacctcctccagctccagctcctgctcccgctcgccgccgccgccgccgccctccagctgcctcgggggctccgcaggcagcacggcgcccttgtgtccggcctgccggttgctggcgttggccgccgcgaagctgcgggaccccgggtggaggtcgtcgtggctgcggtggccgggtcccggcaggtgtgcgcgccgatgtaggtgaccgtgtaggcgtccgggtcgtcgtcgcggcgctgcacctgccgctgcgccgcgcactgctggtcgtgcttgtgcgtgcaccggaagtaggccctgcgccgacgccgagcatcatcgacggaaatcagtacttctggttgggcatattcggttctactatgatggatcgtcgatcgatcgatctcgatcaatgaaccccggccggcctcgaggtacccaatg

SEQ ID NO: 3766 - DNA, 723 bp, Zea mays
  Clone ID: TF_ZmC45695_1
cattgggtacctcgaggccggccggtatctcctccgccactttcctcctcttccaagaacccaaccactccacgtcgtcgtcgtttgctgccgctgcgcaatggaggaggagcgctgcttcaacaactgggatctggacgccgtcgtccgcctgggctgccgccgccgcctctccccgccacggcagcccgacccgtttgcttcgcttctccctccgaccctgccgtcgccgtcgccgtcgccgccgcagaaggagaagcccgtggtgccagcgctggctaaaggaccagagccagagccatacgccgggtggcgctttcctaacctcggtgctggcggcgggcaagacggcgacgagctcatgagggccatgttagcagtccagccttccctgcctcagcctctgccaacgacaacgccaacgccaacgccaacgcttcccccggcagcaggagagcatcgacagtcgactgttacagccgtggacgtgccgctaccccaggtgcgccccgctccggccgccagagcgcagccgagcgggcggcaggtgcccggttccgtgccaagatccaagagaaggaagaaccaggtgaagaaggtggtctgccacgttccggcggacggctcgtcgtcggacatgtgggcgtggcgcaagtacggccagaagcccatcaagggctccccctacccaaggggatactaccggtgcagcagctcccaggg

SEQ ID NO: 3767 - DNA, 676 bp, Zea mays
  unsure (1)..(676): unsure at all n locations
  Clone ID: TF_ZmC883338_1
cctcgaggccggccgggccgggcaccaccacaacccacaccccgcacggtcgatctatcttgttatatgcgtgcatggaggggagcagcagccagctgctggagacctgccttcctgctagcctctacgcggttactcctcctccatgcgcccatcctcatccccttcttgccccgctgccgaaccagcagcacatgcttctgcagatgccgtttgtcaaggagcaggctgcgaataatcatggcctgatgctctcttcggaccaccaccaccacagcggcctcctgtacccgctgcttcttcccggcatccctttctgcccctccgtcgccgccgcctgcgagaagactaccaccaccggctccggggcgctcgatgccggcgaggcgggcaccagctcggcggcggcgaaagccaccggcgagatcgctagtaccgccgccaccgcatgcaacagcccaagttcctgcaattggtggaagggcccggcggcggcagcagcgggggagaaaggaggacggatgaaggtgaggaggaagatgagggaaccgaggntctgcttccagacaaggagcgacgtggatgtgctggacgacggctacaagtggagaaagtacggccagaaaggtgtcaagaacagcctccatccaaggagctactaccggtgcacccacag

SEQ ID NO: 3768 - DNA, 208 bp, Zea mays
  Clone ID: TF_15499682
cacgggcgtcagatcgagagcggggggagcagctcaaaaaagaagaacgaagaagctaatcctaggctctagactagacatgcccgttgttgccggcgggcaccggggacgcggccgccagggggctgggcgcgggcgcgggcgcggccggcgtgtggcggtgctcgccctcgtacgtcaccaccagcatggccgggtcctcgtgccg

SEQ ID NO: 3769 - DNA, 772 bp, Zea mays
  unsure (1)..(772): unsure at all n locations
  Clone ID: TF_LIB4738-091-Q1-K1-G2
cacacggtcacacacaccacaacccagccacccaccacctcccccaattgcctcttctcttctcccagcagcagccgcgacgcagtcctactcctgcggtgcctccagtttcgcagcaccgttgccacacatcgccaactaacgccatcgatcacccggcggcctcccagagtcttgccctgccatatccgaacctgctcctacagctagccagcaacacaaacagaataggtcggtcggtcgatcgatcgatggccagcgttatcgacggcaatggaggcagccggctggtggtgacggagctgggccacctcaaggagctggcgatgcagctggaggggcacctcggcggctcctcgccggacctctgcaagcacctcgcctcgcagatctcctccatcaccgaccgctccatcagcctgctcatcaccgccacctcatcaagcnccccacggcggcgcctctgacgcgccgcccttcatcaaggctactaccaagaaaaggaagaggatggacaagaagagngcatgaggtgagggtgggctcggccggaggcggcggcggtgaccatccggccgacgacggctacagctggaggaagtacggccagaaggagatccttggagccaagcacccaaggtgcccacttgacacatgctgtgctatcagaacattttttccccctccttcatcttttccacactccacagcccaatctcatctgcacgtgttcttatcgcaatttcgcaagtggaatcgaaatcattttgct

SEQ ID NO: 3770 - DNA, 315 bp, Zea mays
  Clone ID: TF_LIB3069-004-Q1-K1-F1
tcgcagacgcgtgggtagacacatggactgacttgtgatcgaacccgctgggattggtaaacgagatcgggagtttattgcagtggaacaaactgtgatggcacaagatgtccaagaccaaagtgatcaggagcgcacacattgacacaaaggtgcgagcagggagaaccatcccacggaggatctacatgttcacagatccaggatccccgggcaggaaacatgttgcgagagcatcacatgagccgaaagcagagatcacaacatctgaaggaaaacatatccatgaaattcctgtttccaggaatgcaagcc

SEQ ID NO: 3771 - DNA, 560 bp, Zea mays
  unsure (1)..(560): unsure at all n locations
  Clone ID: TF_LIB4172-007-Q1-L1-B12
aattcggcacgaggggggatctaccgatgcagcagctccaggggtgcgcggcgcggaagcaggtggagcgcagccgcgcggaccccaacactttcatcctcaccttcaccggggagcacaaccacgcggcgccgacccaccgcaactcgctcgccggcaccacccgccacaagttcccgtcgtcggcggcgcctcagccgccgccgccgtccgtcgtggtgggcggtgacgcgcaggaccggcagccgagcccgagcccgacgtccacgtcgaccgcggggctctcgcccacgacgccgctgcgcacgccgtccatggaggaggaggaggaggaggaggaggaggaggagganggangacnagctgctggnggaggacatggagatggntggcgaggacgagctcctgttcctcagcaccgacgccgacgccggggcaccgacgtcctcgctcttcgacgtcgtcggcgagcccttcctaagccctccctgggtgacagccggcagcagcgccggcgagccagccacaggggcagccggcgctgggagctgacttcttct

SEQ ID NO: 3772 - DNA, 338 bp, Zea mays
  Clone ID: TF_LIB3595-027-Q1-N6-D7
atgggctgggcgcgggcgcgggcgcgcccggcgttgtggcggtgctcgccctcgtacgtcaccaccagcatggccgggtctgtcggaggggcagctccacgtgcttcctcgccgggcaccccccacggggctgcacttgtagtaaccccgagggtagggggatcccttgatgggcttctggccggacttcctggacaagtactcccccggggggatgtacaaaaaaatagactctgatcgtcaaaactgtccacaaacctctaaacccggattgttcttctctacaattacaggcattcggtgtggcccttattggccgcgaagagtgctctcctcca

SEQ ID NO: 3773 - DNA, 594 bp, Zea mays
  unsure (1)..(594): unsure at all n locations
  Clone ID: TF_LIB4758-139-A1-K1-E9
ttgggtacctcgaggccggccagtgcaagattaggaagacgctgcccaagtggagcagccaggtgagggtgagcgccgtgcaggacgtgagccccctcgacgacggcctcagctggagaaagtacggccagaaggacatcctcggcgccaagtacccaaggtcagcgcgccgccgccacacaatcgaacgcacgatctttttcagaattcagacgggcctgcgcgcgcgcacgagcggagctgttagcctctgctaaccaggacgagatagcagatggggtttagaggaagaagaagaggataggggagaagcgagngccctgtctctggccctgtttggcacagcttattttcagcttcttcacaaatttaagcagaagttctaccaaacagctagcttctgcagcagcttatcagttcagctgcttctcataatacactaaaagcagccaacaagcagaagctgttttcaccagcttatcagataagctgctttttcaacaagcagcagctgtgccaaacagggcctctattcaaagtttagtaaattgttcagaatattcatgactccaaaaaaaaaaaaaaaaagcggcc

SEQ ID NO: 3774 - DNA, 545 bp, Zea mays
  unsure (1)..(545): unsure at all n locations
  Clone ID: TF_LIB4746-019-R1-K1-E5
gtaccctcgnggtccggccggggcaagcatgtcgagagggcctcgaacgatctcaagtccgtgatcacgacgtacgaggggaagcacaaccacgaggttccagctgccaggaacagcggcaacgggcatccgagctctggctccacaccagcaccaccacaggggagcggcggccttcaccggaggctggagccgccacaggtcagcatccctcggttgagcgctgctgctgccgccgccgccgccgccgctgcctacggctcgctctcgcttcgtttcccaccacagctcagcgcagctcccgggggtttctccttcggaatgctccgtcccactggcatggcaccgtctctgggcggcttcttgccagcgcagatgccaggccgtgggttgccgatgcagggctgcgcgggcctggtgctgccgagaggcgaggcgaaggtggtgagcccagagcagcagtccggattgccggggggaacgggaatgccgcggcaacctaccagcagcaagagcagcagcttatggccaggtgggctcagggt

SEQ ID NO: 3775 - DNA, 1285 bp, Zea mays
  Clone ID: TF_ZmC746_6
cattgggtacctcgaggacggccggaaatcctcccagcaaacccccccgcctgggcaccgcattgtcccaacccccgcccaccctctagctcgggcgcagcccccctctcgcgggtcatcgccgcaccaccgacagccatccgtcagcgcttcagattcccaatcccgctaccagagcgcccacagcctgcaagtcacgagcaccgccatcactcgtgccggatctaggtcgtccaggtaggactggactggagcgaggtacgcggcggtgaggtgtggtgacggagctgagccacatcaaggagctggtgaggcagctggaggtgcacctcggcggtccccagacctgtgcaagcacctggcctcgcagatcttctccctcaccgagcgctccatcggcctcatcacctcctccaacctcgacggcgcccgacggcggaagcggcccgcgggtgacgccggcctcgcctcgccgctctcggcgacgcccaccagcgacgtcaccgacaggcctttccagagcaccaagaagaagaggaaggtgatggaacagcggaggcagagggtgagctctgccggcggcgagaacccggtcgaggacggccatagctggaggaagtacggccagaaggagatcctcggagccaagcacccaaggttggcaggcacacgcatctcgctcagacagccagagcagcagcggcggggctgggaggacgcgcccacgccctttctcttctcctccacgccggcgtgccttgtgccggagcgcagccccttctccgcaccgtccacgtccgagaactggggcgtgtccccggcgacctcggactccaaccacgtcgtctctttcccgcctttcgaggtcgccgccgccgctgccgcgcagttcgagttcgaggaagtcatgtcagcgatcgacagagccgacggcgagtttctcgaggacctcgacatctatgtctcaagcttcttagcgtgatctgctggatgtaatgtaaccgatgaacgctagggaatgggaatctgaggcagctgttaccatgagttgctctctgccgtttgtccaggggcagagcagggaagaacacatgttcttcctcggcccgtcccgttgtaaaccttagggtgtgagaatattgaatgtcccatctctctctctctttttcttcggtcgagggtttgcaaggaaaacaatttcgtaatagtgctgtcagttcagctaaacatgtgagtttctcgtgaatttaaacatttttccaaaaaaaaaaaaaaaaaagcggcc

SEQ ID NO: 3776 - DNA, 465 bp, Zea mays
  Clone ID: TF_17969955
attccgtgctgtcgcggagagcgtggcggccgacgcgtaggggggtactgggcgaagagcggcgccggacgtggtggccggcgaagagcgcgcccgcgtcgcggctgacggccgggccggagaggagcatggcggccgcggctgaggtggtcttggccatcgcggcggcctgcggcggcagctggtggctgtgggtgccctcgtacgtggtgatcagcaccgccttgtcctccgcgcaccgttgcacctgcacagtacacgcattatttatgcttatttcttgcatgcatgcatgcatctcgaccgaccatgcatggcgtgtctagaagccaaacacgtatatatagcagcacattattattaaaattgaagtcgttaaaggcaaaaacacgtagcgagttaagtttgagcaatactcctatatatttttagatggattgatagtccgtctggtgagatgtcata

SEQ ID NO: 3777 - DNA, 375 bp, Zea mays
  Clone ID: TF_ZmC165426_2
caaacgcccgcaccggcccaggccccacacgggcgccgggaccccagcatcccaagagagtgagtcgcccaccgctagctgctcgcctgcctgcctgcgcaacagacaaatggaccagctccaccggttgggggtggggcgatgcttagcttgttctaaacaaattatcgcgccctgatattattgcttgtcgcgttcgcgtgcgcaatgctttgctcggcgcaggcaacggaggacgtcctcgccgcacagcgacgggtaccagtggaggaagtacggccagaagaggatcactaagtcgccgtttccgaggtccatatataatatccctcttcctacttattagcatatatagtacttctttgctaccttagc

SEQ ID NO: 3778 - DNA, 545 bp, Zea mays
  Clone ID: TF_ZmC1208722_1
gggtaacccatgccccagagcttactatcgctgcacaatggccacaggatgccctgtcagaaaacaggtatatatatatatatatatgtacttaatgtgattaataattgattaaattaatattccatgtgtatatttatttaatagattgaacatatgaaaatggtttttatttatttttttaagctagaacatgatgtgcatgccaagtgctaagtaaaacaccagccttaaataaataatccagaattgttattagagtatctattcaagtacgactgacgatggtactaatagctggtccatcgtcaaggaataatgctacatgctgtatgtactttagtatagctaaataagcaaatgatcgcatggcgtatatatgttatatatatgccatgggcgtcgtttgataaaccctctggacgcaagtacatttgaatatacttttgcaagcaactatgacgacattaattatcctatgatagagatcacatttgagttcatgtgaacatatgtgggggctagctagcattgcaggctgcacg

SEQ ID NO: 3779 - DNA, 349 bp, Zea mays
  Clone ID: TF_LIB3245-375-P1-N1-D4
gcggttactaccggtgcagcagcgccaagggtggcgcgcgcgcggaagctcgtgtagcgcgccgccgacgacccggccgtgctcgtcgtcacctacgagggcgaccaccgccacgacggcgacggcgacggcgacggcggcgttggcgctggcgctgcccgctcccgcgcggcgtgaagatcgtttgcttcccgccgtagcagtcagtgtagcagcggtagtcaagtcaatcgatactagtagtagacctcttgtttcattgggggggcggattaatggtagatcgagctttgctcctgtaaaaggaattaaagtgcatttaaacttaatatcgtcatgaactttctcg

SEQ ID NO: 3780 - DNA, 384 bp, Zea mays
  Clone ID: TF_LIB3245-060-P1-KI-G10
gaatttgctcagaggcgcggcatcggaggaggctgcctgcagcagttcggccaggaagcgccgcaagcagccagcagagcggcagggcggcctggctcctcctcctccttctcctgctgcgacgggatccaagaggatgaggtaattactactatgcagcatagctccttttgagctagttaccagcttaagtatacaacgtataatcatctactactgaatctgcaggatgagccgtggagagcgggggacacgagcggagaagaaagaaacaatggaggacggcttcatctggaggaagtacggccagaaggacatccacggcagcaactaccccaggtctgtctgtctgaactctgaaccaacatccgaatcaaccaagac

SEQ ID NO: 3781 - DNA, 1978 bp, Zea mays
  Clone ID: TF_ZmC300_51
tcgggttctctctcccgccccttctctcttcgtgatgctcctctgcttgccttgccctggtgtggtggtgtctagtcaagtacgcttccgaattaaaagcgctctggcctgcaacctgctgtctgctccgtcctcccacggccggccgcctgcccgcgtcttcttcgccacccctcttctccggtcccgcacctgcatttcttgaccccttcctccaccgcagccaaacaatgtctccggcgccgagttcgcatcactcgcagatcaattcgagcaggaaggagaagcggatgaggaaggtggacaccttcgcgccgcacaacgatggccaccaatggaggaagtacggcgagaaaaagatcaacaacaccaacttccccaggtccggccggattctacatgttttgtttgtttttactttaccgtggggtgacaaatctatcctcgccagcgaagaacccggcttttattagccagcctcctttgacttgaatgtttggtaacttcctcttattctccgcatcaactatcggcgggccaaatcccagcaaatgttctttttcactcgctcacaggttcttgtcccgctgcaggtattactacagatgcacgtacaaggacaacatgagctgcccggccacgaagcaggtgcagcagaaggaccacagcgacccgccattgtacgcggtcacctactacagcgaccactcgtgcaacagcgccttcctcccgctctccccctccgagttccagctgcggacaccgtccgggaaggccgtctccatctgcttcgactcctcgtccggggcggcggcggccgtggcgtcggtcgccaccaatgctagcggcggctcgccctcttccagcgccgcggcggcgcggcgaggcacgccgccggatatcagttacccgtccgacctgcggcggtctgacacttacccgtggggcgccggcgccgtggagcagaagctggcgtcctgcgccaccgagtgccacgacgccttctcggccggcgccgtgccggaggaggtggtagatgcaggcagatttgggtctatcaggttcttccattttttgtaaattcatcggtggaaggcaactgattttacttcgacaaactaaggccctgttccaatctcgcgagataaactttagcagatatattttagctacttttagccatttataatctaaacatgagagctaatggtggtaattgaaactaaactttagcacttcaattcatatagctaaagtttagcaggaagctaaagtttattccgtgagattgaaacggggtctaagccccatctggatctcaaattctcaacggatttcaaggacctgacaaaaagaatcccagaataccacaagtgcagcacagtagcagtgccctctgcacgtttatagcacatagcagtatgatttcaaggccacaggtgggatctatttggcgtactcgtttccgctgaggtgctcagctcacagcagaaataatacaggcaacgaaagcaagtcccaaggaaggagtgtaggacgcggtagatcctccactactgcggcttctcgtagctgttctggtccctgaactccccgatcttgctcctgatcatgtgcgccacgtgaggctgcacgaacatgttggtagggtcgagcatgtgcacgatgaacctctccgacggcggcatcgacgcgttcaggttgacgatgaactgtgccataggtacgtcgcaggagatgaacagccccttgatcgcgttaaccatcttgcctgtgctctggacagggacaactgccgttgcttggcaccgacgacgacgctcgtcgtggtcccgcgtccctcccggccgcaggattcagtcctctcgcttcggatcggatcctccactcttcgctcgccggcggcgccgcagctcctctatctatcggcctcacctttcctcgcttctccttcagccctctttgcggccccggccgg

SEQ ID NO: 3782 - DNA, 945 bp, Zea mays
  Clone ID: TF_ZmC13091_1
tccatgcgtccgaagaactcgtcgtcatgggcgaccttaaccgccgtgccctacgacgacggctacgagtggaggaaatacggcgagaagaagatcaacgggacgctcttcaccaggagttacttcaggtgcacctacaaggacgacgccggctgcctcgccaccaagcacgtccagcagatggacagcgacgacaacagcagcccgcccatgttccacgtcacttaccacaacgaccacacctgcagcagcgccaaagctgcagccaaagccaacacaggaggcagcagcagcaacaacaacagccacctcgctgcattgctggcagactgctgcgacggcagcggctgcaacaagggactgacgaccaccaccaccaatgggcatgctgctgctgatgctgccgccatgaacatgaacatgaagcaagaaccgtcgctgctgccgccgccgcctcctctggccgaacctccttccgcctgctttccttatgaccaaatgccacagcagtgccatcagctgctatttcctgtaagcatggagcagcagttccccggcaatggcgaagaaatcccgtcggctgctggttcgtgcatctccggcgagaccagctgggatgggtattattattctggggacatggcggcagctgaagacgaccgtttccacgatctcgagcgtttcctcctgggcgatagcttcatggactaccagtactagctagctcgatcgatctgaaacagaattatgttaacagggggtttatgaaagtagaagaatggttttggtcttctttttttttttttttggattcttagggcagcagtgccaataataaagtgttctgtaggggaaaaaaataggcgtgcatgagatgtaaaaacaaacgatcgttttattgttatataaaaatgtccggcactttccaaaaaaaaaaaaaaaaaa

SEQ ID NO: 3783 - DNA, 703 bp, Zea mays
  unsure (1)..(703): unsure at all n locations
  Clone ID: TF_ZmC65166_2
gtaccaagattgccgatatacctccggatgaatactcgtggagnaagtatgggcagaagccaattaagggttcccctcatcctaggggttactacaaatgcagtagcgtgaggggctgcccagccaggaagcatgtggaacggtgcgtagatgattcggcgatgctcatcgtgacatatgagggcgagcacaaccacaccagaatgccaacaactcagtcagcacaggtgtagagaactcatcatcatcgccgcacctccttccgcaagtgctaccagcacggggtcaggtcaacaatgatttgtgcggagacattttcagctgtcgttgagatgtttggccctgctgctactatccacatgatttgtagcgagaatggagtgggtggtgagcacaagattttcttctctcttatggaggttatcccaatgatgacgaggaagaacaagccattagatagataggacagctgagctgttggtcgggattagtgtgaagaggtggaaaggaaagataaaagttggcgggaatgagacagttgtgtaaacttagtagaatggggaagtagagatagtgctgttcttcttggactactctgattccgttcctcactcactcacctgtatcaagatagcgtcaaaactgaaaagaagtgcacagaggccgccttttgctgttatagcaattcattcgttcattgtcc

SEQ ID NO: 3784 - DNA, 738 bp, Zea mays
  Clone ID: TF_LIB4758-016-R1-K1-D2
ccggccggggtaagtgttgctaattaataacctttaattgcagctaagcagagagtgttcagctcgtttaatttcttctgtaaacataatgacatgcgtatgtatgtctcttcaggtgagcgcgatgcaggaggagatggagaagatgaaggaggagaaccggatgctccggcgagtcgtcgaccggaccatgcgtgactacgacgaactgaagaagaaagtagaagcctgctatcagcagcaacaggcagatgagcctaaggagcccgaggtgttcctttccctcggcgccaccgccgccgggactggcggcggattcgcggagccgaagcgcaaggagcggcaaacagtgcgtcggccatctgcggggagcgatgacaccgacgacgacaccaaggaggaccgtcttgggctgtccctgagcctggcagcatcgtcgtacgaggaagagaagctgggagccgggccagccggccacgacttggaagaagcctccgtggccggcgccgaccgcaaggcgaagggctacgcgctgctggagagtagcaagctcgaggcaccggcaccgccggccgccgccggagaccttgccgcggccgggatcacgagccagagcgtcaacccggccaaccgcaaaactagggtttccgtgcgcgtccgatgccaaggccccactatgaacgacgggggccagtggagaaagtatgggcagaaagtcgccaagggcaacccttgccc

SEQ ID NO: 3785 - DNA, 828 bp, Zea mays
  Clone ID: TF_LIB4759-112-A1-K1-D5
cctcgaggccggccggggaacaaatgataattcactctcgcactagtcccaactcccatccatatcccatcatccagcatccaagcaggacgagaagaggcccggtcgatcgaatcaaagatggcttgcgtggcggaccgtcaggccgcggtgagggaggtggcgcaggtgtacgagctcatcaaactccagcagcccctcctcctcctccattcctccacgtcgcagctggcgcagagcctcctcggcaaggcgctgcgagccctcaacgtcgccctctccgtcatgaaccagcagcagcctccccctcctcctcctcctcctcctcctgcagtggcaccagtgagcgttgtcgtcgtcaaagctgagcctcacctgtcgccgcccagcccggcgtctgccgattccgaagccacggcaccgccggccagaagaggcgccaaaagaacaagacgatcagcggcgccaatgggagagaagaagaagaactcgtcgtcatgggcgaccttaaccgccgtgccctacgacgatggctacgagtggaggaaatacggcgagaagaagatcaacgggacgctcttcaccaggagttacttcaggtgcacctacaaggacgacgccggctgcctcgccaccaagcacgtccagcagatggacagcgacgacaacaacagcccgcccatgttccacgtcacttaccacaacgaccacacatgcagcagcgccaaagctgcagccaaagccaacacaggcagccgcagcagcagtaacaacaacagccacctcgctgctgctgctgctggcgctgctgccatgaacatgaacatg

SEQ ID NO: 3786 - DNA, 1283 bp, Zea mays
  Clone ID: TF_ZmC1183_1
ctcctgagtcctgatctccgatcgctcgccacctcacgaccggactcccctgctccagctctcacctatcctcgaagcagcaatggctgaagccgtggagagcggcgggcgggcgctcctggtctcggagttgggccgcgtgcaggacctggtgagccagctcgagctgcagctgcgcgcgcccgcggacgcggactccgtcgacctctgccgctgcctcgtgcaacagatcgtcgcgctcaccgaccgctccatcggcatgctccactcgtcaccggacctcgccccctcgccgctgaccgccacggggagcccgataagcagtgacgccgcctccgaccaccaccccttccgccccgccggcgccagccccaagaagcgcaaggccacggcgcgctggaccagccagcaggtgcgcgtcagcgccgacgacggccacagctggcgcaagtacggccagaaggacatcctcggcgccaggcacccgcgggcctactaccgctgcacgcaccgcaactcgcagaactgcctggccaccaagcaggtgcagcgcgccgacgaccaccccgcgctcttcgacgtcgtctaccacggcgagcacacctgcaggcccgccgccgccggcggcgggtccaagagggcgcagcagcacaacccgcacgcgcaggccgcgctgcagggcctcgccgcgcggctcacggtggccaccaccaccacggacaacgccgccgggctcccgccgatgacgcccgagagctgccccgtgcggggcgcctcgtccccgtggtccctcgcgtcgcccgtcggctccgacttcaacggctgcctgcaccagggcatctcgccttgcccggtgcccgggtacagggactggacctcggacgtggacctccaggaggtggtgtcatcggcgttcgccgccgtctcgtcggttgcgccccttccggtgcctgacgacgaattcatgcctctcgaatgcgtcgaatacgtattcgaccagaacttcgacattgacaccgcaatgccaagcctctactatccatgagaagagcaactgatcggcagcactgtccacttctccaagacaggagggaggagcagagctgcagcagaggagcctattcctgagaactgtgcagtagcagaagccagcaaagcttttaggatacattttaatgtctcattatcttttctttctttctttctttccctttcatgggttgggttttgttgatttcactcagcaagagaaaagttaatttttactaaaaaaaaaaaaaaaa

SEQ ID NO: 3787 - DNA, 2339 bp, Zea mays
  Clone ID: TF_ZmC4944_1
ctgccttcttgcccccgcggggggggctggccgctgctctcttcctccctcctcctcggtccactccaaccccaggcctgccgcggccacagacgggccgcgccgccgccgcagcttccgattccgcttccgccggccgttctgccgcgcgcgcgcctgtggcgcttgagcgggcggatttgttcggcccgttctttggccgccgccgttgcgctgcgccgtgttggcttccaggtgcgcaatccggtcccgtgctctgttcgtgagctgaggatttgggtagtccgccaccctggatcctgatgggccgttcctgtgcagttcccatccaggcgtcttgagattccccggccggagatctgcttaattcgtacctctctctggttctgaggcccctccgaggtggaggaggagctcgtgggtcgacgaaagaacaatcgtttctttgcccactcctgcggctgcttctccgtcccaggctttccagccatggaggaggtggaggtggccaacatggccgcggtggagagctgccaccgggtgctggctctgctctcgcagcagcaggacccagccctgctcaagagcgtagcttcagagacggctgaagcctgcgccaagttcaggaaggtagcggccctcctcggcagtgccagtggcggaggtggctgtggccatgctagaggcaggttctccagacgagtccggcctctggggctcgtcaaccagaagagccccttggggatcgccaccggcagcggcaacccgctggagatgatgcccagcacagctgctgctgctgggtctccatctccacctcagtcgactagctatgcgcaaatgcgcgctcggcttagcagtgcgccagagtcctcacgagggctggatttggcctgctccagcagcaggtgtagccctcatccatttggagcccccaagctggtccagccactgtctgtgcagttccagattgggagtgttgcgcataggtacccgttccaccagcagcagtcgaggcagaagctgcaggccgagatgttcaggaggagcaacagtgggatcagcctcaagttcgatagccctagccccagcggtggtgctgctggcaccatgtcgtctgcgagatcattcatgtcgtcgttgagtatagacaggagcatggcgagcttggatgggaagcggccgttccatttggtaggcaccccggtggcgagcgacccagcagatgcgcaccgtgcgcccaaacggcgatgcacgggtagaggggaggatggaagaggcaagtgtgccaccactggcagatgccattgctcaaagagaaggaaactgcggattaagaggtcgattagagtgccagccattagcaacaaaatcgctgatatccctcctgatgagtactcgtggcgcaagtacgggcagaagccaattacggctcgagcacacccgaggggttactacaaatgcagcagcgtcaggggctgcccagcaaggaagcacgtcgagcgatgtgtagacgacccggcgatgctaatcgtgacatacgaaggcgagcacagccacacccagctgccagcacagcctgcccagacctagaagatcagtaaatcgtcgctccattctggaagcgcggggagcatgcctttgcacctagatggtcatgtagaatctcaggccttcgattttcgattgcagcagcagcaatgaccatggagagaatcttatgagctgcttggcccccctcctgagtcactctgttacagatgcaagagtggggactgctgccaagttgttcatctttcttgtgagctgtggcatgtatgtataattgaaagatggtgcaggaaggaaggaaaatgcagcgtccgacagcgaccggtgagctttgccggtgagcctgaagggttgaaagcaaagactgacaagaggaagtgaacaaccgcgcattgttgtgagggtggattaggatgggaagatttggcttttagcgtgcacaagttcacttgccatggactagcctctgtatgttgcttttgctttttctgaaatatcgcatcacctcttttgttgacaaaataaaaaagggtggggttgcatcccagtatcaaaggagggagctccgtactgaccccgctgcaagttaggaccatctgggttttccaggtgtaagcattccagaagggaaggtgcaaagctgttgttggtgtgatttgccacccccagtactgttgctcttgtgtaaagcattctgtgtaattaatgatttgtgccatctgcaatcttgaggatgaatggatgctctaactgaaacataaaaaaaagaaaaaagattatttattttg

SEQ ID NO: 3788 - DNA, 1258 bp, Zea mays
  Clone ID: TF_ZmC740_2
ccgggaggtggaatggtaaaggggtctaccccaccatttccacctataaagccggtccgcggcatcccttccgacctcgaccggccgggaacctcccttcccgacccaattctcctcaatcaaagaaagtccccacgcagagcaagccaagatctgcgccgcggcgaagcaaatcagcaaagcaaagcaccggctggctcccatggccgtggacctgatggggtgctacgccccgcgccgcgccaacgaccagctcgccatccaggaggcggcggcggcggggctccgcagcctggagctcctcgtgtcgtcgctgtccacgcaggccgccgcgccgcacagggccgcggctcaccagctgcagaagccgccttcgcagccgccgatcggcgagatcgccgaccaggccgtctccaggttccgcaaggtcatctccatcctggaccgcaccggccacgcccgcttccgccgcgggcccgtcgtcgagcccgccaccggtgcctgctccggccgtcgccgctcccgctccggcccccgctctccacgtggtggctcccgtcgccgtggcgcagccccagagcctgaccctggacttcaccaagccgaacctggccgtgtcgggcggcgccacgtccgtcacctccacgtccttcttctcctcggtcacggccggcgagggcagcgtgtccaagggccgcagcctggtgtcctccggcaagccgccgctgtccgggcacaagcggaagccctgcgccggcgcgcactccgaggccaccaccaacggcagccgctgccactgctccaagagaaggaaaaaccgcgtgaagaggaccatcagagtgccggcgatcagcgccaagatcgcggacatcccgccggacgagtactcgtggaggaagtacggccagaagcccatcaagggatccccctacccacggggctactacaagtgcagcaccgtgcgggggtgcccggcgaggaagcacgtggagcgcgccaccgacgacccggccatgctggtggtgacgtacgagggcgagcaccgccacacgccgggcgcgcccgcgcccgcgcccagccccctaagcgactcactcttctgcagcaagccaacacattgttgtcgacagctattatcaatggcgtagtccctgctacctgctctattgttcttgcatcttgagcggaccactggattctaaggcaccctgaaatctgtctacgagatctctaagattatgagatgacctatgacccc

SEQ ID NO: 3789 - DNA, 320 bp, Zea mays
  unsure (1)..(320): unsure at all n locations
  Clone ID: TF_LIB4315-021-R1-N1-F6
gttttgggttttcttactaataccaacaactgccgcccctggtcttgtgcttcggccccttttgatcgtcctcccccttgtcgctgacgatcaccccggcggtgtccgcttggctgcgctccacctgcttcctcgctgggcacccccccgggtgagcggggctagtatccccntnnctcnncccatcccttgatgtncttctgcccatacttgcgccaccccctcgaactccgactgtggctgcccctccccgctggcccctctgggccggcccccgcactcccccagccgcgctgacccaacccgcttcctccccgatc

SEQ ID NO: 3790 - DNA, 866 bp, Zea mays
  Clone ID: TF_ZmC581509_2
aatactacaaccctctatataaccctggttgtaacttggaaaactctttcagcctcccctccctcacaagctctccagattccgctcccgcccgcgcaactagccagcctccaactccatggagaattatcacatgctcttcggacggccgtccacgcagccgtcctctgccgccacctccaactcctacaacttcatgctgccccctgccggcagcaccagcggcgccggcggcctgcgcgaccacgatagaggcggcggccagcacagcgggcatgccggcggcgtaccgtcgtcctcttccttcttcgcggagccatccaacacctcctccaaggacagtggcgcagcagctagcagccctcctccagccgcaggtatcggccgcggggaagaacccgcggcggggacgccaccagcagcagccgaggtggacggcaggctgcaggcgggcaagaggaagggggagaagaaggagcgccggcctcggttcgccttccagacgcgcagccaggtggacatcctcgacgacggctaccggtggcggaagtacggccagaaggccgtcaagaacaacaagttcccaagaagctactacagatgcactcaccaagggtgcaacgtgaagaagcaggtgcagcggctgtcaagggacgaggggcgtggtggtgaccacatacgagggcacccacacacaccccattgagaagtctaatgacaacttcgagcacatactcacccagatgcagatctactccggcatgggatcaaccttcagcagtagtagccacaacatgtttcactgaaaccgtcccaaatcacttcaagcatcggcggaccatgcaaactaataaattaagcaggaa

SEQ ID NO: 3791 - DNA, 823 bp, Zea mays
  unsure (1)..(823): unsure at all n locations
  Clone ID: TF_ZmC1382_3
ccggccggngatattcaggcaggcgcattgactggtacgcatacaactacaagcaaggcggctagctacagcggctagtgcgcgcgtggtgcaggcgcagctagctagtgcatgcaatggcgacttcgctgggactgaaccctgaagatctcttcacttcgtactcgtcttcctactactcctcgccgccgttcatgtccgactacgcggcgagcttcacgccggcgggcggggactccacggccttctcctcggagctcgacaaccttcaccacttcgactactcaccggcgccgatcgtcactgctgccggagccggggctgggggcggcgatcgcaacgagaagatgatgtggtgtcagggtggtggtgacgagagaagactcagaagcaacggaaggatcgggttcagaacgaggtcagaggtggagatcttggacgacggattcaagtggaggaagtacgggaagaaggccgtcaagaacagcccaaatccaaggaactactaccgctgctcgtcggagggctgcggcgtgaagaagcgggtggagagggaccgcgacgacccccgctacgtcatcaccacctacgacggcgtccacaaccacgccagccccgcagccgctgctatcatcgtcccgtacggcaacggcggcggcaatagcggcttctacagcccgccgcacagcggctccccgtcggccacctcctactcgggctccctagtcttctgacttttccgggccttgacccatagttacctttacaccccagtcgtcggatgagaagaatcttcagcggncggctaaacagtctcaactgc

SEQ ID NO: 3792 - DNA, 989 bp, Zea mays
  Clone ID: TF_ZmC300_25
cattgggtacctcgaggccggccgggaatctttgcaccgtaccccgtctcggttccgggccggaggtctcgattattatggacttctctcccgtcccttgtctctcttcgtgatgtgttgttatttagtaagctgttaagctaaaagccagggccgctcctctgctgttaagctaacgcgcgctggcctgctcccaccgccgcccgccccccgtcttcttcctcacccctctccgccagtccccttcctcactgcatttcttggttttctccctccaccggaaccaagcgatgtctccggcgccgagttcgcatcattcgcaaaccaattcgaggaaggagaagcggatgcggaaggtggacaccttcgcgccgcacaacgatggtcaccaatggaggaagtacggcgagaagaagatcaacaacaccaacttccccaggtattactacagatgcacgtacaaggacaacatgagctgcccggccacgaagcaggtgcagcagaaggaccacagcgacccgccattgtacgcggtcacctactacagcgaccactcctgcaacagcgccttcctcccgctctccccctccgagttccagctgcggacaccgtccgggaaggccgtctccatctgcttcgactcctcgtccgggccggcggcgcaagagccggcggccgtggcgtccgtcgccaccaatgctagcggcggctcgccctcttccagcgccgcggcggtgcggcgaggcacgccgccggatatcagttacccgcccgacctgcggcggtctgacacgtacccgtggagcgccggcgccgtggagcagaagctggcgtcctgcgccaccgagtgccacgacgccttctcggccggcgccgtgccggaggaggtggtagatgcaggcagatttgggtctatcaggttcttccattttttgtaaattcatcggtggaaggcaactgattttactttgacaactaatatgatacag

SEQ ID NO: 3793 - DNA, 2195 bp, Zea mays
  Clone ID: TF_ZmC11799_1
cgctccggttggcaattcggcacggcgaggctaggcacaccagtgacaaagagtatactcgcccgatcccgccgcgcgccgcagctagagcctagagctaggaggtcgatctgatcgcatcggccggggtctgccgccctgcccatggccggcgccgccggggacaggtcggaggaggacgtcggcaccgactggccgttcggtggcgtcgacgccttcacggagtactcatcctttttcgcggagcccggctggccgggcggcctagccggggagctcatcccggtgctggatctgcccgaggcagcagcaccgctgcccgcccaactgtccacggaggagccatcggaggagcctgcgcccgccaggtcgggggacgccggcgcgtcgtcgagctcgagcggggacggtgccgcgccggggaacggcgacggcgacgacgatcggaaggcggcgccggccgccgaggcagcgggtaggaaaccggcggcgaagaaggggcagaagcgggcgcggcagccgcggttcgcgttcatgaccaagaccgagctcgatcacctcgacgacggctatagatggaggaagtatggccagaaagctgtcaagaacagccctttcccaaggagttactacaggtgcaccaacagcaaatgcacagtgaagaagcgcgtggagaggtcctccgacgacccctccgtggtcatcaccacctacgagggccagcactgccacagcatcggtccattccagcgcggcggcggcgggggcgcagccgcggcgcggtaccacagcgcggcggccgtcgcgctggcggagcaaatgtattcgtcgtcgacgacgtcgtcgttcatcccagcagcgcggcagcagctcttcagcttgccgccgttgcacccgcagagctccccgccgtcctcggagacgacgccgccggtcgttagctcggtgactactacttcttttcagcgtgctaacgacggcgacgagctgtggcggacaggctacggctcgggggtgcccgtggcgcagtcgccgtcaacgccaccatcagtgcctccgccggccatttcggttcagaaggcggggctgctggacgacatggtgccccatggtgtaaggcatggcaccccatgatcgatggtggcaaaatatggtaattaaagaaactgagctaaatatgatactgacttgctgctttctatttggtgtgtacgacgtagtagggagtacgttgtataggagcaataataatggcacttcatgcatgctgccacacatatacgtatatatatgatcgtattcatgtctctgctggtacgtacacatgtggactcagtggcttaggatctttttcaacgacatatttcaattagtgcactacaaatactagatcgagtagttggcagactagagcacatttgtacatgtgtacagatctagcatatgcatatatatgcatgcatacatgtgatactcccaattaagtttagatttcttagggaatagttgtatgcgagttatttcatgtaccttattattattattatatcttctttatattgcatttccagctgccctggttagctttgacaaacagtcccccctctccacatgctcatgcatggctgaaagctactatagctactagctagggaatgctgaatgcaaaaatgcagcacatacataaatgtaacgccggccctatattcctttcaacgactagttggttttcgttggaatcctctaaaaaatcgttataaacaccaatcggaaaggaaagacgtacttgtgttttgcgttcatacttgtgcacatgtatatataggaccatttcctatcttatccttcagcgtatagagtgacttgacttgacttgacctggagtctgatcgatctaattcaggttctcacgttttttttcagacatatacctgtcggccgtaccagcaagaggcggataaagtgatcaaccagagctatagctagggttttctcctgctggattcatcagtagttagatttatctattactctaccagacactgcatgcatatatatactcagcttatctgttcagatttgcttatattcagtgtcactctccaacaatctccattgcacctacatgtggatgtgtagcagtacttgtatttcttgtcaaaaatcagagaggtatatctagaagcttcgcatgc

SEQ ID NO: 3794 - DNA, 1065 bp, Zea mays
  Clone ID: TF_ZmC5807_25
caataggtgccacaccatcgatctttcttcagcctggcttgaaggaactgcaccagcagctaaccttctatttggttggggcttgggatgattatgatgccctttataaacaacttcagtaatctgaccatcaagcgaacgctctaatagctttttaacttcacaattaggatgagtgcacttgtaataacttctaggattttcacttcccttgacatgcttctgtccatatttgcgccaattatagccatcctctgctgatttttcagctacattttcagtttgtgtctcctgggcagcattttcagagctatttatcaggtgcatctctgatgtaccaacttcagcaggcatgttgtcagatggacaaactattgaaacaggttggtttggagcacttgaaacatttgctgtgtgactcgattcccgtgagcatagaggtttattttcagtcatcaaattgctagatggtgaggcatgatttgagccatgattttgcataggaatgtcatgatgattttgattgttgactgcagtagccgacgattgagaattgagatgaggcttgaattcaaactcccgagagcctccatcttcttggccactatcagctgaattatccctaggcgaaggcagtatgtccggatgagtgctcttgttcatgtttgcagccatgctcagagtaccggttgtgggagacggttcaaccttgaagttgttgaggaggacgggggactcgaggagagctccggggctaaacccggtggggatggtgaggcacggctcccgcgatatcggcagccgcgcgggggacatggccttgtacctcgcgccggcgccggcgagcgcagacacacgtcgatccgccaggaccggcttctccggcgagcacccagcgccggcgggaaggtcgccggagctagggtttggcgaatcggccattggcgcgggccgcggggggaggtgagtgaaggagacgagacaaggagcgacgagcagctaggtggtggttttggagcctagaggggatggtgggaagggcagtttggggaaagtggccccgaa

SEQ ID NO: 3795 - DNA, 2210 bp, Zea mays
  Clone ID: TF_ZmC1508_1
tcggcgggacggtcactgtacagtcaaaagctccccattcctcttccccttctcacccggcactcgaactctgcggccctgcaaaccctagctttcgctccatggccgacggcgatccggagccggcgccagcgccggcaccggcactggctaacgagaagctccatgtccgggcggcggcctacgtggatgagacgcgcccgccgccaccgctggagccctccgggggtccggacgaggagaagcgcccgcccgaagaggtagaagcggaggtggagatgcacccgccgcgggaaccaaccggggagccgcccgttgatcgcccgggggtggaggtggtggcggacatgaaggcgaacgaagtggagaaggaaaggggggatcgggcaaaggagaagcgggagaaggataaagggaaggggaaggaggagaaagagaaggtggacgaagaggcgaaggggaaagtgactgcggtgatgaaggtggatgggacggagaaggaggtcaagccgacccggcggccagctggggccagcgcggagacgcccatcctagcggtgccggtggtggccgtgccttgcttcatcgcgcctccagggtttgcgggccagtttgcaatgactcatcaagcagctttggcaagtgttacagcacaggcacaaatgcacttgcagtcaccaactccatctgcatgttcggaagtgccatcaagtccattttatatgacaccaagatctctagtgccattgcagcattcaccatcagtaactgaaggaaatatttgtacaccaattgctgacaagtcattttcatctgattcaaaatcacaccatgttgtaaatatggtagctgatggcttcaactggaggaaatatggtcagaagcaggtgaagagtagtgataattccaggagctactatagatgcacaaactctggttgtctcgctaaaaagaaggttgagcatttccctgatggccgcgttgtggaaatcatttacagaggagcccataatcatgaaccaccacagaagaccagatttgcaaaggaaagagtgactcctattagtgttccctctggaggcgaaaccttgaggcttgtgaacacagaaattgtagaatctagcacgcctacctgtgaattggaacggagtgccatctcagaaacttctgagcagcatctcttttgctcaagtgactgcgaaggggatgctggtaacaaatctgaagatgaacatcctagcgcggaagccctgccaaagcgaagaacacttgaggctacagcaccaaatttaacgccggttcgcagaactgttagagagcaaaagattattgtgcaggctggaaagatgagtgatggatacagatggcgtaagtatggacagaaaattgtgaagggaaatccaaaccccaggagttattaccgctgcacgcacggtggatgccctgtccgtaagcatgtggagaaggcgccagatgatgttaacaatattgttgtaacgtatgaaggcaaacacaaccacgacgaacctttcagaagcagcagcataccagtttctgtaatcagtccatcagcgacagccactgagcaacccaacacatcaagtacgtcagatgagagacctccaaccattacccagaaggacgccaacagtgagtctgataaggagacaaccttgaaatttggaggcgagaaggcactcgaatctgcgcaaacgctgctcagcatcaaaactaactccgatgacatgaagaactctgtcctgaaggaaacttctgctgcagttccagtccaaaacaattgagcatgctgagatagggtgattctattgacatctcttaggctgtcatatttattggttgagtgatatgctattatgttaacttgtatgacgtgaggcttggtgttcggtattccgtgtggagcatttgaggaagcattaggtttcaggaagccacgactggttgtttctgcctgtatagattcccattccctagtgtgtacaggtactgtattttatctgaggccagataacatgtgtggggtggttcttgagaacctgtgtgtgctgtattgttctagctcgatctattgcaatagctgatacgagattgtcatttatttatcggtataacacaacaaaaaaaacgtttgcaaaaaaaaaaaaaaaaaaaaaaaaaaaaaaaaagtactctgcgttgttaccactgct

SEQ ID NO: 3796 - DNA, 1139 bp, Zea mays
  Clone ID: TF_ZmC154114_1
gaatttgctcggaggcgcaccaacggaggcacctgcccgcagaagttcgcccaggaagtgtgcggcaaccgagctggtggccaaggggagggagtcggctgccgttctcaaggccatgctcggccagcttcctgcggcggcgacgccccatgatggtctccgggatctggccgagcaggtcctccgctgctgcgaccgagctctggcggccttgctcagaggcgcggcaacggaggaggctgcctgcagcagttcggccaggaagcgccgcaagcagccagcagagcggcagggcggcctggctcctcctcctccttctcctgctgcgacgggatccaagaggatgaggatgagccgtggagagcgggggacacgagcggagaagaaagaaacaatggaggacggcttcatctggaggaagtacggccagaaggacatccacggcagcaactaccccaggctctacttccgctgcacctacaaggacgaccgcggctgcgaggcccggaggcaggtgcagcggtcggacaccgacccctgcgcggcctacctcatcacctacttcggcgagcacacctgctgctgccgcgacgacgccgtcgaggcgccagcgccattcgtcatcgacttcggcttgagcgccgctgcctgtgacgacggcctgcagctgccgcaatacggttcgccttggccgtcttgcgacgacgacggcccgggcccggtggaattgcaaacgccgccgccgcgcacatcagctgatctgtgcagttcaccgccggaggaggagttgcgggctggcgcgtgcgacgtggctgagttcgtcgccgagcagtcaacgacggtgacagcagagctcatgggtaggatgacctcgccggagtgggacgggtgcttggactgggagttgggcgaaggcgacagctcactcgacgttgacggtttcgacagatactacttcgattacagtgatctgctttagagcctgtacaatctattaatctaattaaataaggagtttttttgagcggtctctagaagagacagattcttcgtcaagagttcgagagttcgtctccactcaatttctatatatatatatattatattttgactgtaaaaaaaaaaaaaaaaaagtccac

SEQ ID NO: 3797 - DNA, 984 bp, Zea mays
  unsure (1)..(984): unsure at all n locations
  Clone ID: TF_ZmC96043_1
cgcgcagctacttcaagtgcacgcatcccaactgcctggtgaagaagaaggttgagcgctcgcacgaggggcacgtcacggagatcatctacaagggcacgcacaaccacccgaagcccacgcagagccgccggccaggcgcaggcgcgcacccgttgggcggcggtgcgcaggcggacgcagccgacaacctgcaggggtcacaggcaaacgcggcggaagccaaccagccgtggcgtgcgggtgtccaggatggcgtggacgcgacgtcgcccccgtcggttcccggtgagctctgtgactcggcggcgtcgatgcaggtcgactgcgcggcccggtttgggtcccccgagggcgcggacgtgacgtctgccgtgtctgacgaggtggacggggacgacagggtgactctgactcatggcggtgccaacgcggcggagggcgacgaactggaatctaaacgaaggaagctggagtcatacgccattgacatgagcactgcgtcgagagctgttcgcgagcctcgagtggtgatccaaacgacgagcgaggtggacatgctggatgacggctaccgctggcgcaagtacgggcagaaggtcgtcaagggcaacccgaatccaaggagcttctacaagtgcacgcaacctntctgtatggtgcggcctcttttttccgcgcgctttttacgctcttatgctcttctttccttttttccgtccctcggcctcctttttttttttttttccttggcttcttccccttttttttttttctcctctttccctcttttcccccccccgctttttcccttctttcccccctttttccgtcccttttccctcccctttccccttttcttcccttttcctccctccccgtttcgccttttctctcgtttccctcccttttccttcctttcctcccctttctctcccgttttccttccccttttcctccccgttcctttccgtttctttcttt

SEQ ID NO: 3798 - DNA, 920 bp, Zea mays
  Clone ID: TF_ZmC208922_1
tttttttttaggggatcaaagagcatgcaattgccattgatgtgtatgaatgatgaatcaaacagctggtatgacaactgtaagagtgacttggagttgtaaacaaaataaagaaaagtaaaggcagcaatctttaatggaattgtgaaaccagcagcttagctagatttaagtactggaacgaagaatctgaactcctggttgtcttcgtctctactccggcggcgtcatgtcgtcaataccatgcgtgtcacacatcacagcatctgtgcttgtcgacagcaatggcttcctcgggggacaaggcttgcccggcttcaggtggttgtgctcaccactatacacgatctcagcaacctggccatctggcgtcgtctccaccttcctcttcacagggcagctagggtgagtgcacttgtagtagctccgcgggaactcgctgcctttcactttcttttgcccgtatttcctccagctgtacccgtcaagtgacaggcgactgcgctcaccattccgcctcgcagcttgccacgctgttgcatggtcacgatacgtgtgatgttttgcatactcttccacctcctcagacatggtatccgacccggcatctatcgctgctgctatctgtgctggaaggttagccggtagcgatgccaaccgagtggcttttggcctgattagctcactctcctgtgggaaggtgattgttggggaacaagtggcgttgaagtcgtgcagaaactttgggaagggccagaagctggagaaaggccttgaggcaacaggcttcagaacagcaaccttctcatgaggctgcatcttccctgaaccttagtcctccactctgttgcagctgtatatactggtggaagcaatgcaattgcaaaggcaacaagccaacaaggatgtgagcagaagac

SEQ ID NO: 3799 - DNA, 696 bp, Zea mays
  unsure (1)..(696): unsure at all n locations
  Clone ID: TF_LIB4980-002-R1-M1-H1
ggccctaggggccttttttttttttttttttggtctttgcctctttggcatgcacagattaaacaagaggcctcatctgaatggatttcatctaaacagacacggagaaacagaagcagtgaaacgcactcaagttgtcactactgtacatcttgttttcaatgaaaagaatggcggcgtcgctcaagcacgacgctggcagaggctccgaatccgatccgtcggacgggctctcaagcctccgcgttcgcggcggtgagcacggaggggtccagcggctgcgcgtggttgtggtcgttctcgtaggtgacgatcagcatggcggcgtcgctgcggcaccgctccacgtgcttcctcgccgggcagtccttcttgctgctgcacctgtagtatccccttgggtgaggagagcctttgatgggtttctgcccatacttcctccaagagtagttgtccgctggtatgtcggcgttcttgtcgctgatcgccggcaccctcaccaccctcttctccctcggnttcctgcacagatctccaccatccattggccagccatccaaacgccacgtacaacatgtcgcgttgcaaacttgcgagcaggaggaggatgcagagatggcggcagcggcactcactttttcttcgggcagtggcacctcacgccgctgctgtcctccgctctcttgncacacgcct

SEQ ID NO: 3800 - DNA, 543 bp, Zea mays
  Clone ID: TF_ZmC425883_1
ccccttttcgagttttttttttttttttttttttttttttaagggaacaaatggcagtgtagctttatttgatacaacactacacatgaccgcctacaccgatggacgatggaccctctatcacatcggattacatgatgagtacactacgcatgcatgactagctagggttcatcgaccacacgctctgtcattcattcggcaagattgaagaccgttatcaccaacaacatctaccccggccgctggacgacagaacagatacggttcatcaaaaggagctgaagcaatcggtgtggtcgccggaggaagcgtcgtcgctgcagggagagtgcgtgtggcggccctcgtacgtggtcatcaccatgcggcagtccgtcgacagccgctccacccgtttcttcacgcggcagttgctgtgggtgcaccggaaatagctccttggatggaggctgttcttgacaaccttctggccgtacttcctccacttgtagccatcatccagtacatccacgtcgcttctggtctggaagcaaaacctcg

SEQ ID NO: 3801 - DNA, 930 bp, Zea mays
  unsure (1)..(930): unsure at all n locations
  Clone ID: TF_ZmC58440_3
cccacgcgtccgatttgtccattccccctccaccattcctccccgctttctccaccatcagggcgaaaattttatgcgagctttggaaagcgcgagctagtttatccggccgggcgtggtcaccgaggcagtagcggcgagagaggggaggatctgatcgatgtcgtcgggcgaggacgggtactgcagctcggattcgccgcgggcggaatcccccgaccagccgcaggcagctgcggacgcggagtcgcctcgcgccggagccgggccgaacaagcgcgacctccacgcctcgtcgccggcagctaagcgcagccggagatcggtggagaagcgggttgtgtcggtgccgctggccgagtgcggggaggggccgccgccgtctgactcgtgggcgtggcgcaagtatgggcagaagcccatcaagggctccccctacccacgtgggtactaccgctgcagcagctccaaggggtgccccgcgaggaagcaggtggagcgcagccgcgccgaccctgccgtgctgctcgtcacctacaccttcgaccacaaccacgaggcgccgcggcccaagagcagctgctgccaccagcaaggcaggccgccggcgccgaagcctgatgagcccgtggccgagcaggaggatgagctgggtccggagcatgagccggaagacgagcaggagccggagcagaaggtcgtcccaggtctggccgggccggaaacggcgccggcaaccgcaacgttggcgccggtggcagaggaggacgaaagcttcnacttggggtgggtcgaccagtacccgacgtggcaccgttcggcgctgtacgcgccgctgctgccgccggaggagtgggagcgggagctgcanggggaagaccccctgttcgcgggcctcggcgagctgcccgagtgcgccgtcntgttcgg

SEQ ID NO: 3802 - DNA, 363 bp, Zea mays
  Clone ID: TF_LIB3245-348-P1-K1-A1
cggacgcgtgggcggacgcgtgggcaaggactcaaaacttctgcacccacttttgataaacctgctgacgatggatacaactggcggaagtatggccagaaggcagttaagggtggcgagtatccaaggagttactacaaatgtacccacacgagttgtccagttaagaaaaaagtggagcgctcagcagaaggacacatcactcaaataatttatagaggtcagcacaaccaccagcgtccaccaaaaaggaggtccaaagatggtggtggtccactaaatgaagcagatgttcttcatgagaatgaagacatttcaactagatcagaacctggctctcaagacactctgaaaacatgaaag

SEQ ID NO: 3803 - DNA, 712 bp, Zea mays
  Clone ID: TF_LIB4738-064-Q1-K1-A4
cattattaggttcgtattggtcgcaccttgactgtgcttctgatatatactacaacaggaacagatccaagaagaaggccgagaagaggcagccccgcgttgccttcctcaccaagagcgaggtggatcaccttgaggacggctaccggtggcgcaagtacggccagaaggcggtcaagaacagtccttacccaaggagctactaccggtgcacggcgcccaagtgcggcgtgaagaagcgcgtggagcggtcgtaccaggacccgtcgacggtggtcaccacgtacgagggacagcacacgcaccacagccccgccagcttccgcgccggcggcgcgcacctcttcatgcccaacgcgcacgcgctgccgccgcagcacctgatgctgccgtccagcttccgcccggcggacctgatgggcatggtgcaccccgtcagcatgggcgcaaaccttagcatgttcctgccaactatgcctcctcatatgccatcgccggcgtctcgtgctcatcctcttcagcagcagcagcaccagttcactgactacgcgctcttgcaagaccttttcccttccacaatgcccaacaacccataactaactgctacacaattagctagcctagctagaatcgacatgagagatgctgtccaagtactctgcgccatatgtgatcacctgatggccttgcgctttgggcttggtctatgggg

SEQ ID NO: 3804 - DNA, 1497 bp, Zea mays
  Clone ID: TF_ZmC11951_1
ctgaaaagctcaatcctctccgccctttccacactaaactcccagcagactcccccactccccatgtcttctggagtaagaagtggcggcggaggagatcaccatggcgtccaccaccagcatggccacggccacctcgccggagccgacgacggcgccgagtacgcgttctacagcaacgacatggagagcttcttcttcaatcagccggcgtcggcggacgtcaataatggaggcagcagaactggcgccgacgagctcaccatgccgccgtactccagcgtcacggactacctacaggggttcatggacatggacccctctgggctagctcggcacctcgacgcgccgtgcctgctggcggaggacgccccgctcaagcatgagctgtccgtcgatgtgagctacgacagccagggcaccagcggcgcgcccggagatggggcggcggcgatgcacacgccgaactcgtcggtgtctctctcgtcgagcgaccgggagggggagggccagcttcgtcggtgcaggaagggcaggccgaaggcggaggatgatgcggagggggatgagaaagatcaagaagacggggagaattccaccaaagcgaacagatccaagaagaaggccgagaagaggcagccccgcgttgccttcctcaccaagagcgaggtggatcaccttgaggacggctaccggtggcgcaagtacggccagaaggcggtcaagaacagtccttacccaaggagctactaccggtgcacggcgcccaagtgcggcgtgaagaagcgcgtggagcggtcgtaccaggacccgtcgacggtggtcaccacgtacgagggacagcacacgcaccacagccccgccagcttccgcgccggcggcgcgcacctcttcatgcccaacgcgcacgcgctgccgccgcagcacctgatgctgccgtccagcttccgcccggcggacctgatgggcatggtgcaccccgtcagcatgggcgcaaaccttagcatgttcctgccaactatgcctcctcatatgccatcgccggcgtctcgtgctcatcctcttcagcagcagcagcaccagttcactgactacgcgctcttgcaagaccttttcccttccacaatgcccaacaacccataactaactgctacacaattagctagcctagctagaatcgacatgagagatgctgtccaagtactctgcgccatatgtgatcacctgatggccttgcgctttgggcttggtctaatggggagggaactgcagttattattgattgattaatctgctagctttcatcttaaacattggtttacagttcttacccttccatttgtcaactctccgctgcgcggattgcatgggaggtactagagatggaaccgagtactttttatagctatcactataacggcaactaatttatgtacggcgcctctagacttcttgtacgtgtacatatcatgtgttcctcattgaatcatttgggag

SEQ ID NO: 3805 - DNA, 1145 bp, Zea mays
  Clone ID: TF_ZmC581509_1
cctcgaggtacctcgccggccggcgcaacttttaagcgagcatggagaattatcacatgctgtttgggacgacggcgacgcatgcgcagccctcttcagctgccggaaccccaagctcctacaacttcattgccaccagcaccagcagcgctagcggcttgcggcgcgaccacgaccgaggccagcacagcgggcacgtgcacgccgccggcggatcctcgtcgccgtcctccttcttcgtcgcggagcggctgtcccacaacgacgactccagcaaggacggtggtggcggtccaggtccagccgcagctggcagtggagagaaggaggccgaggcggacgacaggccggcggcggccaggaggaagggggagaagaaggagcgccgcccgcggttcgccttccagacgcgcagccaggtcgacatcctcgacgacggctaccgctggaggaagtacggccagaaggccgtcaagaacaacaacttcccacgaagctactacagatgcacacaccaagggtgcaacgtgaagaagcaggtgcagcggctgtcaagggacgagggcgtggtggtgaccacatacgagggcacccatacacaccccatcgagaagtctaatgacaacttcgagcacattctcacccagatgcagatctactccggcatgggatcaaccttcagcaggagtagccacgacatgtttcactgaatgaaccttccaaaaccacttcaattaagcgtccgatcgagcaccatgcaaaccaagctagaaaattgatccatagattttattaatttgtacattgagtcttagatgtttaagagataaataaagcgtattgtgtaaaaaaaaaaaaaaaaaagctcgttagttcgtacatttcgtctgtgtgttctttgagtcctagatgcgtgagtggtcagctagcggcatttgatagctctctcccggtggttcttctcccccactgggtcttcttctcgcctttgtcctcttgttgttgttggccatgggtagtggccggccttggctccgccccgatttttacaccgccacgtttttagatggcgcttctttggagatggcgtttccacccctcatgtgataccacccctcattatattggcgggataaaaaaaaaaa

SEQ ID NO: 3806 - DNA, 919 bp, Zea mays
  Clone ID: TF_ZmC458678_1
tgtcattagtagtatatgtatattattattatgttgtctgtttgacctcttagtacgatggatttgcctgtgtatgtatatattaacataccataataatgaccaaattaagctagcttcgggttagaattagaactgcgagagaaactggagctgcttgaggatggggctgtgcgcttttatgagcttctcgcaggggtgtgtatggaccacctcgtaagtagtgaccacgatgctcgtatccttgcttagccgctgcacctgattagtcccattgcacgtgtgatgggtgcaccgatagtagctcctggggtgttcgctgttcctgaccaggtggatattgtacttagttgattggtagccgtctggaaggatgtcgtttacgcgagccgtctggaatgcgaaccgcggcctgctcggcttcttcttcctccccgccgccgcgccgcccttctccttgctgctgctactccctgcgttctccgcgctctggtcgtccaggggcgccggcggttgctgcagtagtagtcccggcaagaggggacccatcaagctggcatgctgctgaagcagcgccgaccagtccaccgtagccgcccccagctggagaggaagcagctgcaggtcgttattattgcacgccgatgacggttgctgctgaagcgctgtggcgagggtattgcgctggtcatccgattccgatggtggcggtaataagctcggctgcggcgacggcacggtgaagtaggggaagctggggaacgtgtgcgacggcgactcgtcgtctccttgcagctgctgctggttctccatcgatgatctcgttctatgggcgcctgctagctgttccttctagctagctctagtgggccgacgacatgcagtgtcacgttcccggccggcctcgaggtacccaatg

SEQ ID NO: 3807 - DNA, 1652 bp, Zea mays
  Clone ID: TF_ZmC35521_1
gccgagacagccccggcccgctcaccctcgccgccgcgctcttccccgacgcgccctccccggccttccacggctccttcacccagctcctcgtcggcgccgtaggctccccggccgtaccctcgtcgccctccccgttcgctgtcccgccgaggctcagccctgccacgctcttgggctcccccggcttcttctctcccacggcaagttttgagatgtcccatcaacaagccttagcacaagtaacagcacaagcagtccattctcagtacaatatgatcaatcatgcagattacactatccctttttcgtcgacgacaacacctgctttggtcatagcacagcatgccaatttttctggcaatttgacatcagcacaggagaaaccagctctgccgtcacatacaggtaatagcaacattgaatcaaatgaggtttcacaaggactcaaaacttctgcacccacttttgataaacctgctgacgatggatacaactggcggaagtatggccagaaggcagttaagggtggcgagtatccaaggagttactacaaatgtacccacacgagttgtgcagttaagaaaaaagtggagcgctcagcagaaggacacatcacccaaataatttatagaggtcagcacaaccaccagcgcccaccaaaaaggaggtccaaagatggtggtggtccactaaatgaagcagatgatcttcatgagaatgaagacatttcaactagatcagaacctggctctcaagaacactctggaaaacatgaagggtcaaatgatggcatatcagggccttctgtgtcaagaaggggaggaggagatgagcaattgtcaggctcaagtgatagtgatgaggaacaagatgatgaacaaagggctggcgacgaagaccctggctatgcaaatgcaaacaaaagacatgtgccaactccagctcaaaggataattgtgcaaacaaacagcgaagttgatcttctggatgatggctatcggtggcgcaagtatggacagaaagtggtaaaagggaatccccacccgaggagctactatagatgcacgtaccaaggatgtgatgtgaagaagcatatcgaaagatcatcccaagacccaaaggccgtcataacgacatacgaagggaagcacagccatgatgttccagcagccaggaacagtagccatgctgctgccaatgcaaattgttcatcttccaccagtgtaccacacagggtccagagttcagcgtccagtagtcgcagagtggcagacttacaaagcaccttttcagcttcttctatgctcaggataaataaagccgaaattacagatggctgatttgccgttggccagtgtggctgagctctcacctccagttttccaggtctactactaccatgggttagttgaagccattgagcagcatgtaatgttaaagaattgttcctttttatgatgtaccacctatgttctcgaatatttgttgtccattagttcatttttaaactaaaccgcgacaaataaaaaagaacggagtgagtataattctcagctaggaattaaacctagctaggcgggtggaaggtgtggcgtgggtctgctattgtaccgtacaagtttgataatttttatttttgaactcctccc

SEQ ID NO: 3808 - DNA, 767 bp, Zea mays
  Clone ID: TF_LIB5116-018-A1-PF1-F9
aactcctctacctttcttttcctttcttcttcctcctccttcgtcttcctctcctctcctctcctctgcgcttcctttcttgctctgggactgggcaacaatgtcccccgtgccaagcccgcatcaatcacaacttctaggccatgaatcaaggtcagttttctgcttctttttatctttcttttctatatatgtgtgcggtcagttcaatccgagtaacctctcttgatttgtttcttctgaaatgaaacaaacaaaacttgcaggaaagagaagcgcatgaggaaggtggatacctttgcgccgcacaacgacggccaccaatggaggaagtacggcgagaagaagattaacaactgcaactttcccaggttcgcagcccacctttggtctcatcctcatcctcatttggtgatctgcatctgcataggttcccaaaaaaccattagtagtatctagcatccgtcttttcgtggcatatcacaaatctttcagccccctctctctgatagggagggcttttcattcttcacatccaaatctaccatagggatgcatagtgtaacaaacttaccaagatatgaagaagccatttactcacagattcgtcttcttctttctatcctgccacaggtactactacagatgcacctacaaagacaacatgaattgcccggccaccaagcagattcagcagaaagatcacagcgaccccccattgtaccaagtcacatactacaacgagcattcatgcaacagcgccttcc

SEQ ID NO: 3809 - DNA, 1582 bp, Zea mays
  unsure (1)..(1582): unsure at all n locations
  Clone ID: TF_ZmC1136_3
cattgggtacctcgaggccggccgggactcccttcagccactcctctatcggtgacgcacgcaccccccatctctgatctgatctctccccctggatctcgacctccgcctggctgctccgctctgcctctgcgtcgcttgccatggcgtcctcgacggggagcttggagcacggcgggttcacgttcacgccgccgcccttcatcacctccttcacggagctgctctctggggcagcagcggacatggtaggagccgcgggcgccgatcatcaggagcggtcgccgagggggctgttccaccgcggcgccaccaggggcggcggcgtaggcgtgcccaagttcaagtccgcgcagccgcccagcctgcccatctcgccgccgccgatgtcgccctcctcctacttctccatcccgcccgggctcagccccgccgagctgctggactcgcccgtcctgctccactcttcctcgaacttcttcgcgtcgcccaccaccggcgccatcccggcgcagaggttcgactggaagcaggccgccgacctgatcgcgtctcagtctcagcaagacgacangccgggctgcggtcggcagcgccttcaacgacttctccttccacgcgcccaccatgcccgcgcagaccacgtccttcccttccttcaagcaacagcaagtcgaagcgacgaccaaagccgccgtcccgtcgagcaacagggcgagcggcggcgggaacggcaacactaagctggaggacgggtacaactggcgcaagtacgggcagaagcaggtgaaggggagcgagaacccgcgcagctactacaagtgcacgtaccacagctgctccatgaagaagaaggtggagagggccctggccgacggccgcatcacgcagatcgtgtacaagggcgcgcacaaccaccccaagccgctgtccacgcgccgcaactcatccggcggcggtgcggcggaggagctgcaggccggcaacagcagcctctcggccgtagcggcggccggctgtactggaccggagcactccggcgccaccgccgagaactcgtctgtcaccttcggcgacgacgaggcagagaacgggtcgcagcggagcgacggcgacgagcccgacgccaagcgctgcaggaggacggcgagaacgagggcagctctgcaggcggcggcggcaagccggtccgcgagccccggctggtggtccagacgatgagcgacatcgacatcctggacgacgggttccggtggcgcaagtacgggcagaaggtggtgaaggggaacccgaacccgcggagctactacaagtgcaccacggcggggtgcccggtgcggaagcacgtggagcgcgcgtcccacgacacgcgcgccgtgatcaccacgtacgagggcaagcacaaccacgacgtgcccgtgggccgcggcgccgccagccgagctgctgctgcggcggcggcgggttccggggccttgatggccaccggcggcggccagctcgggtatcagcagcagcagcagcagcagccatacaccctggagatgctgagcagcggatcgtacggcggcggggcggctac

SEQ ID NO: 3810 - DNA, 674 bp, Zea mays
  Clone ID: TF_ZmC740_4
cgggcggcgccacgtccgtcacctccacgtcttattctctcgggtcacggccggcgagggcagcgtgtccaagggccgcagcctggtgtcctccggcaagccgccgctgtccggccacaagcggaagccatgcgccggcgcgcactccgaggccaccaccaacggcagccgctgccactgctccaagagaaggaaaaaccgcgtgaagaggaccatcagagtgccggcgatcagcgccaagatcgcggacatcccgccggacgagtactcgtggaggaagtacggccagaagcccatcaagggctccccctacccacggtaagtcttctgtaaaataaaatctcctcctacggacctgtcggcatcgctcgcccgctcggcgctcggctcttctttaccgtcgtctccgactatccgcgccgacgaatctgactcttctctcgccgccatctggtttccaatccaggggctactacaagtgcagcaccgtgcgcgggtgcccggcgaggaagcacgtggagcgcgccaccgacgacccggccatgctggtggtgacgtacgagggcgagcaccgccacacgccgggcgcgcccgcgcccgcgcccagccccctgccggccgctccaaaggatcctacctgtagcgacgcgtgcatagctcttcaatactgtcac

SEQ ID NO: 3811 - DNA, 842 bp, Zea mays
  unsure (1)..(842): unsure at all n locations
  Clone ID: TF_LIB5100-006-A1-PF1-G10
gattccgcgcacttgccgcggacccggctagctggtggacgtacgcacgggaggagctgatgagatcgacgccgacgccgacgccggctctcttgcttgttgcaggtcagcggcggggaagggcaagggcaagggcgagaagcggcagcggcagccgcggatcgcgttcatgaccaagagcgaggtcgaccacctcgaggacggctaccggtggcgcaagtacggccagaaggccgtcaagaacagcccataccccaggtacgtggtacatgcacagcacgtatatacagctatacctactggctactgcacgtatatacagcacctctcttctancttactccatgacgcacgctacggtagacattgctgcatgagctaatggtgatggcgtgcaggagctactaccggtgcacgacgcagaggtgccccgtgaagaagcgggtggagcggtcgcaccaggacccggcggtggtgatcaccacgtacgaaggcaagcacacgcaccccatcccgtccacgctccgtggcagcagcacccacctcctcgccgcgcagctgcaccaccaccaccaccacaacatcgtcggcggcgtcatcgacatgctgggtctctgcctgcctccgcgcaaccacgccgccgtgccgccggcggcgacaggcctcgcgccgtccccctgctgcatgagcggtccggtgggcacggtggcaggcgcgacgacgacgacggngcccaccaccaccaccgtcaccacgaccactacctcgtcgcctcctcctcctccctcgnntcagaagatgcagcactttatggcgcaggacgacttcgggcttctacagga

SEQ ID NO: 3812 - DNA, 1026 bp, Zea mays
  Clone ID: TF_21211742
ggtccggaattcccgggtcgacccacgcgtccggtaaccatttaagacttgatgcagacattgtactgaattcgctggtactctttttcaggaagttggaattagatgctttaggagctattgctattgctactacctccaccaccagtaccattgacatgggccctgcatcctcaagagctgtccgggagcctagggttgttgttcagaccacaagtgaggtagacattcttgatgacggttatcggtggcgtaagtatggacagaaggttgttaagggcaatccaaatccaaggtcacactttcactaccatttcttacactaaatgactaaactgtatccctccatcccctgaagctagtaacattgattcacttgcatgcaggagctactacaagtgtacacaccctggctgttcagtgcgcaagcatgtggaaagagcatcacatgatctgaaatcagtcatcacaacatatgagggaaagcacaaccatgaagttccagcagccagaagtagtgggcaaggcagttctggttctggcagcggtccatctgcaccacaagctggtggttctcaccgtaggcaagaacctgcacaagccagcttcgctcactttggtacatctcctttcagctccttcggtctcgcaccgagcggacagttgggaccaacaactggtaatttccgcttcggcatggttccgccaggcgcgacgatcccaatgccctctctaggatcacttgcccctacaaaaatgattggaaatccatcagctatgcaggggtacccagggcttatgatgccaggagagccaaaggtagagcctttctcgcgaccacacttcccaacgtcaattgcacctccgccagcttaccaacagatactgagcaggcctccttttggtcatcagatgtaaataataggaaggggatagatttgcttcggcttgtatacatgatagctacgctgcaacatggctttgttctagttttgttgatggatcgtccgatttttaaaaaaaaaa

SEQ ID NO: 3813 - DNA, 903 bp, Zea mays
  Clone ID: TF_ZmC35521_2
gtccggaattcccgggtcgacccacgcgtccgcgcaagtatggacagaaagtggtaaaagggaatccctacccgaggagctactatagatgcacgtaccaaggatgcgatgtgaagaagcatatcgaaagatcatcccaagacccaaaggccgtcataacgacttacgaagggaagcacagccatgatgttccagcagtcaggaacggtagccatgctgctgccaacgccaatgggtcatcttccaccagcttaccagtaccacacagggtccacagttcagcatccagtagtcgcagagcggcagaattacaaagcgcatcctcagcttcttctatgctactaaaagaggaaaacgaaataacataggagttttggagtgtgtagccagggtaaattatatctgttctctgatccatttcctcctaggtgtgctgcttcacgctctgcgccgcagcaaaaattgggcactgcaagcccccaccattggttttagtcaagagcgagctctttcgtttgtgcccttccaaaagctgcacaccctgtttggctgcgcggtgtatgttatgttgtcattaccatttacgcccattggttgtaaatgccatcagtcgttcccccggagaactatatggatgacagcattcatcggcccaagtgtatatactcgatttaaaaaccttttttttaactgagatatggtttgttgtaaataaacggcttccttcctggtctttgtaaagtgttatttcgacaggatatataaagctatagtagctgatggctgatttgccgttggcctctgaggctgtgagctcacctccagttttccaggtctactactaccatgggttagttgaagccattgagcagcatgtaatgttagaattgttcctttttatcc

SEQ ID NO: 3814 - DNA, 768 bp, Zea mays
  unsure (1)..(768): unsure at all n locations
  Clone ID: TF_LIB4756-017-Q1-K1-G2
ccggccgggctccctctaatccagataacctgggggtaataagaatgactacaattagcatttcctcgcatctttctagctacctctctctctctctctcgtagtctcgtgtgcggtttgtatctagctaggtataacaacagcccacccagtgtgggtttctagatcggcggctggtctagctagccagggactaggaccgatccatggcgtcgtttggcagcgacgaccacgtgccggcggccatggcggtgaacgatctggtcgaggcgcgcgacggcgtggcgaggctcaggatcttgctgctgcagctggacgagcagcgcgcggcgtgggcgcagctggagatcgacgccgtgctggccaagctgtccagcgcgatatcggcgttggatgcaagcgaagtaggccggagccgggccgccgggccggacggtgcgaggccacagcgacagcagtcggggaggtcgggcgggaacaagaggaaacaaggttccagcagaagatcacagcgcccctctgacaagaagatcactgctacgctggaagacgggcacgagtggcggaagtatgggcagaaagagatccaagactcatcctatccaaggagctactacaggtgcacgcacaaggcggaccagggctgcaacgccaagaggcaggtccagcgctgcgagacggacgcgtncacgtacgtcgtcacctactacggcgagcacacgtgccgggacctctcgtcgatcccgctcatccaccaggcccgcgccg

SEQ ID NO: 3815 - DNA, 895 bp, Zea mays
  Clone ID: TF_ZmC65166_1
ttttttttttttttttttttttgcggtacaagttccatgatatactcaagtgccttgttgataaataacgaaccgatgataatttttttttttttttttgaacatggcaagtgcgctttggcgggcaggtgccattgttcaaagagaagtaagaagttgcgggtgaagaggtcgattaaggttcctgccgttagtaacaagatcgctgatatacctccggatgagtactcgtggaggaagtatgggcagaagccgatcaagggttcccctcatcctaggggctactacaaatgcagcagtgtgaggggctgtccagctaggaagcacgtggaacggtgtgtggatgattcggcgatgctcatcgtgacatacgagggcgagcacaaccacaccggaatgccagctcagtcagcagcagcagcagcacaggtgtagccgtgtagtcgtagagaactcatcatcagttcatcactgcacccccgcctccccctccttgaggacgaagtggcaccaccaacatggcctctgttggtcaccaggtcgtcgagatgtctggtcctgcttgcgcccacaagatctgtagcgagaatggagtgtgggtgtacacaagactttctaatccatttggggggcagctggctgttgctcaggattatttattgtggtcttgttgagaggtggaagggagaaggtaaaagtttggcgggaacgggatagccgtgtaaactacttgttcatagcacaatcgtcagcggcaactgccttcatttcatttctctactacggttctgaaatctatttctgttgtttagcataggaattcttttttttgaaacgaaccaggcaggagagctgtcgattatatttataaagaagaagtggtccggatcgaact

SEQ ID NO: 3816 - DNA, 873 bp, Zea mays
  unsure (1)..(873): unsure at all n locations
  Clone ID: TF_ZmC30082_20
ttgggtacctcgaggccggccgggaaccgttcgccacctaaccctagcgcgcgccactctccctggcagccgccgccaggaagcctccactccttctccctcttctctcctccccttgctcttctctggccgacgccacttgcgtgtgcaggcaggcaggccctggcgtccgcgcatcctcttctggccaggagctcccccacgcagccgctgctctctccacgtcctctattccttcccatccccgatctcccccaatccgagcagaccggttgtcgcttgctcatggcgtcaggctggttgcttcctcaaagcgagcggcgcatcaactatttatctacgtcctggataatcgaattgctttgccgtggaagcaggagaaggaagaatgcaaaacacgtagtgagttcagttgtgacacaagcaccaaactttgatgggtatcagtggagaaagtacgggcagaagtggatctccaaagcaaagcattctaggctgcaattgagtacattcattctttatcaagggcacagtctgctcgttctctcaatggtgctggcctttgtcctgctagtagatcacttagcacccaggccgccactacgtcaagcacaccacagttgaaagcacaccccatgtcaagcagccaggccaccactacgttaagcaaaacagaagacgagaagaactgatgtagccatgttcatgcttccactgttgaaatgcatattcagcatagcttactcagntcctatctgttgttcaatggtgatttaaaagagagctggtagttgtgagctatctgtaaatgatctagttgggatgatattataatgngatgctttgtgaaaatataatggggggcctttggtt

SEQ ID NO: 3817 - DNA, 767 bp, Zea mays
  Clone ID: TF_ZmC58440_2
ggggagggatcattgaaagccgcagcgcccatgtcccaggcccgtctgttcgccaccatttgtccattccccctccatcattcctccccgctttctccaccatcagggcgaaaattttatgcgagctttggaaagcgcgagctagtttatccggccgggcgtggtcaccgaggcagtagcggcgagagaggggaggatctgatcgatgtcgtcgggcgaggacgggtactgcagctcggattcgccgcgggcggaatcccccgaccagccgcaggcagctgcggcggcggacgcggacgcggacgcggagtcgcctcgcgccggagccgggccgaacaagcgcgacctccacgcctcgtcgccggcagctaagcgcagccggagatcggtggagaagcgggttgtgtcggtgccgctggccgagtgcggggaggggccgccgccgtctgactcgtgggcgtggcgcaagtatgggcagaagcccatcaagggctccccctacccacgtgggtactaccgctgcagcagctccaaggtgccccgcgaggaagcaggtggagcgcagccgcgccgaccctgccgtgctgctcgtcacctacaccttcgaccacaaccacgccgcggccgctgctgccaccagcaacaggcgcccgccatgggtgcgctgggtctggtacgggcggggttcatctgctgcggcggtggctggcaagggagtctagacaaactagacatgagctgcaaagatagatgggtgattaatttgg

SEQ ID NO: 3818 - DNA, 2187 bp, Zea mays
  Clone ID: TF_ZmC332_1
cgggttgtaaaaccaaccagcctaccacccgaggccgagtgcgtcgctttcctcctccaggcctccaccctcgagacgagacgggagggggagcgagcacaaagcggaataaagaaaaggccgggaaaagcgagggcactgcgcctccgctgcggcctgcggcgccagcgccagccaacccctccctcctaccagtaccagtatttgtttgtttatttatatgtatatataaaaccgtcgctcactccaccactgaccactctaccgagccgagcgccgggcggcctttggactcgtaccactccgcaggcggaacggaacacgggcgagggcgtctccaccctcccgagctcgtcgtcaccgtcaccgcaccaccgaggcgcggcgcggcgggcttcgctcggcgagggaggcgcgccgtccatggaggcgatggaggaggccaacaggacggcagtggagagctgccaccgggtgctggctctcctctccaacccgcacggccagctcgtccccagcagggagctcgtggccaccaccggggaggccgtagccaggttcggctccctggcggccaagctctccagctccaacggcaatggcctgcagggccacgctagggtcaggaagaccaagaagcccctgcccatcttctacagcaacctcttcctcgagagcagctctgcggtggccgccgccgccactgtggccaagacgggaggggatggaggaggccaacaggacggcagtggagagctgccaccgggtgctggcgctcctctccaacccgcacggccagctcgtccccagcccgagcccgatccctggcctccagctgttcccgaggtaccaccagtttgagggctcgtcgtctcaggatcctggggccgatccctacccagttgcccaagaggttgctgctagagaagccgactgccggtatggaggggtcgacgtcgcagtcccctccgatcgtccagatggtccagccggtgtccgttgcgccccccggagggacgcccagcccggcactgccccccggtcgccttcatttcaaccagcagcagcaaagctaccagaggtttcagctcatgcagcagatgaagatccagagcgagatgatgaagaggagcaatcttggtgatcagggtggtagcttaagtggcggcggcggcggcggtcgtaagggactgaatctcaagtttgacagctctaattgcacggcgtcatcgtctcgctcgttcctttcgtctctgagcatggaaggaagtcttgcgagcttggatggaagccgggccagcaggccgttccagctagttagtggctctcagacagctagcacaccggagctgggcctggtgcaaaggagaaggtgcgctgggaaggaggatgggactggtcagtgcgcaaccgggagccggtgccattgttcaaagaaaaggaagctaaggataaggaggtccatcaaagtccctgcaataagcaacaaggttgcagacatcccagctgatgagttctcgtggaggaagtatgggcagaagccaatcaagggatccccacatcctaggggttactacaagtgtagcagtgtgagaggctgccccgcgaggaagcacgtcgagaggtgcgtggacgacccctcgatgctgatcgttacctatgaaggtgaccacaaccacaaccgagttctagcccagccagcctgatctctcaggctatcaattcaagatcgcttctacagtcaccctccctccctccctagagaagggatgacaacgacgacaatagcaataacaagagcctagtgcctgtacatatgttctgcttctaacagttggaggagagagtcagttagctagctctttcagaagaatcaatggtgacaggggggaaacttgtcatgtcgatggagaaagggggaggggttcctcatcaaatactctagttttgtagttttggtttctcttttgtgttcgtcctgtgctagggcccatcttgtggttgcagtgtgacattgagccgcagttgtatgtctggtaatggtgttaggggattggatcgagaagaagggcacaaggcaggaaaagtgcctgtaaaagtggctacacctaggaacagaatgtacaatcgtcttcagtccagtggtacaatcttgttgacgcaaaaaaaaaaaaaaaaaaagcggcc

SEQ ID NO: 3819 - DNA, 437 bp, Zea mays
  Clone ID: TF_LIB3332-030-P1-K1-A2
cgacgcgtccgcccacgcgtccgcccacgcgttcgtgaagatgagactgaatctaaaagaaggaagttggaattagatgctgaaggagctatcgctattgctactacctccaccaccagtaccattgacatgggccctgcatcctcaagagctgtacgggagcctacggttgttgttcagaccacaagtgaggctgacattcttgatgacggttatcggtggcgtaagtatggacagaaggttgttaagggcaatccaaatccaaggagctactacaagtgtacacaccctggctgttcagtgcgcaagcatgtggaaagagcatcacatgatctgaaatcagtcatcacaacatatgagggaaagcacaaccatgaagttccagcagccagaaatagtgggcaaggcagttctggttctggcagcggtccatctgc

SEQ ID NO: 3820 - DNA, 1337 bp, Zea mays
  Clone ID: TF_ZmC1136_5
gcgttcggctccggttccctcctccccctcctctcccacctcagcgtcttcctccaccgtgccggccagcccagacgtacacgacggatacgacgtaacagccttctccccactcccccgaccggtctcgtcgcagcggagcaccgcggggttgattccgtacgctcgccgatgaccacctcgtcctccgggagcatcgaagcaccggcgaactcgaggcccggctcgttcgcgttcgcgagcacgagcacgagcacgagcacgagcttcacggacatgctgggaggatccacggacgcggccggtggggcgtcgaggtacaaggccatgaccccgccgtccctgcccctgtcgccgtcgtccttcttcagtaacaaccccggcggcctcaaccccgccgacttcctcgactcgccggccctcttcagctccagtatcttcacctcgccgacgacgaacgcattcgcctcgcagcagttcagctggttggcgacgtcgggcgcggagcaaagcggcaaggacgagaggaggccgtcgtcgtacccggacttctcgttccagacagcgccgacgaccgaagaggccgtgcggacgacgacaaccttccagccaccgattccagcggcctcactgggtgaagaggcgtatagaagtcagcagcagcagccatgggcctaccagcagcagcaacctggcatggacgccggatccagtcagcaggctgctccctacggcgagccgttccaggctgcctcgtcggacgccgccacgatggcgccgcacgtgccggcgagcggcgggtacagccaccaagcgcagcagtcgcaaaggcagtcgtcggacgacgggtacaactggcgcaagtacgggcagaagcagatgaaggggagcgagaacccgcgcagctactacaagtgcacggacgcgtgggcccgggctgccccaccaagaagaaggtggagcagtcgccggacggccaggtcacggagatcgtgtacaagggcacgcacaaccacccgaagccgcagagtacgcgccggggcgccagctcggcgccggcgtcgtacgtggtgcagagcgccagcgacgcggtgatgcccgagcattcctggggcgcgctgtccggaacacccgtggtgacgccggagaactcgtccgggtccttcggcggcgacggcgacgaggtcaacggcatgagctcgcggctgggcggtagcttcggcgccgacgatctcgacgacgatgaacccgacttcaagagatggtgagtcactcaactttttgaaccaaaagcagaaggctttactctacatgaatgtcaatgacgtgtgttacgc

SEQ ID NO: 3821 - DNA, 828 bp, Zea mays
  unsure (1)..(828): unsure at all n locations
  Clone ID: TF_ZmC1372_2
atcaacgtcggttgcgccggcgcaaggcgtcaagtcaaccgccaccggcagcaccagccacccgctgccgctgccgctgccttccggtgcgcagcgaaagcgatcggtgctgcagcaggccagcagccagcaggggcagaaggtaatgcgggcgtgagcgtgacgcgacgggacgccacgccgccgcccgccggccggcctttcttgtcagctgccatgccacccccgacgctagctagctggcccgccaggtcgtcagcgcgaccgggccccgccgaagtactgggtgcacagctcgtatctgttggagtcggaggcgccgccgccctgcatctggccgtggccgccgggaggagccgccagcggcgggggcccgtgctggtgcgcgccgtcgtagacgatgcggaggtcgccgccggggtcgcgcgggtgccactccaccttcttcttggcgccgcacagcctgtgccggcaccggaagtagctcctcattttctggatgttcttgatgaacttctggccgtacttcttccactcgtacccgtcctcgggcatcaccagctgtctgccgttgccggcctccaccgccgccgctgccgcctcgtcgtcgtcctcctcctcccttttgtttgtctctcctctcncgaaaaaatatccccccccccacaatgatgcaaaaaatcagtcttgctactgtatatatcccagctggctgatcgtagtgctaggccacacagatatcatgaacttgaacatccgttatggtacccccatgttgatcgcggcgggttgtgagcttgaacccccgcgccccccccggcctccgta

SEQ ID NO: 3822 - DNA, 1229 bp, Zea mays
  Clone ID: TF_ZmC554_5
cggccgctcgaggcggcgggcgactcggaactcggaaatagttctccatcccaagcttctcttctcccttctcttctcctctcgcgcgcgttgcctcgaaccggaaggaacagcgtccattccattacagtagagcttggtgtttgagagacgatcaatccgtcgtcgaccaatggatccatgggtcagcagccagccttcgctgagccttgacctgcacgtcggcctcccgccgatggggcacccgcacagccaccaccaggcggcgccgatggtcgcgctggccaagcccaagatcctcgtcgaggagaacttcatgcagctcaagaaggaccctgaggttgcggttcttgagtcggagctacagcgggtcagcgaggagaaccggcggctgggcgagatgctcagggaggtggcctccaagtacgagaccctgcagggccagttcaccgacatggtcacggccggcgcccacgccggcggcaataaccactacaacaaccagccgtcctccgcgtcggagggcgggtcggtgtcgccgtcgaggaagcgcaagagcgaggagagcaacggcacgccaccgccgtcgcaccagcagcagcagcagcactacgccggcggcctcgcgtacgcggcggcgccggaccaggcggagtgcacgtccggcgagccgtgcaagcgcatccggggaggagcgcaaacccgtcatctccaagcgctacgtccacgccgacccctctgacctcagcctcgtggtgaaggacgggtaccagtggcgcaagtacgggcagaaggtgaccaaggacaacccgtgcccgcgcgcctacttccggtgctcgctcgcgccgtcgtgcccggtgaagaagaaggtgcagcgcagcgcggacgacagcgccgtcctggtggccacgtacgagggcgagcacaaccacgcccgcccgccgcagcacgacggcgccgccaagaggtcgtccgcgccgccggcgggcgaggccgcgcgaccgccggcgccactgccgctgcagaagcaagaggccgggccgtcgtcggaggtcgcgaggaagaacctcgcggagcacatggcggtcacgctcacgcgggatcccgggttcaaggcggcgctagtcagcgcgctctccggccggatctttgacaagggattataggttaataatagacgaacatgacgattaattgatgaatacacagccatttttatttcaccatgc

SEQ ID NO: 3823 - DNA, 751 bp, Zea mays
  unsure (1)..(751): unsure at all n locations
  Clone ID: TF_LIB5116-036-A1-PF1-G12
ttgacgttaagctaaaaggggcgccctgctctagtacgcttctgattaaggctagctcctcatacctttcttttcctttcttcttcctctcctctcctccgcgcttcctttcttgctctgggactgggaaacaatgtctcccgtgccgagcccaaatcaatcacaccttctaggccatggatcaaggaaagagaagcgcatgaggaaggtggatacctttgcgccgcacaacgacggccaccaatggaggaagtacggcgagaagaagatcaacaactgcaactttcccaggtactactacagatgcacctacaaagacaacatgaactgcccggccaccaagcagattcagcagaaagatcacagcgaccccccattgtaccaagtcacatactacaacgagcactcatgcaacagcgccttccttgccctcactcccacagagttccagctgcagaccgcatctggaaaggcagtctccatctgctttgattcatccggggctcaggagccgggagccaatgcgagctcgccttcttcgagtgcggcgccacgcgccacgccttcggagagcaagaacaagccccttgcgctgcgttcagaggcgctttcttcctgggcccccggcgttgtggagcaaaagacggcctgtgctgatctccagtcctgcagcaccgagtgccaagatgcatacatttcagaagacatangatgcagggagattcggttctatcagattcttccatttttt

SEQ ID NO: 3824 - DNA, 687 bp, Zea mays
  unsure (1)..(687): unsure at all n locations
  Clone ID: TF_LIB5116-050-A1-PF1-D11
gtccgggcaggaaggctagctcctcatacctttcttttcctttcttcttcctcctccttcgtcttcctctcctctcctctcctctgcgcttcctttcttgctctgggactgggcaacaatgtcccccgtgccaagcccgcatcaatcacaacttctaggccatgaatcaaggaaagagaagcgcatgaggaaggtggatacctttgcgccgcacaacgacggccaccaatggaggaagtacggcgagaagaagattaacaactgcaactttcccaggtactactacagatgcacctacaaagacaacatgaattgcccggccaccaagcagattcagcagaaagatcacagcgaccccccattgtaccaagtcacatactacaacgagcattcatgcaacagcgccttccttgccctcacccctacagagttccagctgcagaccgcatctgggaaggcagtctccatctgctttgattcatccggggctcaggagcccggagccaatgccagctcgccatcttcgagtgcggcgccacgcggcacgccttccgagagcaagaacaagccccttgcgctgcgttcagaggcgctttcttcctgngcccctggcgttgtggagcaaaagacagcctgtgctgatctccagtcctgcagcaccgagtgccaagatgcatacatttccga

SEQ ID NO: 3825 - DNA, 834 bp, Zea mays
  Clone ID: TF_ZmC580972_1
cattgggtgcctcgaggccggccggacagttacttgcagctggccatgcacatggcgctatcgtcccgcagctcattcgccgccgacgtcctcctcccagccaccatgtcgtatcgtcagccgtgcagcggtgcttccagctacttgggctctcagcccgcggcccctttcccgtcggcagcgttcggcgcggtggcgcagctggacgtcttcgactgcctgtcgtcggacgaaggcgttggcgtcccggcagctgtacctggtgcgttcgcgccgccgccgccgcttatgccggccgagcgcgtcgtcccggacgctgctgcaggctacagtagtcatactaggagtgcagcggctgtggcgggtgaggggtcgaggactacgcacagaattgcgttccgagtgaggtcggacgaggacgaggtactcgacgacggctacaaatggaggaagtacggaaagaagtccgtcaagaacagccctaatccgaggaactactaccggtgctcgacggagggctgcaacgtcaagaaaagggtggagcgagacagggacgacccgagatacgttgtgaccatgtacgagggagtgcacaaccatgtgagtcctggtaccgtctattacgccacccacgacgccgcctccggccgcttcttcgtcgccgggatgcatcagccaggccattgatcaacgagcagatcagagagcgtcttaattagtgtaagatatgtataccgactatctgttttaggccttgttcatgttttaggtcttgtccagttattccaaatcatatagattggaatgtattgaaatgaattgagatagatttag

SEQ ID NO: 3826 - DNA, 1278 bp, Zea mays
  unsure (1)..(1278): unsure at all n locations
  Clone ID: TF_ZmC568819_1
tcgaggccggccgggaaacataaaaaaaaaaaaaagccaagcgcactgtgttcttccctgcagggtcctgggctgggctggcgctggcgatggcgctagtattagggcgggaggaggagctcctggcgcagctccgcgcgctactgacgttcctaccacctcctgcgtcgcccccggcgccggcggctcccgttaaggtggagtccatcatgggcactagtggcggcggacgacgactggggagcaagagagaccgggacgacgacagcgaagccgaggccgagcagcacggcgacgaacctgcggctgcgcagcctcactattgtcctcatcctcctcctccctgcaaaaggacgaggaggaggaagaataagaagaagcggcagcagagcaagtgccttgtgacgacagtgcccgacttcgacgggtaccagtggaggaagtacgggcagaagcagatcgaaggtgccatgtaccccaggagttactacaggtgcatacagagcgccaagcaaggctgccaggcaaaacggacggtgcagcgcaacgacgacgacggcgccgccgcccccccagagtacacggtggtgtacgtggcggagcacacctgcacggccaacgacgacgcgctggaggccccgccggtcatcctggagaccactaccagcgtcgtcgtcgtccctgcacctgcagcacacaccgatcccgtcgtcgtcgtcgttccggcaactacgtcagccgccgccgccgccgcctccgcttgttccaccaccgtcaccacggggactgaatctccggcgatttccggcgacgacgacgtggcctgctggagcagcagcggcagtagcagcagcggttacagctacgccgacgactcctgctgctgctgctgctgtgacgggttgctcgccgctgtcgtccacggtggctgcggcagctcatgggcccccggaccggcggactcggtttcggtgccgtcgttccagttgcaggagatggaggacttgaccggaccgatccggtcgccggtgcacgttccccgcgcctggttggaccgttgacccgctagtccctgtgctgcatgcagctcgttgatgagaatgagatgagctacagagctagccgcttttgccacttgtaagctcgatctgctgctgcttcttcttcaactagttcgtctctgtagcttttagctttggtggtgatggacgtgcagtttgtctgtactgtgnataatggagtttgcctggggcaggngaaaaatcatggtagttttct

SEQ ID NO: 3827 - DNA, 643 bp, Zea mays
  Clone ID: TF_LIB4764-044-R1-K1-D1
ccggccgggatgtggtgttataaaaccaactgggtggagtatgtgatgtgatacataataatttgtctaattcatgtaaaagccctttgtgcggaaatgtgagggcatttaaaggatctattgaaaacagtacagtccttacccaaggagctactaccggtgcacggcgcccaagtgcggcgtgaagaagcgcgtggagcggtcgtaccaggacccgtcgacggtggtcaccacgtacgagggacagcacacgcaccacagccccgccagcttccgcgccggcggcgcgcacctcttcatgcccaacgcgcacgcgctgccgccgcagcacctgatgctgccgtccagcttccgcccggcggacctgatgggcatggtgcaccccgtcagcatgggcgcaaaccttagcatgttcctgccaactatgcctcctcatatgccatcgccggcgtctcgtgctcatcctctccagcagcagcagcaccagttcactgactacgcgctcttgcaagaccttttcccttccacaatgcccaacaacccataactaactgctacacaattagctagcctagctagaatcgacatgagagatgctgtccaagtactctgcgccatatgtgatcacctgatgggcttgcgc

SEQ ID NO: 3828 - DNA, 1454 bp, Zea mays
  unsure (1)..(1454): unsure at all n locations
  Clone ID: TF_ZmC1431_1
ccccgcgtccgcccacgcgtccgcccacgcgtccggtcaccgcctaccaccgttttatatccacccctcccactccccctgttttttcttcttccgctgttctactccggcgtgttggtcgacggcggcgcagatgacgaccctcgatctgatgggagggtacgggcgggtggacgagcaggtggccatccaggaggccgccacggcggggctgcgcgggatggagcgtctcatcttgcagctctcccaggctggcaccggggagcggtcgttgtccccaccggcggtacaggcgcagcgccagcagcagaagcagctggagcagatccagcagcaggttgactgccgggagctcacggacatgacggtgtccaagttcaagaaggtgatctccatcctgaaccgcacggggcacgcgcggttccggcgtggccccgtggcggcgcggtcgcagtcgcagtcgcagggacctgcctcccccgagcccgcgcaatcggcgccggctcccgccgcgaggcccctgacgctggacttcaccaagtcggtgtccggttacagcagggactccgggttcagcgtgtccggcgcgagctcgtcgttcctgtcgtcggtgacgaccggggacgggagcgtgtcgaacgggcgcgcgggaggctcgtcgttcctcatgctcccaccggcgcccggcgcggccagctgcgcgaagccgccgcccgccggtgcggcgcagaagcgcaagtgccacgaccacgcgcactcggagaacgtcgccggcggcaagtacggggctaacggcgggcgctgccactgctcgaagcgcaggaagcaccgtgtgaagcgcacgatccgcgtgccggcgatcagccccaaagtggcggacatccccgccgacgagtactcgtggcgcaagtacggccagaaacccatcaaggggtcgccctacccacgcggctactacaagtgcagcacggtgcgcggctgccccgcccggaagcatgtggagcgcgaccccgccgacccgtcgatgctgatcgtcacctacgagggcgagcaccgccacagccccgcctccggccaggacccgccgccgccgtcgctcgcgccgctgccggagctgcccagccattgatttggcttcctgcctgctctgtcctgtcaattactagtagctgttgtcataagttataaaatcaaaatcgccagttcagttttagcagctccgttttccgatttttttctcttctgtcgttcgcgttagcagctttgtgaaaggattaggaaagtgttagcatcagacttggagaagggaaaagaaaacaaaaggtaatgctcttgttattagtattatttttttgtatacagcaaacaaaagcatccgcagagaaagttgtggatggtgtagtcggtcggaattttgaccgggcttggggtgttccagagccggattgaattna

SEQ ID NO: 3829 - DNA, 1366 bp, Zea mays
  unsure (1)..(1366): unsure at all n locations
  Clone ID: TF_ZmC16975_1
gggtacctcgaggccggccgggataactctccaacggactagctataaagcaaaagcaagagagagagagagagagaaacaaaatagaaagcgaagagacgacgaccatgttcccgtcgccagggagggcggtgatggcgctgggccacggtggccagcacatgaccgcgtcgtccaccgccggcggcatggcggcctcctcgtcgtccacccccaccataacgttcgcgtcncagccagccgtcccctccccctcctccgacggcgacgagctccctcgccctcgcccacccccaccaccatggcgtgctaggttacggctccgcctgccttctcctggaccaccgccacccaaccaccaccacctcctcggcctctccctcgcacgcggctccgtcgaccgtcgtcccggcccccaccctccaccaccacttccatggccatgcagcaggagcgccgcacgtttccctttcccctcccacgagggcgtcgcctcctcctcctcatccatggtcgacggcggcggcctgcgaagaagagccggagccgcatcacgatcatcgccaacaagcaggccaaggcggcagaccgccgagggggaagggagcggcggtgagcgaggggtcggcggcggcgctgggggtgggcgccgtgcggatgaagaaggcgggcggcggaggaggaggcaaggcgcggcggaaggtgcgcgagccgcggttctgcttcaagacgatgagcgacgtcgacgtgctcgacgacggctacaagtggcgcaagtacggccagaaggtcgtcaagaacacgcagcacccaaggagctactaccggtgcacgcaggacaactgccgggtgaagaagcgggtggagcggctcgccgaggacccccgcatggtcatcaccacctacgagggccgccacgtccactccccgtcccgcgacgaagacgacgacgccgctcgcgccaacgccgagatgagcttcatctggtagcctgcagatccggctccgaccggcggctatctttcagtgcatgcaacgtcgtctactcggccgcctccggtctaagtttcgccagccaccagcagcagctgaatatcctgaatttagctattatatccatccatgcatcgaagaactctctcatcgatcgtgtgtgcatgtggcatgtctaggcattatatgtattgctatgtcgatcgatctttatatatatacgcgaatgatgtccgtcgctggtacgtagggtgtgaactgcatggtcctcctagctactgtcgtagttaattagctaataatatagtagtgcatccaggttatggactaaataatacttatatacatagcagctacctgacactacagttag

SEQ ID NO: 3830 - DNA, 1513 bp, Zea mays
  Clone ID: TF_ZmC413227_1
aattcggcacgaggccaccactttataaaaaggcaacgaacccctccaaagcaacgctgaactcctgcatcgaagtttttgatgacctgagcccgttgacttggtggattggagaaggcagcagcacatcactatctggttcttgtgttcttgctgcaatcagtcgagattcaggctgctttggatatacttgcaacccttgacaggattattaaggatttggaaggatcctagggaatagttgaatcaataattttggggggaaattaccctcatccctccagaatggagaacaagtcagatgaccttcagcacgagcatggtatgcccgatcagacgtctcgtcccttcacttcactcttactgtcggcaacatctgtcgcccaagcagcacaacaagataccggttctgacatcaaatcgcttagtctgctgcatggaagtagcttactcccacctgatgatggttacatctggaaggcgcgcgcgcagaacattgttccaggctgtgaatatcccaccatgtattacaagtgcgcccaggacaactgcaacacaaataaattggtggtatgctctgctgatggtcatcaggttcttgagacggttcttagtggttgccacaaccacccacgtcagcaagattgtgatctacccatacccaaggtatcaaaaacggatacttcaatgcctgtgtccagagagggagatgatgagcaactttcaagttcaagtgatagcgatgaagatgatgttgaccaagcaagagttgaaggtgatggcagtgtaactagacatgtgccacatccagctgaaaggatcactgcacaaactggaactgcaaattctcaccgacatgctggtagaagaagaccgaagtccaaggtgtgggaagaattcagtgctgtgttaagagatgacaaaattcaatgggccgaatgtaagcactgtaaaatgagccttggtggaacaagcacaggaagaacaacccatctgcggcggcatcttaagatctgtccagcgctacctgcaactgatcggatgcagaaacagaggtcatctccacatcctggttccaccattgagagcatctggaagttcgatcaagacagatctcttgaattgctcatcaaggttttagtgtccaaccttttctcctctccattgacaagcagcacaacttttagacagctatgggctggcatctgccctactaatgatgtgttatcggacgctgctattgaagagaagtttctcagtatttttgagaatgaaaagcttaagcttaaggaggaaatagcacttgcacctggcggagtttttctgacagctgcaagcagttctcttgaaactaagaacttcatctttttgaccgtgcacttcattgataaagaatggaaacttgaatagaaaatattagatgttgctttacggggtgtgaagactttgatgctgagtattttgttagcatgtttccgaaatttgcatcatgccacaatttcattaatgggga

SEQ ID NO: 3831 - DNA, 780 bp, Zea mays
  Clone ID: TF_ZmC153952_1
ttgggtacctcgaggccggccggggcgttggggagcctcagccctcaggcctcagccagcgtgcgcgcccacaacccctcacgtcgtccccgccaatcacaccgcacgaaccgaggacgacgggacaccaccgtcaccgcgacgtagtagtagtactacatgcatagcatagcctcgtggagtcgtggtagtagtagtttagttttgctcgcttccacaccgcaccgccgttcccttttttatatcccgcggatgcgcctgcctctgcctcggggtcgggggggcagctggtgacatcggattcggatcaggccgagaagatcgaactgctccgatccggcgcttaatttctctctctctctctcgggctagctgcccgggcaaatggacgccgagtggagcggcgacgagagcaaggctggcgctgcgggcggagtttcgtcggctgattgcccaggttcgccaccgccggtgtcgccggcgccaccgtcgacgtcgccagctgctaccggtgccgggaggaggcggtcggcgaacaagcgggtggtcaccgtgccgctggcggacgtcagtggcccacggcccaagggcgtcggcgagggcaacacgccgacggacgcgtgggcgtggcgcaagtacggccagaagcccatcaagggctcgccttttccgagggcttactacaggtgcagcagctccaaggggtgcccggccaggaagcaggtggagcggagcagggcggagccggacaaggtgatcgtcacgtactcgttcgagcac

SEQ ID NO: 3832 - DNA, 684 bp, Zea mays
  Clone ID: TF_LIB3592-037-Q1-K6-H4
gtagccgggagattcggaatcccgcacgcgagttggtcctggccagctggcgtcgtagccacactatgggacatgcgaggttcaattgtgaactgagagtctgaacctggtgtaaacggggaagagccggtgggcgaggtggagcgggtcgtcgtcctggatgtcgtcgaggacatccggttgtcgcttgctcatggcgtcaggctgattgcttcctcaaagcgagcggcgcatcaactatttatctacgtcctcgataatcgaattgctttgccgtggaagcaggagaaggaagaatgcaaaacacgtagtgagttcagttgtgacacaagcaccaaactttgatgggtatcagtggagaaagtacgggcagaagtggatctccaaaacaaagcattctaggctgcaattgagtacattcattctttatcaagggcatagcctgctcgttctctcaatggtgctagcctttgtcctgctagtagatcacttagcacccaggccgccactacgtcaagcacaccacagttgaaagcacaccccacgtcaagcagccaggccgccactacgttaagcaaaacagaagacgagaagaactgatgtagccatgttcatgcttccactattgaaattatatacatcatagcttactcagttcctatctgttgtttcacgttgatttaa

SEQ ID NO: 3833 - DNA, 931 bp, Zea mays
  Clone ID: TF_ZmC554_7
ccctactctcctgctcctcttcttcctcctcctctcgctctcaagcgcgtcttcactccggcctagctcggacggatcgacatcgaggggaaagggaataagtgggggcgccagcagatggatccatggatcagcagccagccttctctgagccttgacctgcgcgtcggcctgccgccgctcagcctccaccaggcgccggtggccgtcgccttggccaggcccaaggtgctcgtcgaggagaacttcctgctgcctcccaagaaagaacctgaggtggcggcgctcgagacggagctgcggcggatgagcgaggagaaccgacgcctggcggaggcgctggccgcggtggcctccaagtacgaggcgctgcgcagccagcacaaggagatggtgtccgcggcgcccgccggcgggaacgcgtcgtccgcgtcggagggcgggtccgtgtcgccgtcgcggaagcgcaagagcgagagcgcggacacggcgccggcgcctgcgcagcgcccgcacccggcggcggacctgtcggagtgcacctccggcggcgagccgccgtgcaagcgcgtcgtgcgtgaccgggcggaggaggtggaggaggaggaggagtgcaggcccagggtgacgaagctgtacgtgcgcgccgacccggccgacctgagcctggcggtgagggacgggtaccagtggcgcaagtacgggcagaaggtgaccaaggacaacccctgcccgcgggcctacttccgctgctccttcgccccggcctgccccgtcaagaagaaggtgcagcgcagcgcccacgacgcctccgtcctcgtggccacgtacgagggcgaccacacccacgccccgcccccctcgggctcgggcaagaacgccgcgaagccgccgtcgccggcgcgccgccaggaggctgctgtcgcggtga

SEQ ID NO: 3834 - DNA, 1164 bp, Zea mays
  Clone ID: TF_ZmC5807_21
cgtttcgagtccaaatcatcatcattagcatcatccccagggtaggatcttccacctccagcatcaacatcatcatcactagctggacccggaacagtgtcaatcatgccagctgaatgtacttggttacagaggttggaataaatatttgaaggcttgtcttcaatagttgccacaccatcatacctttcttcaccctggcttgaaggaactgcaccaccagctaaccttctatttggttggggcttagaatgattatgacgccctttataaacaacttcagtaacttggccatcaagcgaacgctctaatagctttttaacttcacaattaggatgcgtgcacttgtaataacttctaggattttcacttcccttgacatgcttctgtccatatttacgccaattatagccatcctctgctgatttttcagctacattttcaatttgtgtttcctgagtagcattttcagaactattgatctggtgcatctctgatgtaccaacttcagcaggcatgttgtcagacggacaaactatcgaaacagtttggtttggagcaattgaagcatgtgctgtgtgactcgattcccgtgaacagagaggtttattttcagtcttcaaattgctagatggtgtggtatgatttgagctatatttttgcatagtgtcatgatggttttgattgttgactgaaggagccgccaaatgagaattgagatgaggcttgaattcaaaatcccgagaacctccatcttcctggccactaccagctgaattatccctaggtgaaggcattatgtccatatgagtgctcttgttgatgattgcagccatgctcagagtaccagttgtgggagacggttcaaccttgaagttgttgaggaggacgggggactcgaggagggcaccggggctgaacccggcggggatagtgaggcatggctcccgcgagatcggcagccgcgcgggggacatggccttgtacctcgcgccggcgccggcgagcgcggccacgcgtcgatccgccaggaccggcttctccggcgagcccccggggccggcggggaggtccccggagctagggttcggcgaatcggccattggcgggggggtggagaggtgagtgtaagggggaccccggccggcctcgaggtacccaatg

SEQ ID NO: 3835 - DNA, 2002 bp, Zea mays
  Clone ID: TF_ZmC32154_1
caaaccctccaaagtcaacgtcggaaaccaagaagaaggcaagaagcagaggggaattctttctctcccttcctatctctctccctctctctattgcaattgcatcccgcgaccatgtccgcgcgtccgccgcctcaaccgcgcccgcgcctggcgctgccgccgcgctcgacggcggaatcgctcttcacgggcgccggggacaccagccccggcccgctcacgctcgcctcagcgctcttcccctctgacgccgacggcggcggtggccccggaggcgcgtcctcctccgccgccggggccgcgaccttcacgcagctcctcaccggctcccttgcgcctcctcctccgcagcagcagcggcatgacgcggagaggggacgaggcggcggggtcgccagggccgggccggcgctctcggtggcgccgccggcatcggcgtccgctggcgcgtccgtgttcacggtgccgcccggcctcagcccctccggtttgttcgactcccctgggctgctcttctcgccggccatgggggggtttggaatgtcgcaccagcaggctctggctcaagttacagcccaagcaacccattctccactcagaatgtttgatcaccttgaacagccatctttctccacagctgcaacaacgtctggagctctacagcacatgaattctgcagccagtatggcaggaatttcagatatgacaatggcaacagcaaacaatgagaacccgtcctttcagtctgctgaggcatcccaaaggtatcaagttaatgcccctgttgataagccagctgatgatggctataactggcggaaatatggtcagaaggtggtaaagggcagtgattgtccaaggagctattacaaatgcacccatcccaattgtccggtcaagaaaaaggtagagcatgcagaagatggtcagatatctgagatcatatacaaaggcaaacacaatcaccaacgtccaccaaataagcgggcaaaagacggcaactcttcagcatttgatcacaatgaacaatctaatgataccgcatctggcttgtcagctgccaagagagatcaggacaatatatatgggatgtctgagcaagcatctggtttaagtgacggagatgatatggatgatggtgaatcaaaacgacatgaagatgcacgagtgataatgagagtaaaagaaggaatatacacatttcttcacaaaggaccttgtcagagtctaagatcattgtgcaaacaactagtgaggttgatcttttggatgatggttatagatggcgcaagtatgggcagaaggtagtcaaagggaatccacatccaaggagctactacaagtgcacgtttgctggatgcaatgttaggaagcacattgagaggtgttcatcagaccctaaggctgtcataacaacctatgaaggaaaacataaccatgaaccaccggttggtcggggcggcaaccagaacgcaggaatgtcatcacaacagaaagggcagaacaacgtatccagcaatcaagcttcattctcgagaccagacttgagcaacgctaaccagatgccaattggaatcttacagttcaagagcgagcaatagtaacatgtatttggatgacgttcttttggcaaatacaagatgcctgcaattcgtacagccatatggcatcaaaagtttcttaaagcctgataatttcaaatggtatcagtttgcagtttttccccgtagatacacaggatatatagctgatacggcctcatcgtttctagtttgtacatgctattaagttggggcatgagggatgcaatactagctaggtgaggttacttatatgtggttatggtgttctatagatggatcgatggtatacatgttctgattttgttcccaacacccgacaagattttgtatgtatttgtacagatgtttttgagttacattttgccttttgtaactttgaagatgttctagtttgctatgtcaaaaaaatttttttc

SEQ ID NO: 3836 - DNA, 2120 bp, Zea mays
  Clone ID: TF_ZmC1136_1
ccacggcggccgccggcgtccgctctcccgcttccggggacgcacgcaccctcacgcatccgatctgatctctccccctctcgacccgtcccctggtcctccgctctgcccagctcgctcgccctggcgtcctcgacggggagcttggagcacggcgggttcacgttcacgccgccgcccttcatcacctccttcacggagctgctctctggggcagcagcggacatggtaggagccgcgggcgccgatcatcaggagcggtcgccgagggggctgttccaccgcggcgccaccaggggcggcggcgtaggcgtgcccaagttcaagtccgcgcagccgcccagcctgcccatctcgccgccgccgatgtcgccctcctcctacttctccatcccgcccgggctcagccccgccgagttgctggactcgcccgtcctgctccactcttcctcgaacttcttcgcgtcgcccaccaccggcgccatcccggcgcagaggttcgactggaagcaggccgccgacctgatcgcgtctcaatctcagcaagacgacagccgggctgcggtcggcagcgccttcaacgacttctccttccacgcgcccaccatgcccgcgcagaccacgtccttcccttccttcaaggagcagcagcaacagcaagtcgaagcggcgactaagagcgccgtcccgtcgagcaacaaggccagcggcggaagcggcggcagcaccaagcttgaggacgggtacaactggcgcaagtacgggcagaagcaggtgaaggggagcgagaacccgcgcagctactacaagtgcacgtaccacagctgctccatgaagaagaaggtggagcggtccctggccgacgggcgcgtcacgcagatcgtgtacaagggcgcgcacaaccaccccaagccgctgtccacgcgccgcaactcctccggcggcgtggcggcggcggaggagcaggccgccaacaacagcagcctctctggctgcggcggcccggagcactccggcggcgccaccgccgagaactcgtccgtcacgttcggcgacgacgaggcggagaacgggtcgcagcggagcggcggtgacgagcccgacgccaagcgctggaaggcggaggacggtgagaacgaaggcagctcaggcgccggcggcggcaagccggtgcgcgagccgcggctggtggtacagacgctgagcgacatcgacatcctggacgacgggttccggtggcgcaagtacgggcagaaggtggtgaaggggaacccgaacccgcggagctactacaagtgcaccacggcggggtgccccgtgcggaagcacgtggagcgcgcgtgccacgacgcgcgcgccgtgatcaccacgtacgagggcaagcacaaccacgacgtgcccgtgggccgcggcgccgccagccgagctgctgctgctgcggcggcgggttccggggccttgatggccaccggcggcggccagctcgggtatcagcagcaccagcagcagcagccatacaccctggagatgctgagcagcggatcgtacggcggcggcggctacgtgccccggcgccgccagccgagctgctgctgcggcggcggcggcttcgcgttctcctccggcttcgacaacccgatgggctcgtacatgagccagcaccagcagcagcagaggcagaacgacgccatgcacgcgtcgagggccaaggaggagccccgggaggacatgtttttcccgacgtcgttgctgtacactgactgaaggacaaggacggcaggacatggcgtggtgtggtgtccataaactgttcctttggcacacggattgttgttgttgttgttgttgttgttgtatctaggataggttgaacagatttctttatttgtttggaggcctccatgttggcagtggcagatgcttgccgtgccgcaggggtgtctcccttaacacgtgaaaggggggaaagaaagggatttaggatactagagtctaggacacgtggcaattacacagaaggggtaaagaagttttgttcctcaaagacaaattcacacatgagacttgttgtagtcaggattggacataatttcatgtcacagaacatttgttaagattca

SEQ ID NO: 3837 - DNA, 350 bp, Zea mays
  Clone ID: TF_LIB3116-028-P1-K1-A11
gaaaccggggcggaccaacccttccgccaacccttccgcttaagccgggtgttaatgtccggttcccagggccccaggtcggggcggagggttacaaaggccagccggggcccccggccctacttccgttgttctttcgccccggcctgcccagcaaaaaaaaaggtgcagcgcagggccaccaacccaacaatcttggtcgcaacttccaagggcaaccacaacaacggccagcccccgcaacaggcccaggccccgaacaacggttcaagccttggccccagaaaaaagccgccttctcctccaaggccgttcgccgccgttccggggcggttccacaacaagcaggt

SEQ ID NO: 3838 - DNA, 715 bp, Zea mays
  Clone ID: TF_LIB5116-047-A1-PF1-F3
ggcccacaaaatcccaaggcctctccctcctctctcctcgcttctcttctccttctccgaccgaccgccatggccctggactccgtcccttcctaccccagcgacctgggatccagcggcagggcaaccaggacccagcaaagaatccggaaggaggagcggacgtggacggcggacacctacgcgccgtacgacgacgggcatcagtggaggaagtacggcgagaagaagctctccaactccaacttcccgaggttctactacagatgtacctacaagactgacctgaagtgccctgcgacgaaacaagtccagcagaaggacatgagcgacccaccattgttcacggtcacttacttcaaccatcacagctgcaacaccacctcgaggcccatcggcagcgccccagacaccactgaacagtcgtcctcgaggagagcagtgtccatctgctttgggtcgcatgccaccggcgagcagccgacattcctaacgttgccgggcacactgcagtctccagcgagcacaaccaaccaacagagcgacagaggcgcttacggtcaccagtttcagtggacagacacatcaccatcggcaggcgatgccccagtcaagatggagaccgacagtcttgctggaacagacgcttcgtctggcgctgctagcggtcatgctctgtcgaggacactgctgccgatcggccagtcgagatgca

SEQ ID NO: 3839 - DNA, 580 bp, Zea mays
  Clone ID: TF_ZmC1382_2
ggcacatcaacggacagacacacacaagcaaggcggctagcggtgcaagtagtgcgaagctagctaggtgctggtgcatgcaatggcggcttcgctgggtctgaaccctgaagctgtcttcacttcctacacctcctcgccgccgttcatgtcggactacgtggcggcgagcttcctgccgccggccgtcgtcgactccacggacttctctgcagagctcgatgatcttcaccaccacttggattactcatcgccggcgccgaccttggccggggctcggagcgatcgcagcgagaagcagatgatcaggtggtgtgagggtggtggtggcgagaagagactcggtaggatcgggttcagaacgagatcagaggtggagatcttggacgatggattcaaatggaggaagtatggcaagaaggctgtcaagagtagcccaaatccaaggaactactaccgctgctcgtcggagggctgcggcgtgaagaagcgggtggagagggaccgcgacgacccccgctacgtcatcaccacctacgacggcgtccacaaccacgcaagccccgcagccgccgccatc

SEQ ID NO: 3840 - DNA, 678 bp, Zea mays
  Clone ID: TF_ZmC240676_2
ggccgcggacgacgcggatcgcgttccggacgaggtcggagatcgagatcctggacgacggctacaagtggaggaagtacggcaagaagtccgtcaagaacagccccaacccaaggaactactaccggtgctcgacggaagggtgcaacgtgaagaagcgggtggagcgggacaaggacgaccccagctacgtggtgacgacgtacgaggggatgcacaaccacgtcagccccagtacggtgtactacgccagccaggacgccgcctccggccgcttcttcgtcgccggcacgcagccaccgggctccctcaactgatccccggcggcccatcgcgacgtacggtccgctccaccctaccaccgcacctatctggtttcgactcccagatggcaggctggcagctagctagtcggcggtatacactagtaagtagtagtaggataggccggccgacacccgataggtgatcggctggtgggtcggtttcccgaggtggatttctcgtttgggtttctagcacacccctccgctcctccctcttttccccgtccttttcctgctccgatcatggaaagggccggcggctggctggctggctggctgttgcgatcgaatagtatgtagtggtggtggtgctgctgttcatgctgggttccaagagaggtttaatttccca

SEQ ID NO: 3841 - DNA, 1531 bp, Zea mays
  Clone ID: TF_ZmC58440_1
ttctgatacacgccgcgcatcgcaagcgagcgacacataaagagcgcccatggggtgtgcaccaccatctcgggcggtgcgggtggaggaggccccggcggggggacgtgaagggggcggggacggaggcggagaaggcggtcgcgtgggcggacgcgtgggtccggaggcgtgggttcattgaaagcccaggcacgccgcgcatcgcaagcgagcgacacaagagagcgcccatcatctgtgccctgtgcgccaccatctcgcccgccttcaatcccctccatcattcgttccaacagccccgctttctccaccatcagtgcgaaaaaatttatgcgcgctttgggaaagcgcgagctcgttttgctttgaagctgcctccgcctttttatccgtccgggccggggctgtgggctccgcctccgcctccgtgtactccggccgggcgtggtcaccgagggagcagcggcgagagagggggggatctgatcgatgtcgtcggccgaggacgggtactgcagctcggattcgccgcgggcggaatcccccgacgagccgcaggcgggggcggacgcggagtcgccgcgcgccggggccgggctgaacaagcgcgagcgcgacctccccgcctcgccgtcgtcgccgctgccgccagctaagcgcagccggagatcggtggagaagcgggttgtgtcggtgccgctggccgagtgcggggaccggcccagaggggccagcggggaggggccgccgccgtcggactcgtgggcgtggcgcaagtatgggcagaagcccatcaagggctccccctacccacggggttactaccgctgcagcagctccaaggggtgcccagcgaggaagcaggtggagcgcagccacgcggaccccaccgcgctgctcgtcacctacaccttcgagcacaatcacgaggcgccgcagcccaagaccagcggcggcagctgctgccaccagcaaggcaagccgtccgcgaatgagcccgtcgagcaggagtgagctgggtccggagcatgagccggaagacgagcaggagccggagcagaaggtcgtcccaggtctggccgggccggaaacggcgccggcaaccgcaacgttggcgccggtggcagaggaggacgaaagcttcgacttggggtggttcgaccagtacccgacgtggcaccgttcggcgctgtacgcgccgctgctgccgccggaggagtgggagcgggagctgcagggggaagacgccctgttcgcgggcctcggcgagctgcccgagtgcgccgtcgtgttcggccgccgccgcgagctcagcctggccgctaccgcgccgtgctcctgatggtccttaaagtcttttttacactagtagctctgatcgctgcacggggcatctgttcaaggccgtctgctgcctaagctttctgtccccgtgtccgtgttgattgggtacgcgcgttcgccgtccaaggttcgtttgtcccgtttgcaatgtggttccagccagaaagcagcgaaaggtttggct

SEQ ID NO: 3842 - DNA, 1034 bp, Zea mays
  Clone ID: TF_ZmC332_4
tttgccgggtatagtgcaattgtacccactgatttcatgctatcttatttaaatacgaccaccagtgctgttgagctcaggtaagtatctctcccttttcatgttctggagtgcatgatctcccatgaaggaggcaccacaaaggattgtactgatatgaaaaatatgaacaagcatcctctccctagtcttatgctgcttatagcattgggtcgtttggcttctaacctaagttctcagttttgtttcctactattttacaataagcatactgactacaagcatacatttatggttacaaacctgttgtaattctggtagcatgcctgttgcaatccaagaaaggccacaactggcaacctcttttggagcacagttcactctcctgtacctttgtcaaaatatgcagatcacagatactcacaaagctcaccggccttgcaggggttactacaagtgtagcagcgtgagaggctgccccgcgaggaagcacgtcgaggggtgcgtggacgacccctcgatgctgatcgtcacctacgagggtgaccacaaccacagccgagttctagcccagccagcctgatctctctggctatcgattattcaagatcgcttccgtagtagtcaccctccctctctagagaagggaggacagcaacagcaacaagaagagcctagtgtctgtacataagttctgcttctaacagttggaggagtgattcagttagctagctctttcagaagaaatcagtggtgacagaagggaacttattgcgtcgatggatggaagaaagggagagagttcctcatcagatactcatactctatttttgtagcttcggtttatctctcttttttgttcatcctgtgctagggcccatcctgtgggttgtatgtctgggaatggtgttgggggggattggatcggagaagaaggcatgtggcaggaaattgcctgtaaaagtggctacacctaggaacagaatgtactatcgtcttcagcagtggtacagccttgttgacgcagtggtttt

SEQ ID NO: 3843 - DNA, 1641 bp, Zea mays
  Clone ID: TF_ZmC91351_1
atgtcgtcgggagacttccactaccacgacgagctggcggcgctgttcgcgcagcggccggcgccggcgggagagatgacgatggcgctgcagcaacaggcgccggcggcgtcgtggttcgcggactacctgcacgcgggcgcccccggcatggggatggacatggactacgacctgctgtgccgcgcgctggacctgccggtgccgggggacgaggacggcgtcgtcaagcgcgagctgctgctggtggcggacacgggcgggggaggcggaggcttcgcggcgccgctcacgcccaacacgacgtcgtccatgtcctcctcgtccagcgaggcggcgggcgccgccgccggaggaggaggcggtgggagctttggcgctgcggaggaggaatcgcagtcgctggggaggtgcaagaaggaggacgacggggatggggaggagagcaaggacaaggaggcgatgaagggggaggaggacgacgcggacacgggcaagaaagggtcagcggcggggaagggcaagggcaagggcgagaagcggcagcggcagccgcggatcgcgttcatgaccaagagcgaggtcgaccacctcgaggacggctaccggtggcgcaagtacggccagaaggccgtcaagaacagcccataccccaggagctactaccggtgcacgacgcagaggtgccccgtgaagaagcgggtggagcggtcgcaccaggacccggcggtggtgatcaccacgtacgaaggcaagcacacgcaccccatcccgtccacgctccgtggcagcagcacccacctcctcgccgcgcagctgcaccaccaccaccaccacaacatcgtcggcgccttcccgccgccgccgccacccccgcagacgatgtgcttgccgttcgtcgggcggacaggcgacggcggcggcgtcatcgacatgctgggtctctgcctgcctccgcgcaaccacgccgccgtgccgccggcggcgacaggcctcgcgccgtccccctgctccatgagcggtccggtgggcacggtggcaggcgcgacgcagacgacggcgcccccaccaccaccgtcaccacgaccactacctcgtcgcctcctcctcctccctcgctccagacgatgcagcactttatggcgcaggacgacttcgggcttctacaggacatgctgccgtcgtcatcgtcgtcgttgtccttcgtcgtccacagcaacggcagcaacgtccagctgccctgaattcgatcagctaatagtcgtcgtcaccagtcaccaccaccacaagcgatcgagctaatgaggaaggaagctagcagagataagagatgatagtacttagtttggtccttgttaatgctctcctttcgtttttttttcaccgaaaatctactcccccctagctagatggatcgtatcgatcggttcttggttttcttttcgatcccgctgtgccgcgaccgcgagacacacgtacgccgctgcagtgcagatcgagtcttgtggcgccgggtctcgtaccgttcccttacgatgatctagctagctagcccttgcagtagcaggtagtacgtactagcggctcttgctgtacatgtacctagctaatcaacccccagctcatgcgcgcgtttgcacc

SEQ ID NO: 3844 - DNA, 1367 bp, Zea mays
  Clone ID: TF_ZmC8945_1
attgggacctcgagccggcgggatgcacaacaatccatcatccaggccgcaagaaacgcctcctccggccctccctccctctcgccgtccgccgtcctcctcgccatggctctggactcggttcctccttaccccagcgacctgggctccagcagggccgccgccgccgccaggacccagcagaggatcaggaaagaggagcgcacctggacctcggacacgtacgctccgtacgacgacgggcaccagtggaggaagtacggcgagaagaagctctccaactcccacttcccaaggttctactacagatgcacatacaagaacgacatgaagtgccccgcgacgaagcaagtgcagcagaaggacagcagcgacccgccactgttctccgtcacttacttcaaccagcacacctgcagcagctcaagcgccctcggcagcgccagagacgtcgcgtcccagtcgtcttcaaagaaggcggtgtcgatctgcttcagcccgcacgccccctccgagcagacctcgttcctgacgacgactacggtcgcgccgccggttatgcactcctacggcgccaaccgacagcccgacaggagcgcctacaaccaacagccccagtggtggacaggcggtgtgccatctcccacaagcaacggccctgctaagatggaggtcgcggagtccacgcagaagccgagcggttcgtacggcagcaccaccggcaacgctccgtccaggacgctgctaccgatcggccagtccaggtgcatcgagtacttccatttcttgtgatgagcttccgggaaggcaagctggggctcgggcactgcagcttggtgtctgcttgtttggagtggcaagtggagtttgtatctggagctggaggcgaaggcgaaaatgttgctgccgtcgtcctggcctcctggcctgaactacacaggccgggcggggcccaatcagtatactgactgacctgcattgcattacatacagagactgcctgctgcttactgtactgtacatctttgcatttgggttcaagccacgttttggtgcttggatgatgtgaagaatggtattggactgttggggtttctttatctagcagtagcgtacatgatatgatacgacgtacagaatgactgcttgacagttgagatatatccatttgtttgttatgtgttgtttgctgtttgtttagagatgagactaggatgtctcatttctgacagcgggatattggccatggttcagtctgctgctacggaaatgctgaaggttatagattatgtacactaaacagtaacagtttcttattaacatgtcttctacagttttagaagcaaaaaaaaaaaaaaaaaaaaaaa

SEQ ID NO: 3845 - DNA, 1424 bp, Zea mays
  Clone ID: TF_ZmC746_2
gccggccggtccgggacggtcacacacaccccaacccagccacccaccacctcccccaattgcctcttctcttctcccagcagcagccgcgacgcagtcctactcctgcggtgcctccagtttcgcagcaccgttgccacacatcgccaactaacgccatcgatcacccggcggcctcccagagtcttgccctgccatatccgaacctgctcctacagctagccagcaacacaaacagaataggtcggtcggtcgatcgatcgatggccagcgttatcgacggcaatggaggcagccggctggtggtgacggagctgggccacctcaaggagctggcgatgcagctggaggggcacctcggcggctcctcgccggacctctgcaagcacctcgcctcgcagatctcctccatcaccgaccgctccatcagcctgctcatcaccgccacctcatcaagcccccacggcggcgcctctgacgcgccgcccttcatcaaggctactaccaagaaaaggaagaggatggacaagaagaggcatgaggtgagggtgggctcggccggaggcggcggcggtgaccatccggccgacgacggctacagctggaggaagtacggccagaaggagatccttggagccaagcacccaaggggctactaccgctgcacgcacaagagctctcagggatgtgcggcgacgaagcaagtgcagcgcaccgacgaggacccggccttcttcgacgtcgtctacctcggcgaccacacctgcgttcagagccagagggcggcagcgacggcgggtcgtcaggctgccgcggacgcgcaggcgccggtgtacgacgccaacctcatggtgaagaccgaggggccggccttggagccagagcagcagcggcggggctgggacgacgcgcccacgccctttctcttctcctccacgccggcgtgccttgtgcaggagcgcagccccttctccgcgccgtccacgtccgagaactggggcgtgtccccggcgacctcggactccaaccacgtcgtctctttcccgcctttcgaggtcgccgccgccgccgccgcgcagttcgagttcgaggaagtcatgtcagcgatggacagagccgacggcgagtttctcgaggacctcgacatctatgtctcaagcttcttagcgtgatctgctggatgtaatgtaaccgatgaacgctagggaatgggaatctgaggcagctgttactgttaccatgagttgctctctgccgtttgtccaggggcagagcagggaagaacacatgttcttcctcggcccgtcccgttgtaaaccttaggatgtgagaatattgaatgtcccatctctctctctctttttcttcggtcgagggtttgcaaggaaaacaatttcataataaaaaaaaaaaaaaaagcggcc

SEQ ID NO: 3846 - DNA, 603 bp, Zea mays
  Clone ID: TF_LIB4742-048-R1-K1-C11
attgggtccctcgaggccggccccggccggcgtcacggatcgggttccggaccaggtcggaggtggacgtgctggacgacggcttcaagtggcgcaagtacggcaagaaggcggtcaagagcagccccaacccgaggaactactaccggtgctcggcggagggctgcggcgtgaagaagcgcgtggagcgggacagcgacgacccgcgctacgtcgtcaccacctacgacggcgtccacaaccacgccgcgccgggcgacgcctacctctgcccgccgcctccgtcgcgcggcgcagcgcactactcgcctccggtggcagcgcccagctggagcgccgctcttgacgcgtgggaggcgcagctgcaccggcacgccgcggcggcggctcactcgtcggagtcgtcctactgatctatcatcagctacacgcacgtacacggaacatgtagctagctagactgttcgccaacgtggagatcgagacgatcgagccacgtttttcggggtctgcatagtttgtactgtactgccgttacagttagacatacatacacacacaccgagactgtttctgattaaaaaaaaaaaaaaaaaagcggcc

SEQ ID NO: 3847 - DNA, 999 bp, Zea mays
  Clone ID: TF_ZmC260_40
ctgccggcgcgtgcgtctacttactcaggcggcctcgctaggactcgcccacgagacgagctacgccgcctactacccgccgcccgcgcccgcctcctcgtacttcccaccaccacccgacctcgtggcggacctcccgccgcccgccgccgccaccatggccgatgactacttccagttcgggttcaccggccaggagatggtggccgatgactgctcggcgccggtgttcgccaacagttcttcagacgccgtcaccgccgccgtcggcaatggcatgagcctgctgagctacggcgtggacggcgacggcgacgggaggaggccgatgagcggaccaccatatggcaccggtgggaacggcggcggccggccgccgtcgtcgtcacggatcgggttccggacgcggtcggaggtggacgtgctggacgatggcttcaagtggcgcaagtacggcaagaaggcggtcaagagcagccccaacccgaggaactactaccggtgctcggcggagggctgcggcgtgaagaagcgcgtggagcgggacagcgacgacccgcgctacgtcgtcaccacctacgacggcgtccacaaccacgccgcgccgggcccgggcgccgcctcctacctgtgccaaccaccgccgccgcgcggcgcaaccgcgaccgcaacgcccttctcgcctccacgctcggcctcggcgccagcgcctctggctgcagcgcccagctggagcgccgcctgtgacgcgtggtgggaggcgcagctgcacgccgcggcggcggttgctcattcctcggagtcgtcgtactgatccgatccgtcatccatcagttattacacgcacgtacgggtcacgtagctagaatgtgttggaactctaaaacgctcacaagcacaggacacagattggtgagaggaggaagacgaatgaacagtagctaaacacaaagagttcggcgcccaaacacctgcagcgctccgaccctgcctttctct

SEQ ID NO: 3848 - DNA, 747 bp, Zea mays
  Clone ID: TF_ZmC165426_1
ccggccgggacttctgcttctgcccaacccccctccatccatccaaacagctttgcctagcttattccttaccgacaaacaaaactgacacggatccgcacagagcgcaacgaactcgcccagtccggctgctgctgctgcacaacggactcgatctcacggccccgccggctcgcagccatgcagacgcagtcccgcctggccatgagcggcggcggcggcacgggcggcagcagcagcagctcggcctcggaggacgagcacgaggcggtgatccgcgagctgacgcgggggcacgagctgacggcgcagctgcgggccgaggccctgcgcgcgctgcgcgggcagggccaggccgaggccaccgcggcattcatcctgcaggaggtgtcccgcgccttcaccgtctgcctctccatcatgagctcgcccgcccgcgccccgccgccgacgatggaaatgcccgcgcctgccctggccccgcgacggggccgggacgacagcatcccaagagagcaacggaggacgtcctcgccgcacagcgacgggtaccagtggaggaagtacggccagaagaggatcactaagtcgccgtttccgaggtgctactacaagtgcagcttccaccgcgagcgcagctgccgggccaccaagcaggtgcagcagtgcagcgacggcgacggccacccgccccagtacgtcgtcatgtacttcaacgagcacacgtgcgacacggcgggctgggag

SEQ ID NO: 3849 - DNA, 449 bp, Zea mays
  Clone ID: TF_LIB3279-196-Q1-N6-F4
gggggggtaaaaaaaattatttttatggcccgggccttcccttttggttttttttcccttctccaagggtggggctaacactttcctaatcctttcataaagctggttacgcgaacgcccgaagaaaaaaaaaaattgggaaacggggctgtttaaactggactggggattttgtttttttaacttatgacaaccgcttctttttattggcaggacaaagcaggccggaagccaaatttatgggtgggcaactcccgcagcggggcaagcgacggggggggggggtcctggccggagggggggctttggcggtgctccccctcgtaggggacaatcagcattgacgggtcgggggggtcgccctccacatgctttcggggggggcagccgcgccccgtactgtatttgtagtagccgcgtgggtagggcgaccccttgatgggtttttg

SEQ ID NO: 3850 - DNA, 386 bp, Zea mays
  Clone ID: TF_ZmC1136_7
ggctggtggtccagacgatgagcgacatcgacatcttggacgacgggttccggtggcgcaagtacgggcagaaggtggtgaaggggaacccgaacccgcggagctactacaagtgcaccacggcggggtgcccggtgcggaagcacgtggagcgcgcgtcccacgacaagcgcgccgtgatcaccacgtacgagggcaagcacaaccacgacgtgcccgtgggccgcggcgccgccagccgagctgctgctgctgctgcggcggcgggttccggggccttgatggccaccggcggcggccagctcggctatcatcatcagcagcagcagcagccatacaccctggagatgctgagcagcggatcgtacggcggcggcggcggctac

SEQ ID NO: 3851 - DNA, 1719 bp, Zea mays
  Clone ID: TF_ZmC746_1
ccccgcgtccgcggacccgtgggcccgcgcgtgggcggcgtccctcgagagtcgaccacctcgacggccggccaatatagcaacctatacagggcattctcatctcatggcgacgacggagacgatggagatgggcgtcgtcgtcgacggcgtcagtagcaacggatcaggcggctgcggcgggctggtggtgacggagctgagccacatcaaggagctggtgaggcagctggaggtgcacctcggcggctccccggacctgtgcaagcacctggcctcgcagatcttctccctcaccgagcgctccatcggcctcatcacctcctcctccagctccagcggcctcgacggcgcccgccggaagcgctccgcgggcgacgccggcctcgcctcgccgctctcggccacgcccaccagcggcgtcaccgacgggccgttcaagaacaccaagaagaggaaggcgatggaacagcggaggcagagggtgagctcggccggcggcgagaacccggtcgacgacggccgtagctggaggaagtacggccagaaggagattctcggagccaagcacccaaggggctactaccgctgctcgcaccgctactcgcaggggtgccaggcgacgaagcaggtgcagcgcaccgacgaggacccgacgctgtacgacgtcatctaccacggcgaacacacctgcgccccccacaggccggcggcggcggcggctcagcacaacccggacgcgcgcgggcacctgcagaccctgagcgccggcctcacggtgaagaccgagggcctgccggacccgtgggcgccgcggggccggggcgccgccacgcccttgtacctctccgcctcctccacgccgccgtccacgtcggagaactggggcgtgtcgcccgcgacctcgggctccacccacgtcgcctccttccggccgttcgaggccgccgagtggcgggggcaggccgagcaccaggaagtggtgtccgcgctcgtggccgccatcgcgccgccgcccgccgtcgacagcctcgacgacctgctcatcgacatagatctagacgacatcgcgagcttcttcgcgtgacccgcgcgttgtagctgaccaagggtaggaaatcaaatcaaagcagccgatgtggcgtagtatgtgaccgagccctctggctctgcttcctgaaactggaacagaacagaggagggaagagcaccagagctctgcttcctggggtccatgcagatgcaggatgcaggagtaaaaacctaggagatgaacaagagtagggactgcattttttacccctcttttttgttaatctttttcctctttctgaggactgagggtagtgtgtttgtattgtattattgattttttatgccaatggaaaaaataagatccttcgtgccaaaaaaaagccgccgccgccgcgcagttcgagttcgagaaagtcatgtcagcgatggacagagccgacggcgagtttctcgaggacctcgacatctatgtctcaagcttcttagcgtgatctgctggatgtaatgtaaccgatgaacgctagggaatgggaatctgaggcagctgtcactgttaccatgagttgctctctgccgtttgtccaggggcagagcagggaagaacacatgttcttcctcggcccgtcccgttgtaaaccttaggaagtgagactattgaatgtcccatctctctcaaaaaagagg

SEQ ID NO: 3852 - DNA, 1306 bp, Zea mays
  Clone ID: TF_ZmC746_3
gggtacctcgaggccggccatatagcaacctatacagggcattctcatctcgtggcgacgacggagacgggcgtcgtcgtcgacggcgtcagtagcaacggatcaggcggctgcggcgggctggtggtgacggagctgagccacatcaaggagctggtgaggcagctggaggtgcacctcggcggctccccggacctgtgcaagcacctggcctcgcagatcttctccctcaccgagcgctccatcggcctcatcacctcctcctccagctccagcggcctcgacggcgcccgccggaagcgctccgcgggcgacgccggcctcgcctcgccgctctcggccacgcccaccagcggcgtcaccgacgggccgttcaagaacaccaagaagaggaaggcgatggaacagcggaggcagagggtgagctcggccggcggcgagaacccggtcgacgacggccgtagctggaggaagtacggccagaaggagattctcggagccaagcacccaaggggctactaccgctgctcgcaccgctactcgcaggggtgccaggcgacgaagcaggtgcagcgcaccgacgaggacccgacgctgtacgacgtcatctaccacggcgaacacacctgcgccccccacaggccggcggcggcggagcacaacccggacgcgcgcggccacctgcagaccctgagcgccggcctcacggtgaagaccgagggactgccggacccgccgcggggccggggcgccgccacgcccttgtacctctccgcctcctccacgccgccgtccacgtcggagaactggggcgtgtcgcccgcgacctcgggctccacccacgtcgcctccttccggccgttcgaggccgccgagtggcgggggcaggccgagcaccaggaagtggtgtccgcgctcgtggccgccatcgcgccgccgcccgccgtcgacagcctcgacgacctgctcatcgacatagatctagacgacatcgcgagcttcttcgcgtgacccgcgcgttgtagcagccgatgtggcgtagtatgtgaccgagccctctggctctgcttcctgaaactggaacagaacagaggagggaagagcaccaaagctctgcttcctggggtccatgcagatgcaggatgcaggcgtaaaaacctaggagatgaacaagagtagagactgcatttttttacccctctttttttgttaatctttttcctctttcagaggactgagggtagtgtttgtattgtattattgatttttaatgccaatgggaaaaataagatccttcgtgccaaaa

SEQ ID NO: 3853 - DNA, 809 bp, Zea mays
  Clone ID: TF_LIB4759-048-R1-K1-C7
ccggccgggcatttgtgatggaagctgtcaagggtaatatattttctctaaatatttagcctaaaaaaaaaaaaaaaaaaaactcctttaatttcagcctgcctttccacaccgccttttccctccctctcaatcccagataaaccatggggggtaaattaagaatgactcacaattagcatttcctcgcatctttctagctacctatctctctctctctctctctctctctcgtagtctcgtgtgcggtttgtatctagctaggtataacaacagcccacccagcgtgggtttctagatcgacggctggtctagctagccagggactaggaccgatcgatggcgtcgtttggcagcgacgaccacgtgccggcggccatggcggtgaacgatctgatcgaggcgcgcgacggcgtggcgaggctcaggatcttgctgctgcagctggacgagcagcgcgcggcgtgggcgcagctggagatcgacgccgtgctggccaagctgtccagcgcgatatcggcgttggatgcaagcgaagtaggccggagccgggccgccggaccggacggtgcgaggccacagcgacagcagtcggggaggtcgggcgggaacaagaggaaacaaggttccagcagaagcagatcacagcgcccctctgacaagaagatcactgctacgctggaagacgggcacgagtggcggaagtatgggcagaaagagatccaagactcaccctatccaaggagctactacaggtgcacgcacaaggcggaccagggctgcaacgccaaggaggcagtccagcgctg

SEQ ID NO: 3854 - DNA, 2473 bp, Zea mays
  Clone ID: TF_ZmC1377_1
ccgcgaggcctgtggggccgggcaaccgccggccgctcccctactcttctccctccctccccgtctctctctctctaaaaaaagtagcgcccggagaaccgagaggccggagaaagaaaggcggaaagagggagcaaaatctcactttgctgggagttctttcctctgtttccgactcctttgttctcttagtgttcttggttggtggaatggaagctcagcagctccatttgtgttccagagatcttcgtcgttctcgttcccctcgtgtgtagcctttggtaggttggtggaagggcgaggcacacaagaaaattgatagaggggggatccccattttcagctcttcgtgtttttttgtaggaggaattcccgttcacatgatccgtgcctggacgtgacggttttgccgcgctctgctgcttccctttcggggagaagaggactcgactcaaatcatttggtatcgcagacgtcgcccttcccagttcagttgagagagatttctggcatgtccggcgcaagtaactatggatccctcatcgatgaatggttgccgccccctacacctagcccaagaactctcatgtctagctttctgaatgaagaattcagctctgcgccattctctggtccccatgatcaatctgaaaagagcagagaagttttgaattcgagcgatgaggttccttcacatgctgtcaaaggcctatttcaaaatggtttctcaaatttgttcagtgctaaatcaaactccaatggtggtttggcggagcgcagggctgcgagagcaggtttcagtgtcccgaaaattgatacttctcgagttggttcatccacagttattcgatctcctgtgtcaattccacctggtctaagtccaactacacttcttgagtctcctgtttttctttacaataaaatggcacaaccgtctccaaccactggcacattgccatttttgatggctacgaatgataagtcaacaatatcaccagctgccaagataactgaagattctacatttgataatgatgtgttttctttccaaccccacttaggttctgaacaaacagggttctctactgcagaaaaaaaaaaaagaaaaagtccgaaaaagcagtccttgtcgaatattcatcagcaggaatccagtcttcagtcaagctttaccgcagtcaaggataacactagtgcaacaattgttaaagcgaagccatcttctagttccatgttcagtgatagtcactattcagctgaccaacagcaagctgacgagacaaacataaaggtgcaaggcaaaggtgtggaggctagatcagctgcttttgctcctgtatcagcgcacagtgatgcatctctcctggagtctcaagaagcacttgatgtctcctcaacactgtctaatgaagaggacgagagggcaacacatggcactgtttctatagagtgtgatggtgatgaagctgagactgtatctaaaagaaggaagctggaactagatgctttagaagctactcttactgctactacctccaccaccagtaccatcgacatggggcctgcagcctcaagagctgtccgggagcctagggttgttgttcagaccacaagtgaggtagacattcttgacgacggttatcggtggcgcaagtatgggcagaaggttgttaagggcaatccaaatccaaggagctactacaaatgtacaaacccgggctgttcagtgcgcaagcatgtggaaagagcatcgcacgatctgaaatcagtcatcacaacgtatgagggaaagcacaaccatgaagttccagcagccagaaatagtgggcaaggcagttccagcgctccatctgcatcacaagctggtggttctcaccgtaggcaagaacctgcacaggccagctttgctcacttcggtacggcttctttcagctcgttcggtctcccaccgagtggtcagttgggaccaacaactggcaatttcggcttcgggatggttcccccaggcatgacgatcccagtgccctctctaggatcgcttgcccctgtaaagatggttggaaattcatcagctatgcaggggtacccagggcttatggtgccgggagaaccaaaggtagagcctgtctcgcaaccactcatccaaatggcaaatgcatctccaccagcttaccaacagatattgagcaggcctcctttcggtcaccagatgtaaataataggaaagagaaaggggataatagatttgcttcagcttgtatacatgatagctacgctgcaacatggctttagtgttcatggatcgtccaattttttatttctattttatttttctgcccacgcatgtctttgaagcaaagaatgctgaggatgataccctgtcgtgcctgttgtaatcacgtaaaggatacctttcgtctttttgagactcgaaattggaaaacgatcaatcaaaatttctggttgcgaatgc

SEQ ID NO: 3855 - DNA, 1886 bp, Zea mays
  Clone ID: TF_ZmC1136_2
cattgggtacctcgaggccggccgggactcccgtccgcttctcccctctcctcctcctcacgtcacgcaccccatctcttctctccccctctcgtctcgtccagtcgtcccccactctacccagctgccctgctctgcgtcgctcgccatggcgtcctccacggggagcttggagcacggggggttcacgttcacgccgccgcccttcatcacctccttcaccgagctgctctccggcgcaggggacatgctaggagccggcgccgatcaggagcggtcgtcgccgagggggctgttccaccgcggcgccaggggcgtgcccaagttcaagtcggcgcagcctcccagcctgcccatctcgccgccgcccatgtcgccttcctcctacttcgccatcccgccggggctcagccccgccgagctgctcgactcgcccgtcctgctccactcgtcctccaacatcctggcgtctcccaccaccggcgccatcccggcgcagaggttcgactggaagaaggccgccgacctgatcgcgtctcagtctcagcaagacggcgacagccgggctgccgccgccggcttcgacgacttctccttccacacggccacctccaacgccgtgcgcgcgcacacgacgacgacgtccttaccttccttcgaggagcagcagcagcaagtcgaaaaagccgccgtcccgtcgagcaacagggcgagcggcggcgggaacggcaacactaagctggaggacgggtacaactggcgcaagtacgggcagaagcaggtgaaggggagcgagaacccgcgcagctactacaagtgcacgtaccacagctgctccatgaagaagaaggtggagagggccctggccgacggccgcatcacgcagatcgtgtacaagggcgcgcacaaccaccccaagccgctgtccacgcgccgcaactcatccggcggcggtgcggcggcggaggagctgcaggccggcaacagcagcctctcggccgtagcggcggccggctgtactggaccggagcactccggcgccaccgccgagaactcgtctgtcaccttcggcgacgacgaggcagagaacgggtcgcagcggagcgacggcgacgagcccgacgccaagcgctggtacgtacgtgatcccgcccgagcgagcgagcgagattcattattcgctacccgcgggccgcggttcacaagttgagcgtgtattactactgtttcctcgtgttcctgcaactcatgtatatatgtctgcttgatcaggaagcaggaggacggcgagaacgagggcagctctgcaggcgccggcggcaagccggtccgcgagccccggctggtggtccagacgctgagcgacatcgacatcctggacgacgggttccggtggcgcaagtacgggcagaaggtggtgaaggggaacccgaacccgcggagctactacaagtgcaccacggcggggtgcccggtgcggaagcacgtggagcgcgcgtcccacgacacgcgcgccgtgatcaccacgtacgagggcaagcacaaccacgacgtgcccgtgggccgcggcgccgccagccgagctgctgctgctgcggcggcgggttccggggccttgatggccaccggcggcggccagctcggctatcagcagcagcagcagcagtagccatacaccctggagatgctgagcagcggatcgtacggcggcggcggccccgtgggccgcggcgctgccagccgagctgctgctgctgctgcggcggcgggttcgggggccttgatggccacggccgtcggccagctcggctatcatcatcagcagcagcagcagccatacgccctggagatgctgagcagcggatcgtacggcggcgacgacggct

SEQ ID NO: 3856 - DNA, 1487 bp, Zea mays
  Clone ID: TF_ZmC2906_1
tcactatgccgctagggttttctcctgccaattgctaatgctgatctccacaactgtgtggctagcatgccaggctttggtggcatgatgagagcatgcgatgccagggcctgcaacaatcaatatcctcaggcagccgaaagtgacaccatcagtcttgaccttggtgtagctatcggcccttaccacggcgatgcaacaaaccagatgcagccctcagttccgaggccaatggaatctcctgggctcgatgccgctccgatggagataatgttccgggtccccaggttatgtgtacgatcattctggaggtggaagaccctaccctggggatgactctaatgatgatgatgacttggactcgaaacgcaggaaaatggaatctgctggtatcgacgccgctttgatgggtaaaccaaatcgtgagcctcgtgttgttgtacaaactgttagtgaagttgatatcttggacgatgggtatcgctggcgcaaatatgggcagaaagtagtgaaaggaaatcccaacccacggagttactacaaatgcacaaatacaggatgcccggtcaggaagcatgttgagagagcatcacatgacccgaagtcagtgatcacaacatatgaaggaaaacataaccatgaagtccctgtttccaggaatgcaagccatgagatgtccacagctcccatgaagcctgctgtgcatcctattaacagcaacatgccaggccttggtggcatgatgagagcatgtgatgccagggccttcaacaatcaatattctcaggcagctgaaagtgacaccatcagtcttgaccttggtgtaggtatcagccctaaccacagcgatgcaacaaaccagatgcagccctcagttccagaacctatgcagtatcagatgcgacacatggctcctgtgtacggtagcatgggacttccaggaatgcctgtgccagcaatacctggcagcatgtacggttccagagaagaaaaaggaaacgaagggtttactttcaaagctgcacctttggaccgatcagctaacttatgttacagtagtgctggtaacttagtgatgggtccatgagtgcctcttctgatggctatacctccatgaatcacacctatcaccgtcgtcatgaagttctcttcagaagatgctcctctacttcgtatcgtccgcacataattggaggcggtcaaggtatacctgggagctgcagcgatggcacatgatgtcttttgctgtgtggatgaactcgctgtatgtgacgctgcagctaaacattcgttgtacagcaaaccagttatgattaattagattatgataatttggttatgtaaacttctttctggacataaccgaagagccatctggtggcaaagctttgttatctcctgcatatgaacgatgccagtttgacattcatatgaaatgaaatatatcatttcacaaaaaaaaaaaaaaaaaaaaaaaaaaaaaaaaa

SEQ ID NO: 3857 - DNA, 1176 bp, Zea mays
  Clone ID: TF_ZmC2906_2
tcactatgccctaagggttttctcctgccaattgctaatgctgtactccacaactgtgtggctaggaaaatggaatctgctggtattgacgccgctttgatgggtaaaccaaatcgtgagcctcgtgttgttgtacaaactgttagtgaagttgatatcttggacgatgggtatcgttggcgcaaatatgggcagaaagtagtgaaaggaaatcccaacccacggagttactacaagtgcacaaatacaggatgcccggtcaggaagcatgttgagagagcatcacatgacccgaagtcggtgatcacaacatatgaaggaaaacataaccatgaagtccctgtttccaggaatgcaagccatgagatgtccacagctcccatgaagcctgctgtgcatcctattaacagcaacatgccaggccttggtggcatgatgagagcatgtgatgccagggccttcaccaatcaatattctcaggcagctgaaagtgacaccatcagtcttgaccttggtgtaggcatcagccctacccacagcgatgcaacaaaccaaatgcagccttcagttccagaatctatgcagtatcaaatgcaacacatggctcctgtatatggtagcatgggacttccaggaatgcctgtgacagcagtacctggaaatgcagctagcagcatatacggttctagagaagaaaacggaaatgaagggtttactttcaaagccgcaccattggaccgatcaactaacttatgttacagtagtgctggtaacttagtgatgggtccatgagtgtctctgctgatggtcatacctccatgaagcacatattaccgtaatcatgaagattgcttcagaaggtgctctactgtgtatcgtcatccacacataattgaatcggaggtggtcaaggtatacctgggagctgcagcgttgacacatgagccttttgctgttttggatgtacttgctgtatgtgacgctgcagctcaacattcgttgtacagcaaaccagttatgattaattagattctgataatttggttatgtaaacttctttctgtactggaatatgggatagaaccaaagatccgtctggtggcaaagctttgttatgccctgcatatgaacggtgccagtttgatatccatatgaaatgaaatatatcatttcacc

SEQ ID NO: 3858 - DNA, 1250 bp, Zea mays
  Clone ID: TF_ZmC740_3
aactctccccaaaccgagagcgcaaccaagatagcgagccaagatctgcagagccacaggcgaccacacaccggcgaccatggccgtggacctcatgggctgctacacccctcgccgcgccgacgaccagctcgccatccaggaggccgccaccgccggcctccgcagcctggagctcctggtctcctccctctccggcgcggcgccgtccaaggcgccccagcagcacccgcagcagccgttcggcgagatcgccgaccaggccgtctccaagttccgcaaggtgatctccatcctcgaccgcaccggtcacgcccgcttccgccgcggccccgtccagtcggcgccgccgccgccgcctcctccagcaccggtcgctccacctcctcccccacctttgaccgtcgtggcgccggtgtcggtggccgccccgctcccgcagccgcagagcctgacgctggatttcaccaagccgaacctggccatgtcgggcgcgacgtccgtcacctccacgtccttcttctcttcggtcacggccggcgagggcagcgtctccaagggccggagcctcatgtcctccgggaagccgccgctgtctggccacaagcggaagccctgcgccggcgcccactccgaggccaccaccaacggcagccgttgccactgctccaagagaaggaagaaccgcgtgaagaggagcatcagagtgccggcgatcagctcgaaggtcgccgacatcccgccggacgagtactcgtggaggaagtacggccagaagcctatcaagggctccccttacccacggtaaaaaaaaaaaatctcctcctccatccgcagtccggacctcgtctcgtctcgtctgtgttgtcgcgcaacgaatctgactgttctcttgtcacctggtccagtggctactacaagtgcagcactgtgcggggatgcccggcgaggaagcacgtggagcgggccaccgacgacccggccatgctggtggtgacgtacgagggcgagcaccgccacacgccgggcgcggtccaggggccgagccccctggcgaccgcgtcgccggtgcccgtcgccgtctccgccggcaacgggctcgttgtctagtctactaaaagctaggattagcttctcgtcttctttgttttttttttgtttgagctgatgtccgtgtaaaacaaggaagaaggttgtagaaagagggagaggaggacaccggaatttcgatgccgcaaaactcaaacctt

SEQ ID NO: 3859 - DNA, 552 bp, Zea mays
  Clone ID: TF_ZmC58440_4
attcggctcgagctgcggcgctggtacgggagtctggaaaccagagctacgaagatggctaactgggctcttgtctatttctgtgcgagcagccggagatcggtggagaagcgggttgtgtcggtgccgctggccgagtgcggggaccggcccagaggggccagcggggaggggccgccgccgtcggactcgtgggcgtggcgcaagtatgggcagaagcccatcaagggctccccctacccacggtacgtactcgtactcctatgcagctgctgcttctgctgaacctattaatcagcatctgcatgcaaactgttgctgccgattagcaccagtctgatgataaacctgcttcgcgcttctgtatgtcatgtgcagggggtactaccgctgcagcagctccaaggggtgcccagcgaggaagcaggtggagcgcagccacgcggaccccaccgcgctgcttgtcacctacaccttcgagcacaatcacgaggcgccgcagcccaagagcagcggccgcacctgctgccaccagcaaggcaagccgtccgc

SEQ ID NO: 3860 - DNA, 842 bp, Zea mays
  Clone ID: TF_ZmC554_6
attcggctcgagcgcgactcctcagcttcctcctctccttccttccttagctgtcccccttcccgcccccggccccgaccagatggagtgcacgtcggccgcagtcaccgccgccggcgccgccttccaccacgagccggccaggcgcatccgggaggagcgcaagcccaaggtgtcccggcgatacgtccacgccgacccctctgacctcagcctcgcggtgaaggacgggtaccaatggcgcaagtacgggcagaaggtgaccaaggacaacccctgcccgcgcgcctacttccggtgctccttcgcgccgtcgtgcccggtgaagaagaaggtgcagcgcagcgcggacgacaggaccatcctggtggccacgtacgagggcgaccacaaccacgcccagccgccgcggcacaacggcggcggcaacaaggccgcgacgaggtcgacgccagcggcgaccgaggccgcgcgaccggcgccgccactgccgctgcagcaccagcagcagcagaaacaagaggccgcgacggggccgtcgtcggaggtcgcgaggaagaacctcgccgagcatatggcggtcaccctcacgagggatcccgggttcaaggcggcgctagtcagcgcgctctccggccggatcctcgatctctccccgcccagggattaactaatacgtagacgagcatgatgattattcattgacgaactgttattagtccgtagacagaaaatttgttcacaagcatatatctcaaattttcaccaacccaagaagtgaatttgagctgcttactgcgaatatatgcatctcccgttcgaagttgctaattcaagcaaaa

SEQ ID NO: 3861 - DNA, 967 bp, Zea mays
  Clone ID: TF_ZmC2906_3
cggggcacaccaaactgaaaatgtagctgaaaaatcagcagaggatggctataattggcgcaaatatggacagaagcatgtcaagggaagtgaaaatcctagaagttattacaagtgcactcatcctaattgtgaagttaaaaagctattagagcgttcgcttgatggtcagattactgaagttgtttataaagggcatcataatcatcccaagccccaaccaaatagaaggttagctgctggtgcagttccttcaagccaggctgaagaaagatacgatggtgtggcacctattgaagacaaaccttcaaatatttattccaacctctgtaaccaagcacattcagctggcatggttgataatgttccgggtccagcaagtgatgatgatgttgatgctggaggtggaagaccctaccctggggatgactctaatgatgatgatgacttggactcaaaacgcaggaaaatggaatctgctggtatcgatgctgctttgatgggtaaaccaaatcgcgagccccgtgtcgttgtacaaactgttagtgaagttgatatcttggatgatgggtatcgctggcgcaaatatgggcagaaagtagtgaaaggaaatcccaacccacggagttactacaagtgcacacatacaggatgcccggtcaggaagcatgttgagagagcatcacatgacccgaagtcggtgatcacaacatatgaaggaaaacataaccatgaagtccctgtttccaggaatgcaagccatgagatgtccacagctcccatgaagcctgctgtgcatcctattaacagcaacatgccaggccttggtggcatgatgagagcatgtgatgccaggggccttcaccaatcaatattctcaggcagctgaaagtgacaccatcagtcttgacctttggtgtaggcatcagcccctacccacagcgatgcaacaaaccaaatgcagcct

SEQ ID NO: 3862 - DNA, 761 bp, Zea mays
  Clone ID: TF_LIB5117-056-Q2-PF1-B5
gcgcccaagttcaagtccgcgcagccgcccagcctgcccatctcgtcgcccttctcctgcttctccatccctgcgggcctcagccctgctgagctgctcgactcccccgttctcctcaactactcccatatcctggcgtctccgaccacaggtgcgatccctgcgcggaggtacgactggcaggcgagcgccgatctgaacacctttcagcaggatgagccctgccgaggagacagcggcctctttggcttctcctttcacgcagtgaagtccaacgccacggtcaacgctcaagcaaattgcttacctttattcaaggagcagcagcagcagcaacaacaacaagtggtagaagtgagcaacaagagcagcagcggcggcggcaacaacaagcaggttgaggacggatacaactggaggaagtacgggcagaagcaagttaaggggagcgagaacccgcggagctactacaagtgcacctacaacaattgctccatgaagaagaaagtggagcgctctctcgccgacggccgcatcacgcagattgtctacaagggcgcacacgaccacccgaagcccctctccacgcgccgcaactcctccggctgtgcggcggtcgtcgcggaggatcatgccaacggctcggagcactctgggccgacgccggagaattcatccgtcactttcggagacgatgagggcgaccacgggttgcagctcagtgatggcgctgagcccgtgacaagcgccggaaggagcat

SEQ ID NO: 3863 - DNA, 217 bp, Zea mays
  Clone ID: TF_700151333H1
aagtcgataaagtcgccgtcccgtcgagcaacaggtcgagcggcggcgggaacggtaatactaagctggagtacgggtacaactggcgcaagtacgcgcagaagtatgtgaaggggatcgagaatccgcgtacttattacaagtgcacgtatcatagctgctccatgaagtagaatgtggatacggccctgtccgacggccgcatcacgcagatcgt

SEQ ID NO: 3864 - DNA, 813 bp, Zea mays
  Clone ID: TF_ZmC346080_1
gaccctgggctgccggccagcccatagctttcccatctttccttcttcacctttcgaagagtgccccccttcgtttgtcgacgcgctccgactccatgccgctgtcgccgccgccgccctcctccagcccgaggcaagcagcgatccaggagctcaggaggggtacccagctggcggagctgctcaggcagcaggtagagctcatcccggagcctaaccgccgccacgctgcagcggtcaacgtgggcgagatatccatggctatggagtcgtcgctctccatcctccagtctcagatggagcaccccttctctgagcctgaggtcatggcggctgcgctcactgcccactccgacggaggcaccagcggggaaagaaatggcggtcccgtggcccgtacaaggaaggtgagggtgcggcaccggccaggcagaggcaggcctgcagctggagatgaactgccgatcaaggagatactgactgaggcaccagaaaatgatcgtttccactggaggaaatatggtgagaagaatatcctctattctgaatatccaaggttatactacaagtgcgggtacagcgacgaccacaagtgcccagcgaagaaatacgtgcagcagcaaagcaacagctaccctccgattttcttggtcaccctgatcaacgagcacacgtgcgacgccttgttccgagacgacgagcccatcatcagctcaagcagcagtggctcgtcgcaggtcctcgacttcacgaaggcgtcgctttcttctcctctccattgatgttggcggcggcgcggctgcaggggttggg

SEQ ID NO: 3865 - DNA, 622 bp, Zea mays
  Clone ID: TF_LIB4762-013-Q1-K1-E6
ttcggccggggcaccccttctctgagcccactgcccactacgacggaggcaccagcggggaaagaaatggtcccgttgcccgtacaaggaaggtgagggtgcggcaccggccaggcagaggcaggcctgcagctggagatgaactgccgatcaaggagatactgactgaggcaccagaaaatgatcgtttccactggaggaaatatggtgagaagaatatcctctattctgaatatccaaggttatactacaagtgcgggtacagcgacgaccacaggtgcccagcgaagaaatacgtgcagcagcaaagcaacagctaccctccgattttcttggtcaccctgatcaacgagcacacgtgcgacgccttgttccgagacgacgatcccatcatcagctcaagcagcagtggctcgtcgcaggtcctcgacttcacgaaggcgtcgctttcttctcctctccattgatgggcggcggcgcggctgcaggggttaattgaagaaatagagatgcatggaagaagacagatattcgtgttcggatgatgagtagtactagctagctaagctagtcgtcttcaattcgttgcccacgatgatgtcggcggcagatcgatggagct

SEQ ID NO: 3866 - DNA, 724 bp, Zea mays
  Clone ID: TF_ZmC734841_1
tacctcgaggccggccgggaggctgcttgttgggacttgggtatgggcttgcagtgctgtgcccgccctctctccttccttgttccttctttataaggagacgagcgagctcggcagagaggtacaacgcccaggacacgacagggcgctgcttgttgccgattgctagctggtaaagggtaggccggtgcgtctagctaccttggttggttgggtgccggaatttccatggaggtcgcggtcgtggaaagtcctcgtcctcctccgccgccgccgcaggccaaggaggagaagaggtccgacgccaccaagccagagatcgccgcatcgatggtaggaagcgctctcccaatagtcttcgaaagctttccgtcgacgcaaagagaagcggcggcggcgggcgtcaaacaggaggagcgcaggctggaggcggccagggcggagatgggcgaggtgagggaggagaacgagcgcctcaagtcgatgctgtcccgcatcgtcggccagtaccagtccctgcagacgcacttcctcgacgtcgtcaaggtgcgcgagctgccaatggcggaagtacgggcagaagatctccaaggggaacccgtgcccgcgcgcctactaccgctgcacggtggcgccgcactgcccggtgaggaagcaggtgcagcggtgcgcggaggacacgtcggtcctgatccccagtacgattgcgcgcacaaccacccgc

SEQ ID NO: 3867 - DNA, 229 bp, Zea mays
  Clone ID: TF_jC-zmXLIB3526P032bh01a1
ctgcggttgtgtttggtccgtggaccacgggcacgtagaggttgatgcttgcccttatgcgtggagatcaccgcgcgcgcacaaagaaaacgcgcgtacacgtgtttacgcaccgagcaccaggccgagacgcacttgtggtagatccgcctgatcagggtcacctacaagagcttttggctgtacttgcgccaccggaatctgtcgcccacaatgtatatgttgctca

SEQ ID NO: 3868 - DNA, 786 bp, Zea mays
  unsure (1)..(786): unsure at all n locations
  Clone ID: TF_LIB4759-038-Q1-K1-B11
ccggccgacggagcttgttgagagacccgctgaaaagctcaaaccctcctcacttccacgcctctctcctccctttcacacttagctccccatgtcttctggaggaggagaccaccatggcgtctaccaccagcagcacggccacggccacggccatctcgcccgcgctgacggcgccgagtacgcgttccacggcaacgacgacatggagagcttcttcttcaaccatccggcgtcggcgggcctcgacggaggaggcagcaggacgactggcgccgacgagctcctggcgccgtactccagcatcacggactacctgcaggggctcctggacccctccgggctagctcggcacctcgacgccccgctcaagcacgagctgtctgtcgacgcgagccacgacagccagggcaccagcggcgcgcccggcggtgaagcggcggcgatgcacacgccganactcgtcggtgtctctctcgtcgagcgaccgggacggggagggccagcagcctcgtcggtgcaagaagggcaggaccaacaaggcggaggacgcggagggggatgagaaagatcagcaggatgggggagaattccaccaaagcgaacaaatccaagaagaaggctgagaagaggcagaggcagccgcgcgttgccttcctcaccaagagcgagggtggatcaccttgaggacggctatcggtggcgcanatacggccagaagggcggtcaagaacagtccttacccaaggagctactaccggtgcactacgcccaagtgcggcgtga

SEQ ID NO: 3869 - DNA, 219 bp, Zea mays
  Clone ID: TF_LIB3236-084-P1-N1-B12
agcagtaaatttgcattatattagttaacactgatgatggccaggccacacacatcaatattcagaggagttgattagtgcaagactggagctgcgagaggagctggagctgtttgaggatggggctgagcgcctccatgagcttctcgcacgggtggttgtgcacgccctcgtacgtggtcaccactatgctcgtgtccttggccagccgctgcacct

SEQ ID NO: 3870 - DNA, 797 bp, Zea mays
  Clone ID: TF_LIB4740-138-A1-K1-A11
ggctaattcatgaccttccccggattactatgatttgtcttggttattgtgggagtttgtaattttcactagaaaacagttcagtttgtatacgaagtattggtctactactctcttaagttccataaatccctggttcagggaagatgcaacctcatgagaaggttgctgttctgaagcctgttgcctccaggcctttctccagcttctggcccttcccaaagtttctgcacgacttcaacgccacttgttccccaacaatcaccttcccacaggagactgagctaatcaggccaaaagccactcggttggcatcgctgccgggtgaccttccaacacatattgcagcaacgacagatgccgggtcggataccatgtctgaggaggtggaagggtatgcaaaacatcacacgtatcgtgaccatgcaacagcgtgccaagctgcgaggcggaatggtgagcgcagtcgcctgtcacttgacgggtacagctggaggaaatacgggcaaaagaaagtgaaaggcagcgagttcccgcggagctactacaagtgcactcaccctagctgccctgtgaagaggaaggtggagacgcaggttgctgagatcgtgtatagtggtgagcacaaccacctgaagccgggcaagccttgtcccccgaggaagccattgctgtcgacaagcacagatgctgtgatgtgtgacacgcatggtattgacgacatgacgccgccggagtagagacgaagacaccaggagttcagattcttcgttccagtacttaaatctagctaagct

SEQ ID NO: 3871 - DNA, 835 bp, Zea mays
  unsure (1)..(835): unsure at all n locations
  Clone ID: TF_LIB4977-067-Q1-K1-D11
cctcgaggccggccgggccgggagtatttctcatcaggtcgcccgtcggtgggcgcgggcacgtgacagcgatacgcccggaggccaagataatctttgcatcgttctcggtctcggttctggagagttttatatggccgcgaggtgtcaattattatggagttctctctcccgccccttctctcttcgtgatgctcatgctcctctgcttgccttgccctggtgtggtggtgtctagtcaagtacgcttccgaattaaaagcgctctggcctgcaacctgctgtctgctccgtcctcccacggccggccgcctgcccgcgtcttcttcgccacccctcttctccggtcccgcacctgcatttcttgaccccttcctccaccgcagccagacaatgtctccggcgccgagttcgcatcactcgcagatcaattcgaggaaggagaaacggatgaggaaggtggacaccttcgcgccgcacaacgatggccaccaatggaggaagtacggcgagaaaaagatcaacaacactaacttccccaggtattactacagatgcacgtacaaggacaacatgaactgcccggccacgaagcaggtgcagcagaaggaccacagcgacccgccattgtacgcggtcacgtactacaacgaccactcgtgcaacagcgccttcctcccgctctccccctccgagttccagctgcagacctcgtcctgcagcaccgagtgccacgacgcccttctcggctgncgccgccgccgtgcccggaggaggtggtagatgcaggcagatttggatctatcaggtcttccattttttgtaaatgatcact

SEQ ID NO: 3872 - DNA, 652 bp, Zea mays
  unsure (1)..(652): unsure at all n locations
  Clone ID: TF_ZmC300_23
gtgcggcgctcgagccggccgggccggctctctcccgccccttctctcttcgtgatgctcatgctcctctgcttgccttgccctggtgtggtggtgtctagtcaagtacgcttccgaattaaaagcgctctggcctgcaacctgctgtctgctccgtcctcccacggccggccgcctgcccgcgtcttcttcgccacccctcttctccggtcccgcacctgcatttcttgaccccttcctccaccgcagccaaacaatgtctccggcgccgagttcgcatcactcgcagatcaattcgaggaaggagaaacggatgaggaaggtggacaccttcgcgccgcacaacgatggccaccaatggaggaagtacggcgagaaaaagatcaacaacactaacttccccaggtattactacagatgcacgtacaaggacaacatgaactgcccggccacgaagcaggtgcagcagaaggaccacagcgacccgccattgtacgcggtcacgtactacaacgaccactcgtgcaacagcgccttcctcccgctctccccctccgagttccagctgcagacctcgtccgggaaggacgtctccatctgcttcgactcctcgtccgggaccngcggcgccgcgcggccgccaccaccaatg

SEQ ID NO: 3873 - DNA, 950 bp, Zea mays
  Clone ID: TF_ZmC332_2
gcgtcatcgtctcgctcgttcctttcgtctctgagcatggaaggaagtcttgcgagcttggatggaagccgggccagcaggccgttccagctagttagtggctctcagacatctagcacaccggagctgggcctggtgcaaaggagaaggtgcgctgggaaggaggatgggagtggtcagtgcgcaaccgggagccggtgccattgttcaaagaaaaggaagctaaggataaggaggtccatcaaagtccctgcagtaagcaacaaggttgcagacatcccagctgatgagttctcgtggaggaagtatgggcagaagccaatcaagggatccccacatcctaggggctactacaagtgtagcagcgtgagaggctgccccgcgaggaagcacgtcgagaggtgcgtggacgacccctcgatgctgatcgttacctacgagggtgaccacaaccacagccgagttctagcccagccagcctgatctctctggctatcgattattcaagatcgcttccgtagtagtcaccctccctctctagagaagggaggacagcaacagcaacaagaagagcctagtgtctgtacataagttctgcttctaacagttggaggagtgattcggttagctagctctttcagaagaatcggtggtgacagaagggaacttatcgatggatgggagaaagggagagagagagagagttcctcatcagatactcatactctatttttgtagcttcggtttatctctcttttttgttcatcctgtgctagggcccatcctgtgggtgcagtgtaacattgagctgcaattgtatgtctgggaatggtgttgggggggattggatcggagaagaaggcatgtggcaggaaattgcctgtaaaagtggctacacctaggaacagaatgggccatcgtcttcagcagtggtacagtcttgttgacgc

SEQ ID NO: 3874 - DNA, 1607 bp, Zea mays
  Clone ID: TF_ZmC91351_2
cccacgcgtccgctcgtccttgataagtgagcaagcggcaagaaccggcggggcgcccatgtcgtcgagagacttatacttccacgacgagctggcgtcgctgttcgcgcagcggccggcgccggccggagaggcgatgatgacgcaccagcaccagcagcagcaacaggcgccggcgtcgtggttcgcggactacctgcacgcgggcgccccaggcatggggatggactacgacctgctgtgccgcgcgctggacctgccgctgccgggggacgacgtcgtcaagagggaggaggagctgctgctggtggacacaggcggggacggaggaggcttcgccgcgcccacgcccacgcccagcgggggcggcacggcgccggtcacgcccaacaccacgtcgtccatgtcctcctcgtccagcgaggcggcgggcggcgccgccggaggaggaggaggaggaggaggaggaagggaggaggactcgccgcaggggaggtgcaagaaggaggaaggggatggggaggagagcaaggcgctcgacaagggggaggaagacgctgacaagggcaagaaagggtcagcggcggcaggcaagggcaagggcaagggcgagaagcggcagcggcagccgcggttcgcgttcttgaccaagagcgaggtcgaccaccttgaggacggctaccggtggcgcaagtacggccagaaggccgtcaagaacagcccataccccaggagctactaccggtgcacgacgcagaagtgccccgtgaagaagcgggtggagcggtcgtcccaggacccggcggtggtgatcaccacgtacgagggcaagcacacgcaccccatcccggtcacgctccgcggcagcacccacatcctcgccgcgcagctgcaccaccaccacaaccaccacctcggcgccttcccgacgccgctgccgcagacgggcgcggcgccgttcgggcgggcagcaggcggggcgaggcgtcatcgacatgctggggctcctgcccccgcgcaaccacggcatgagcggcggcccgatgagcgccgtggctggcgccgcgacgacgacggccgccaccattactactacctccaccacaccgtcgtctcccccctcgctccagatgcagcacttcatggcgcaggacttcgggctcctgcaggacatcatgctgccgtcctttccacggcggcggcggcggtaacatccagccctgaatcgatcccaattgctcaccgccatcgcaagcgcagcaagctaatgaggaaggaagctagctagataagagatagtagtttggttcttgttgatgcttaccctctttaatccttcgttttttttttcaccgacgacgatttactcctctagacgggaccgcgcgcgtgccatgcatatcggtccttgatttgcctttccgcctgcagctgtactggcgccggcaggcctggtctcgtaacgtttcttaattatgcatgatgatctagctagtccttgcaggtagtactagccgttcttgtacatgtacctaattaatcaactcccccgccggctcgtcctggccatgagctatgataattttatgctagctcctctttgcatt

SEQ ID NO: 3875 - DNA, 3254 bp, Zea mays
  unsure (1)..(3254): unsure at all n locations
  Clone ID: TF_ZmC9869_1
aaacgaagttccatcgccctacctcacgatcccgcctggcctgagcccagcaacgctgctggagtcaccagtcttcgtttctaattccatggtatgtgctcttctctaggttatgatagggtgtggacgcgttaccagaatcagtattgctttcgtctatggatgctaaactggcagttcaagaatgcttgctttaataagcttttgacctctccagggagttcgtgaaagctctacttcagttccatgatgatcagttctgccttgttttgtagcatccagtctcttctttccaaacaggcttctgtttgttttctcaaaagcagaaaaatagtatcgtaccattcaaatatttcaaagttttcttgaaagcaggaatatgatgatcaatctctgttctttccatagttatgtggcaatgtatgcccccacacttcaggtccaaacttcccccttatgtactacttggaactccaatataatagctgttaatgttgtcaaagctgcataggaatttcatgtgtttgctctcttcatattcatatctgtattttgaatcatcatgttatttcatatgtaaattaactaaggaggtatcaactaggacaattattttaataaactccgatactgaagctatttcgtacctgacagcaatgttttttgtttccttgcaattcttcagggccaggcctcgccaaccacggggacgctattcatgtttggtagcacaaatgacaatgatcctattagatttggaggtggtcctccttcagttggagatggccctaatgcttttcctttcaagcccttagatctgaaatcctcacactacactgctgaagcaatgaaggttagcaacatttgaatagttcataggttattcctgcgacgcttgcgtggtaatgattgaaggtaacatttgaatacttcataggttattcatgataacatttgcttgtgcgctaatggtaaaaggatctcttaacttagaaagtattcgtataaacgtgcagtttgcagtgatgtttgtttctgaaattttgccccgagtctagatgagaaatcggttaaatccaaatggttttgctctgtaagtcttttatctgttgcactacctgtaacagactagtttgtctttttggaatggttgaggcttgaagcacatttgtctattctctgagtgttagtgacacaaagtggctgttttgctgcatattgttcatactaattggagaaagaccagagaccagctagtgttagatagtttagaagttcaataaaaataattctcactggcaactaaacaacaggttagtcttccttgagttccaactaaacatataagaacatcgttctaattgtacatttcaaaatgtcaatgaacatttttttttctattcatgatccaataccttttgataccatttccttacgagttagttcataattgctccgtcaggaacaaaatacgaagtcttctgtcaagactgaaaccaagattctgacagtacaagaggctagtttgctgagccaactgaaccagctgaatcacaattcgcagatcattattgatagtggcggtcctcatgaccccaagctcagccgtcctgcatctggcgccggtgcaggcaatgaacacatatcacccccggatcacggacagacagctgaggaaactgatgcgagggaagactacccggcaatggctattaccacgccagcagaggacgggtacagctggaggaagtacggacagaagcaggtgaagcacagcgagtacccgcgtagctacttcaagtgcacgcatcccaactgcctggtgaagaagaaggtcgagcgctcgcacgaggggcacatcacggagatcatctacaagggcgcgcacaaccacccgaagcccacgcagagccgccgtccaggcgtccagcccgtgcacccgtttggcgacagtgcgcaggcggacgcagccgacaacctggggtcacaggcaaacgcagtggacgccaaccagccgaggcgtgcgggtgttcaggatggcatggacgcgacgtcgtcgccctcagttcccattgagcgctgtgactcgccggcctcgatgcaggtcgactcggcagcccggtttggatcccccgagggcgcggatgtgacgtctgtgtccgacgaggtgggcggggacgacagggtgactcgtggcagtatgtctcagggcggtgccgacgcggagggtgacgagctggaatgtaaacgaaggaagctggagtcgtacgccatcgatatgagcaccgcgtcgagagctgttcgcgagcctcgcgtggtgatccagacgacgagcgaggtggacatcctagatgacggctaccgctggcgcaagtacggccagaaggtcgtcaagggcaacccgaatccaaggagctactacaagtgcacgtacccgggctgcgtggtgcggaagcacgtggagcgcgcgtcgcacgacctcaagtccgtgatcaccacgtacgagggcaggcacaaccacgaggtccccgccgccaggaacagcggccacccgggcaccgcggcggcgacaggcgcgggtggcccgcgcaggctggagcacccgtcgctgcgcgacggcctgatggggcacttgggcggctgcggcgtgccgttcggcctgccgccgcctagggatccgctggcgccgatgggcaattacccgacgtatgcctcctccattccccttggcggcgccggccccacgtcactgccgagcctgccggtgccggcggggaccctcagcgccgtcgatgggctgaagctcccgatgctggcgccgtcgtccctgcagcagcacccgctgctgaggcaccggcaggcgatgcaggccgctggcctcgtggcgcccaaggacgacgtgaaggtcgagggcaacgttgccggcggcgctgccccgtcggtgtaccagcagatgatgtgcagcgggctgcggttgcgccagcagatgtagatacataaataaatgtggagaggattagtgattctcaagttattagtttcttaccagtcgtattaggatgagttcgtgataattgttataacgtgggaacaaacacccgttgctttctgtttttttttcacccttccacttcatttttagctcagcaactatttatttatttactgcccctcttcattgaggtttggtcgaaaaaaaaaaaaaaaaaaaaaaaaaaaaaaaaaanaagggcggcccccggaaaagtgagctc

SEQ ID NO: 3876 - DNA, 838 bp, Zea mays
  unsure (1)..(838): unsure at all n locations
  Clone ID: TF_ZmC56014_1
cctcgaggccggccgggaccgttcgatccgagtgtcctgcagagcccatcctgttcctgtccccctcgagcaatcgagctcagctgcacgctcgcttacgcggagacacagacgctgagacacacgcaggtcatgatgctgctcatggactcggggagccgcggtgactgctccccggtctgcttggacctcagcgtcggcctttcgccgccgtcgccggggagcggcccggaaacgacagctgacgctgagagactcgaccgtcccgccactggctgctgggggccacggacatcgtccctcgctgacgggcaggacgaggccaagaccctggaggccaggctcacccaggtcagcgaggagaaccggcgtctcaccgagatcatcgcctacatgtacgccagccaggtcgccgcgcggcggagtcccgacggcaggaagaggagcagggacagcctggagccgtcgaattcgggcgacgccaacgctgccgtcgagagcgccgccctcagcgacgagggcacgtgcaggcggatcaagctcaccagggtctgcaccaagatcgacccctccgacaccacgctcaccgtcaaagacggctaccagtggcgcaagtacggccagaaggtgacgcgcgacaacccgtccccgagagcctacttccgctgcgcatacgcaccatcctgccccgtcaagaagaaggtgcagaggagcgcggaggacagcgccatgctggtggccacgtacgagggcgagcacaaccacccgagcccgacgcgcgccggcgagctccccagcttcacctccatcaactcctccggcccggncatcacgctgg

SEQ ID NO: 3877 - DNA, 1734 bp, Zea mays
  Clone ID: TF_ZmC554_3
agcccggaattcggctcgagctcagctcaaacatccctactctcctgctcctcttcttcctcctcctctcgctctcaagcgcgtcttcactccggcctagctcggacggatcgacatcgaggggaaagggaataagtgggggcgccagcagatggatccatggatcagcagccagccttctctgagccttgacctgcgcgtcggcctgccgccgctcagcctccaccaggcgccggtggccgtcgccttggccaggcccaaggtgctcgtcgaggagaacttcctgctgcctcccaagaaagaaccagaggtggcggccgctctcgagtcggagctacggcggatgagcgaggagaaccggcgcctggcggaggcgctggccgcggtggtctccaagtacgaggcgctgcgcagccagcacacggagatggtggccgcgtcgtccgcgtcggagggcgggtccgtgtcgccgtcgcggaagcgcaagagcgagagcgcggacacggcgccggtgcagcgccttcaccagcagcacgcggcggcggacctgtcggagtgcacctccggcggcgagccgccgtgcaagcgcgtcgtgcgtgaccgggcggaggaggtggaggaggaggaggagtgcaggcccagggtgtcgaagctgtacgtgcgcgccgacccggccgacctgagcctggcggtgagggacgggtaccagtggcgcaagtacgggcagaaggtgaccaaggacaacccctgcccgcgggcctacttccgctgctccttcgccccggcctgccccgtcaagaagaaggtgcagcgcagcgcccacgacgcctccgtcctcgtggccacgtacgagggcgaccacacccacggcccgcccccctcgggctcgggctcgggttcgggcgccagcagcaagaacgccgcgaagccgccgtcgccgccgcgccgccaggaggctgctgtcgcggtgactgcggccgcggcggcgtcggagatggtccggcgccgaacctggcggagcagatggcggtgacgctggcgcgggaccccagcttcaaggcggcgctcgtgtccgcgctgtcaggccggatcctcgagctgtcgccgaccaaggactgacggaccgcagacggatcggatcgagcggcgtgacacgagattctcgcctcagggctcagggtgtcttcgcacgcacgcggcaatggtcggccgaacaggagacgaggatctgcagcccagcaccagggacgagcagaccggggctgctcgcgcggccggacatggcgtggaccggtgtccagactccggagatcgtcatgccgacgacgtaacatgcgaaacgctactagtacaagaaacaacatccaagtgtacaatcccctgtactttgtagtcttgtttaggcaaactgttctctgtccatccaatcgatgaaacgagaacgttacaaattttttttactccgttcgataagatggcaatgggtacccgctacccaaaacccggtgggtttttgctttattaggggataagtttggatcaatttctccacccctcggtttgttaatgggttcaaatagaaacccaacgggtacatgggcatgggtttgttcttcccctacccatacccgcaaaccatgggaaaaaaaaaaaaaaaaaaaaaaaaaaaaaaaaaaaaaaaaatttttttaaaacccccccaccccccccacggcggccgtcgcgattctagaa

SEQ ID NO: 3878 - DNA, 518 bp, Zea mays
  Clone ID: TF_LIB3606-048-Q1-N6-A9
gacgctaactttgacatgtttttccctcagcaatatcaacaaatcaaacaataggcatgtattcttttttttgaacgaaaaaaaggcatatatcttcggatgcttgtagatgtcaaatcacaaggggaaaaagcaaggagcagctggaaccaggaaagaacagcggtgatctctcgggcaaaatgctcgactaaggaacctcgtgcgctgcggcagtggcggtgacgtagtaggcgacggtgatcccgccgtggacgaagcacatgatccctccgagggccaaggtgtgtccgtgagtgaacccgcacgacgtcttggacttggagttgggcaaagcgaggtcacctgcaccggcaagaggaaggccgctggcggagcgggcaaaagggccgccgcgtgtcggaggagagcccagccatcgtcggttgtgacgaaaagcgtgagggatctggaggacggacacgcgtggcgcaagtacgggcagaaggagatccagaactgcaagcacccaaaggcct

SEQ ID NO: 3879 - DNA, 1347 bp, Zea mays
  Clone ID: TF_ZmC740_1
tgattcaattctcctcaatcaaagaacgtgcccacgcccgtccgaaaaaaactaatagaaaaaataaaaagaatccattgactcgcagcttcccctgctcctgctctcaccatttccacctataaagtcggccgcagcctcctgcgcgacaaacacctcccaacccaatctcctcactctcagagagagccccaagccaagatctgcgcgggcaagtcaccaggcgaagcaccggctcccatggccgtggacctgatgggctgctacgccccgcgccgcgccaacgaccagctcgccatccaggaggcggcggcggccgggctccgcaacctggagctgctggtgacgtccctgtccacgcaggccgccgcgccgcacagggccgctgatcagccgttcggcgagatcgccggccaggccgtctccaagttccgcaaggtcatctccatcctcgaccgcacggggcacgcccgcttccgccgcgggcccgtcgagccgccgccgccgacgccgcctcctgtcgtccccggtcctgcccctggcgcccgtcagcgtggcgcagccgccgcagagcctgacgctggacttcacgaagccgaacctggccgtgtcggccgccacgtccgtcacctccacgtccttcttctcgtcggtcacggccggcgagggcagcgtctccaagggccggagcctcatgtcctccgggaagccgccgctgtccggccacaagcggaagccctgcgccggcgcccactccgaggccaccaccaacggcagccggtgccactgctccaagagaaggaagaaccgcgtgaagaggaccatcagagtgccggcgatcagctcgaaggtcgccgacatcccgccggacgagtactcgtggaggaagtacggccagaagcccatcaagggctccccttacccacggggctactacaagtgcagcactgtgcggggatgcccggcgaggaagcacgtggagcgggccaccgacgacccggccatgctggtggtgacgtacgagggcgagcaccgccacacgccgggcgcggtccaggggccgagccccctggcgaccgcgtcgccggtgcccgtcgccgtctccgccggcaacgggctcgttgtctagtctactaaaagctaggattagcttctcgtcttctttgtttttttttgtttgagctgatgtccgtgtaaaacaaggaagaaggttgtagaaagagggagaggaggacaccggaatttcgatgccgcaaaactcaaacctttgtgtcgtgtcctaaaaaaaaaaaaaaaaaaaaagcaccgcctcacgccgggcgcgcccgcgcccgcgcccagccccct

SEQ ID NO: 3880 - DNA, 1039 bp, Zea mays
  Clone ID: TF_ZmC1382_1
cggggggcctcgagaccggccgggattattcaggcaggcgcattgactgatacacatatatacaacaagcaaggcggctagctacagcggctagtgcgcgcgtggtgcaggcgcatctagctactacctggtgcttgttgtgcatacaatggcgacttcgctgggactgaaccctgaagatctcttcacttcgtactcgtcttcctactactcctcgccgccgttcatgtccgactacgcggcgagcttcacgccggcggccggggactccacggccttctcctcggagctcgacgaccttcaccacttcgactactcaccggcgccgatcgtcactgctgccggagccggggctgggggcggcgatcgcaacgagaagatgatgtggtgtgagggtggtggtgacgagagaagactcagaagcaacggaaggatcgggttcagaacgaggtcagaggtggagatcttggacgacggattcaagtggaggaagtacgggaagaaggccgtcaagaacagcccaaatccaaggaactactaccgctgctcgtcggagggctgcggcgtgaagaagcgggtggagagggaccgcgacgacccccgctacgtcatcaccacctacgacggcgtccacaaccacgccagccccggagccgctgctatcatcgtcccgtacggcagcggcggcggcaatagcggcttctacagcccgccgcacagcggctccccgtcggccacctcctactcgggctccctagccttctgacttttccgggccttgacccatagttacctttacactccagtcgtcggataagaagaatgttcagcggctggctaaacagtctcaactgctgcagctattcaaattagtgttggagatgcaatttatagagataaaatactctagaagctatcgctgtagccggattaaattctgacctacttgtatagttttacacttacacagtgcaagtaataatatttaagggaagcagagagcactctaagcggctacctctcaaaaaaaaaaaaaaaa

SEQ ID NO: 3881 - DNA, 1118 bp, Zea mays
  Clone ID: TF_ZmC713262_1
actgctcatatatccgcctcccctcgccctccctctctctctctctctcactcacaaacaaacaaacaaacaagcctggatcgagcgaattcagccgagcttcagaaacccttgcaagctcgtagcaacttctctcaaccttattcggctttcttctagctatataacgaccctaaattagtctgcttcattcggttcttgcgaattgccaagaccgaaagaacagcttattactcttctgttagaaagactcgaagaggccggccgagatagactatcagctagctagagggagctaactacctacctagctagccatgtgtgactacttcctgcaaaggatggatcagggcgaccaccaccaccaccaccaggccggagacctcacggacgtcgtccgagccggcggcggcgcgatgcatcaggcagctgtcgcggagctctcctccgcggacacggggtggcagctcccggccgagccagcagctggagcaagcctcttcccgccaccccagccctcgtcgtcggactgcgacggcttcgcggacgcgttcgccggcctcccggacccgtttgccagcgactttcgcacctcctcctcctcctccggcgtgggccttggccctgccgacttcttcgacttcgaggcgcctgctgctgctgctgctgccggtggcggcgctcgaagaggcggaggcgtactggcgggcgcgcagatgcccgcgctgtcgccgagagagatacggccgtacccggtgacgatgggcggcgacaccgtgaagatcggcgcgccgacgatgatgcccgggctggccgttgggccgccctgctgtgcgttcgacgctgtcgccgggatgcagatgccgagcgcgcacgcgcacggtgaggggatgaagcgcaagaaaaaccaggcaaggaaggtggtctgcatcccagctcctgcaccatgatcgggaggaggaaggaccactggggagggtgttcgttctgatctctgggcttggaggaagtatggacagaagcctattaaaggagcacgctacccaagagggggctacagatgcagcagctctaaaggatggccggcgcggaagcaagtggagcgcaagcgaaccgac

SEQ ID NO: 3882 - DNA, 461 bp, Zea mays
  Clone ID: TF_LIB3732-003-Q1-N6-E5
gggggatcaaaattccggggtccccctttccctttttttacaacctttttccttgttttacccgggcattagctcaaacaaaaaaaaaacaaagaagacgggaagcttatccttgcttttagtaaactaaacaacgagccccttgccgggggaaacggggacgggcaccggcaacccggtccccagggggcttggcccctggaccccccccggggtgggggggggctcccccttttacgtaaccaccaaaatggccgggtcggcgggggccccctccacgtgctttcttgccgggcatccccgcacagggctggacttgtagaacccccgggggtaaggggagcccttgatgggcttttggccgtacttcctccacaagaactcttccggggggatgtcggggaccttcgagctgatccccggcactttgatgctccttttcacgcgggttttcctttttt

SEQ ID NO: 3883 - DNA, 763 bp, Zea mays
  Clone ID: TF_ZmC240676_1
cggcaagaagtccgtcaagaacagccccaccccgggcgacggctaccagtgctccacgtacggcaagaagtccgtcaagaacagccccaacccaaggaactactaccggtgctcgacggaagggtgcaacgtgaagaagcgggtggagcgggacaaggacgaccccagctacgtggtgacgacgtacgaggggatgcacaaccacgtcagccccagtacggtgtactacgccagccaggacgccgcctccggccgcttcttcgtcgccggcacgcagccgccgggctccctcaactgatccccggcggcccatcgcgacgtacggtccgctccaccgcaccaatctggtttcgactcccagatggcagctagctagtcggcggtatacactagtagtagtaggataggccggccgacacccccgataggtgatcggctggtgggtcggtttcccgaggtggatttctcgtttgggtttctagcacacccctccgctcctccctcttttccccgtccttttcctgctccgatcatggaaagggccggcggctggctggctggctggctgttgcgatcgaatagtatgtagtggtggtggtgctgctgttcatgctgggttccaagagaggtttaatttcccattgccttgagctcagctaaattattagtccgggacggaaatgtagcatatactgcattgaccgtgtaataagatgtacagaagctgtcccaacgttggacacaagatacttagattatatct

SEQ ID NO: 3884 - DNA, 478 bp, Zea mays
  Clone ID: TF_LIB4185-024-R1-K1-A8
cccctccccccccccccccccccccccttttggagttttggggcatcaaaattccggggtcctcctttccctttttttacaacctttttccttgttttacccggacatcagctcaaacaaaaaaaaaccaaagaagacgagaagctaatcctagtttttagaaaactaaacaacgaccccgttgccgggggaaacgggaacgggcaccggggaacgcggtcgccagggggctcggcccctgaaccgggcccggggggggggggggctcgccctcgtacgtaaccaccagaatggccgggtcgtcgggggcccgctccacgggcttcctcgccgggcatccccgcacagggctgcacttgtagtacccccgggggaaaggggagcccttgatgggctttgggccgtacttcctccacgagaactcgtccggggggatgtcggcgacctttaagctgatcgccggcactttgatgctcct

SEQ ID NO: 3885 - DNA, 1528 bp, Zea mays
  Clone ID: TF_ZmC1136_4
gcggcggcagcaccaagcttgaggacgggtacaactggcgcaagtacgggcagaagcaggtgaaggggagcgagaacccgcgcagctactacaagtgcacgtaccacagctgctccatgaagaagaaggtggagcggtccctggccgacgggcgcgtcacgcagatcgtgtacaagggcgcgcacaaccacccaaagccgctgtccacgcgccgcaactcctccggcggcgtggcggcggcggaggagcaggccgccaacaacagcagcctctctggctgcggcggcccggagcactccggcggcgccaccgccgagaactcgtccgtcaccttcggcgacgacgaggcggagaacgggtcgcagcggagcggcggtgacgagcccgacgccaagcgctggtacgtgtgatgatctcaccagatcgattcgctgctcctccgatccttcacgagttgaggcgcgcggcgccgtgtgtttcctgtgttcgtggaagtggaactcatatatacaccaccatgtatgtccgctttattattgatcaggaaggcggaggacggtgagaacgagggctgctcaggcgccggcggcggcaagccggtgcgcgagccgcggctggtggtgcagacgctgagcgacatcgacatcctggacgacgggttccggtggcgcaagtacgggcagaaggtggtgaaggggaacccgaacccgcggagctactacaagtgcaccacggcggggtgccccgtgcggaagcacgtggagcgcgcgtgccacgacgcgcgcgccgtgatcaccacgtacgagggcaagcacaaccacgacgtgcccgccggccgcggcgccgccagccgcgctctaccggcccgcgccgccgaccgcggacaccgccggccaccactacctcgccgcggctcggccgggcgtggcctaccagacggggcagcagtacgggttcggtgaccagctgggctcgttcggcctcagcggcgccccggcgcagagcggcggcggcggcttcgcgttctcctccggcttcgacaacccgatgggctcgtacatgagccagcaccagcagcagcagaggcagaacgacgccatgcacgcgtcgagggccaaggaggagccccgggaggacatgtttttcccgacgtcgttgctgtacactgactgaaggacaaggacggcaggacatggcgtggtgtggtgtccataaactgttcctttggcacacggattgttgttgttgttgttgttgttgttgtatctaggataggttgaacagatttctttatttgtttggaggcctccatgttggcagtggcagatgcttgccgtgccgcaggggtgtctcccttaacacgtgaaaggggggaaagaaagggatttaggatactagagtctaggacacgtggcaattacacagaaggggtaaagaagttttgttcctcaaagacaaattcacacatgagacttgttgtagtcaggattggacataatttcatgtcacagaacatttgttaagattc

SEQ ID NO: 3886 - DNA, 412 bp, Zea mays
  Clone ID: TF_LIB3245-516-P1-K1-C4
agcgccgagcctgccgagcgctgaaccgccgagcgccgcctgcgtgagcggcatcacgagcatcaacaacaccgcctgcggtggcaacaacgccgcgtcggctatggcgccgccaccggccaaacctgcactgcacgagccgccgcagctgcccaggagcgcagcgtcagcgaacaagacttcagagaagcggcagagagttccttccgcatacaaccgtttcatcaaagatgagatccagcgcatcaaggccagcaatcccgacatcactcacagggaagctttcagcgcggctgccaagaattgggcccatttcccacacatccatttcggcctcatgcccgatcagggtctgaagaagcaccccatgcaaactcaggagggagctgaatgcatgcttttcaaggacggg

SEQ ID NO: 3887 - DNA, 690 bp, Zea mays
  Clone ID: TF_ZmC32886_2
cccggggccacggcaatgcatgccggccgcctcgttggcagcaggaagagggaagagggagacgaccctgatggtttttgttctcgttcagtcgtcgttcgctgaggaagagagagagagagaggcagatcatgctatagtgacgtgtcgctgagctagctaggtagcttctgatcatatgcatcgatctgacgtctcccttttgcttttcttttttctgctggctctctccctcggggaatacgattgcagggacgaaatccaacgcatcaaggctggcaatcccaacatctcgcacagggaggccttcagcgcggcggccaagaactgggcgcactttccacatatccactttggactcatgccggatcaccaggggctcaagacgacaagcctgctacctcaggatcaccagagaaaggacgggcttcttaaggaagggctctacgcggcggcggcggcggccgcagctcatgcggcagccaacatggggattgctccatactaattaatttacaattactcctcctcaagcttgctactgatggtaccttgcttccgagaatctccctgatctttacattagcttgttaaacgttccaaatcacgtacgcatctgctgtgtaaacctgttccttcgatcgagctggtctctagtatatataatctactacgtttttgcgttggtta

SEQ ID NO: 3888 - DNA, 840 bp, Zea mays
  Clone ID: TF_LIB4740-008-R1-K1-D11
cccccgaggttggccgagagaggaaattgggctcacgccctccctaatccttcctatatagggcacaggagacatcgtcttgctcatccatatcgcttgctggctttgctttcttccttcctccctctagatctcgccttacaacaacgacgaacagcgggtacgtacttggagatccaagaagctaagaaatgtcagcccagtttgcatccgagcatgcttgctatgtcaactgcaactattgcaacactatcctgggggtgaatgtgccaagcagttgttcctacaacgtggtgactgttaaatgtgggcattgtacaatggtgctgtccatggatctcagtcccttccatcagcaggcacgcactgtcccagacaaccaggttgtccagaacagagggtttcaatataacaatttcgggagctacgagcaagcctcgtcaagaaatctacgaacgcctcccatgtatccagtgtcaaacaatctgccacaagtgccaccaatacgaccctcagagaagagacagcgtgttccatcagcatacaacagattcatcaaggaagaaatacaaaggataaagacgagcaacccagagattagccacagggaagcattcagtgctgcagcaaagaattgggctcatctccctcggctccatttcggcctcagcgtcgctgacggcggcggcggcagcaactagggaagacgatgattacggatcgagctcttcgccttacacatatatatatgcagtgtgctatgtcgtgcttggattttgaagccttattaagtgttttgacaacctgtgttttcagacctggtgcgtacttgcatgcatg

SEQ ID NO: 3889 - DNA, 1282 bp, Zea mays
  Clone ID: TF_ZmC31888_1
cattgggtacctcgaggccggccgggaagcatctcaatccaaaccagacaagcaaggaatcccccgatggatcatcgcgttctcctcctcctctctctcgcgtcggccgcgcgcgagttgccgccgccgtcgacgcggaggacccgctgatccgacagtgtgtttccctggtggatatgacaacgatctggagatgaacgcggagtcccgcttcctgagcttcgtgctagcgcgtcggggagtgctacaaggacgccgacgagcacgcggaccggctgtccgttttcaaggtcaacctgcgccgcgcgcggccccgaaaaaacctctttcaattcaaccatagacgacgacgaagacagtccattgggtacctcgaggccggccgggatcatatcgcttgctggctttgctttcttccttcctccctctagatctcgccttcacaacgacgagcggcgggtacgtacttggagatccaagaagctaagaaatgtcagcccagtttgcatccgagcatgcttgctatgtcaactgcaactattgcaacactatcctggtggtgaatgtgccaagcagttgttcctacaacgtggtgactgttaaatgtgggcattgtacaatggtgctgtccatggatctcagtcccttccatcagcaggcacgcactgtcccagacaaccaggttgtccagaacagagggtttcaatataacaatttcgggagctacgagcaagcctcgtcaagaaatctacgaacgcctcccatgtatccagtgtcaaacaatctgccacaagtgccaccaatacgaccctcagagaagagacagcgtgttccatcagcatacaacagattcatcaaggaagaaatacaaaggataaagacgagcaacccagagattagccacagggaagcattcagtgctgcagcaaagaattgggctcatctccctcggctccatttcggcctcagcgtcgctgacggcggcggcggcagcaactagggaagacgatgattacggatcgagctcttcgccttacacatatatatatgcagtgtgctatgtcgtgcttggattttgtaagccttattaagttttttgacaacctgtgttttcagacctgttgcgtacttgcatgcatgaatcctgcattgcgtgcagtaattaacatgtttgatgctatatatgatatatgcatgcatggtgtacaacattactaaataaatggaaaatatttgttcaaaaaaaaaaaaaaaaaagcggccaacattaaaaagcgcgccc

SEQ ID NO: 3890 - DNA, 996 bp, Zea mays
  Clone ID: TF_ZmC31888_2
cattgggaccctcgaggccggccgggtcgaatttatgccccgcttggccgcgcccttgtcgcatggttaaaaaaaaaaaaaaaaaaaaaaaaaaagacatcctctctctctctcttcctggccggtcgatccttctgttttgttttcctccacaaacctctttcaattccaccatagacgacgacgaagacagcgccgataagatctcgccttcacaacgacgagcggagggtacgtacttggagatccaagaagctaagaaatgtcagcccagtttgcatccgagcatgcttgctatgtcaactgcaactattgcaacactatcctggtggtgaatgtgccaagcagttgttcctacaacgtggtgactgttaaatgtgggcattgtacaatggtgctgtccatggatctcagtcccttccatcagcaggcacgcactgtcccagacaaccaggttgtccagaacagagggtttcaatataacaatttcgggagctacgagcaagcctcgtcaagaaatctacgaacgcctcccatgtatccagtgtcaaacaatctgccacaagtgccaccaatacgaccctcagagaagagacagcgtgttccatcagcatacaacagattcatcaaggaagaaatacaaaggataaagacgagcaacccagagattagccacagggaagcattcagtgctgcagcaaagaattgggctcatctccctcggctccatttcggcctcagcgtcgctgacggcggcggcggcagcaactagggaagacgatgattacggatcgagctcttcgccttacacatatatatatgcagtgtgctatgtcgtgcttggattttgtaagccttattaagttttttgacaacctgtgttttcagacctgttgcgtacttgcatgcatgaatcctgcattgcgtgcagtaattaacatgtttgatgctatatatgatatatgcatgcatggtgtacaacattactaaataaat

SEQ ID NO: 3891 - DNA, 974 bp, Zea mays
  Clone ID: TF_ZmC31888_3
gggtacctcgaggccggccggggtcacaccaatcttgcccattggttgctgtagcctgtggcttggtctttccacctcttgcacactagatcagctgcactgtcctcccacaagacaactcaccagacacctttcctcctcccccctgaccccggcccattcagatctcgccttcacaacaacgacgaacggcggctacgtacttggagatccaagaagctaagaaatgtcagcccagtttgcatccgagcatgcttgctatgtcaactgcaactattgcaacactatcctggtggtgaatgtgccaagcagttgttcctacaacgtggtgactgttaaatgtgggcattgtacgatggtgctgtccatggatctcagtcccttccatcagcaggcacgcactgtcccagacaaccaggttgtccagaacagagggtttcaatataacaatttcgggagctacgagcaagcctcgtcaagaaatctacgaacgcctgccatgtatccagtgtcaaacaatcagccacaagtgccaccaatacgaccctcagagaagagacagcgtgttccatcagcatacaacagattcatcaaggaagaaatacaaaggataaagacgagcaacccagagattagccacagggaagcattcagtgctgcagcaaagaattgggctcatctccctcggctccatttcggcctcagcgtcgctgatggcggcggcggcagcaactagggaagacgatgattacggatcgagctcttcgccttacacatatatatttatgcagtgtgctatgtcgtgcttggattttgtaagccttattaagttttttgacaacctgtgttttcagactgttgcgtacttgcatgcatgaatcctgcattgtgtgccataattacatgctgatgctatatatgatatatgcatgcatggtgtacacattactaaataaatggaaatattttgcccc

SEQ ID NO: 3892 - DNA, 883 bp, Zea mays
  Clone ID: TF_ZmC31888_4
gttatccttctgttttgttttcctccacaatcctccgagaaggtcagaggaacggccgctacacgccctccctaatccttccatttatagggcacaggagacatcgtcttgctcatccatatcgcttgctggctttgctttcttccttcctccctctagatctcgccttcacaacaacgacgaacagcgggtacgtacttggagatccaagaagctaagaaatgtcagcccagtttgcatccgagcatgcttgctatgtcaactgcaactattgcaacactatcctggtggtgaatgtgccaagcagttgttcctacaacgtggtgactgttaaatgtgggcattgtacgatggtgctgtccatggatctcagtcccttccatcagcaggcacgcactgtcccagacaaccaggttgtccagaacagagggtttcaatataacaatttcgggagctacgagcaagcctcgtcaagaaatctacgaacgcctgccatgtatccagtgtcaaacaatcagccacaagtgccaccaatacgaccctcagagaagagacagcgtgttccatcagcatacaacagattcatcaaggaagaaatacaaaggataaagacgagcaacccagagattagccacagggaagcattcagtgctgcagcaaagaattgggctcatctccctcggctccatttcggcctcagcgtcgctgatggcggcggcggcagcaactagggaagacgatgattacggatcgagctcttcgccttacacatatatatttatgcagtgtgctatgtcgtgcttggaatttgtaagccttattaagtttttgacaacctgtgtataaaaaacccgtgcgtacttgcatgcatgaatcctgcatt

SEQ ID NO: 3893 - DNA, 779 bp, Zea mays
  unsure (1)..(779): unsure at all n locations
  Clone ID: TF_ZmC31888_5
actcaccanacacctttcctcctcccccctgaccccggcccattcaggttattatcctctctctctctcttctttcttggtatccttctgttttgttttcctccacaaacctctttcaattcaaccatagacgacgacgaagacagcgccgagaagatctcgccttcacaacaacgacgaacagcgggtacgtacttggagatccaagaagctaagaaatgtcagcccagtttgcatccgagcatgcttgctatgtcaactgcaactattgcaacactatcctggtggtgaatgtgccaagcagttgttcctacaacgtggtgactgttaaatgtgggcattgtacaatggtgctgtccatggatctcagtcccttccatcagcaggcacgcactgtcccagacaaccaggttgtccagaacagagggtttcagtataacaattttgggagctacgagcaagcctcgtcaagaaatctacgaacgcctcccatgtatccagtgtcaaacaatcagccacaagtgccaccaatacgaccctcagagaagagacagcgtgttccatcagcatacaacagattcatcaaggaagaaatacaaaggataaagacgagcaacccagagattagccacagggaagcattcagtgctgcagcaaagaattgggctcatctccctcggctccatttcggcctcagcgtcgctgacggcggcggcggcagcaactagggaagacgatgattacggatcgagctcttcggcttaacatatatatatgca

SEQ ID NO: 3894 - DNA, 897 bp, Zea mays
  unsure (1)..(897): unsure at all n locations
  Clone ID: TF_ZmC7254_10
ctcagcacgctcctcttctgctaccttgctttccctgctgcgatccgttccttgccctattagtattagctacgcggccggccggatcgacgatcgagcaaggagaggcgccccagcagtcctcgtcggatcgatccatctcgtcgacagcgtcagcgcctcaggtggatcggagcggaggtggtggaccgggagctagtagctgccacacatttcggtcttcgaaaccacatatcatgatgtcgtcctcgtcctcgtcgtcggccgcctgctgcttcccgctggaccacctcgcgccgtcccccaccgagcagctctgctacgtgcactgcaactgctgcgacaccatcctcgccgtcggcgtgccctgcagcagcctgttcaagacggtgacggtgcgctgcggccactgcgccaacctactctccgtcaacctccgcggcctcctgctcccgcccgccgcgccggcgccgcccaaccatctcaacttcgctcactccttgctgtcacccacatccccgcatggcctcttggacgagttggctctccagcaggcgccgagcttcctgatggagcaggcgagtgccaacctgagcagcaccatgacgggccgcagcagcaacagcagctgcgccagcaacctgccgccgccggcgccgatgccggcagctcagcctgtgcagcaggaagccgaactgcccaagaccgccccgtcggtaaacaggcctccggagaagcggcagagagtcccgtcggcatacaaccggttcatcaaaggacgagatccagcgcatcaagggcggcaacccggacatcacccacccgnngaggcgttcagcgcagcccgcaaagaattgggcccatttcccacacatccacttcggcctcatgccggac

SEQ ID NO: 3895 - DNA, 1423 bp, Zea mays
  Clone ID: TF_UC-ZMFLB73131H04_FLI
acaaatatatttcaaaggtcttgttggatcattgcgactaggaggttgtctcatatacacctcttcttcaagcacccaatgcaaagaatgcattctgaatgcctatttgtttcatgctccatatttgagagattacaagtgataggatgactctgattgttgttggtttgataactggacaaaatgtatcaagataatcaatagcatacttttgctttgtgacaagtctagctttaagtctatgcactaaattaaaccatcaacctttctcttcactttgaaaaccatctactatcaatgagatctattcctttccattatggaagcagctcccatgtgtgattcctcttttgcatcttgtttttgacaaaaatcagaggtaaagggtatgatatatcatcaacacctagaagttcattgtgtagcgtgtggtcatgcttatttgttttgtgcttgcattctactctttatattgaaaatcataatttaaaatgtgaaaatgcactacataagtgaattgtcattgcgagtaaaattaatatgatcaagttcaataaccatgtgaagtgttgttaaaaacatctagtttccaaatgtgaatacatcaaacatgggcgaatgtgttcttataaatttctctaaaaaataagacgagatgataagtattccaaattcatatatacctcatgctagctcttctatttttggaacctctgtctaatataacacaaaagaattttttcctaatgtttaagccttcccttggttggtgtgaggtgttcatgaaggggtttcatgtggtttgcatagtatactttgcaattgtattgactattatttaactatattagagtgcttttgaacaaagggagttttgtaaaatatgtatatctatgatgtatatatgtcctaataataatttcatatgtccgatgtttgtaataaacaacagctccagagaagaggcagcgtgttccttcagcatataacagatttattaaggaggagatacgaaggattaaagcatgtaacccggacataagccatagggaagccttcagcactgcagcaaagaattgggcacattttccgaatattcattttggtctagggccctgtgaaagtagcaacaatcttgatgaggccaccggtgcaatgtgccatccccagaaagtccaagatctctactaagacctatatcagcactgccctttgtttcctcttagttctggactagttggtgagtgccatatatatatgcatgagtgtgatatgatcatgaggtaaggaattatgattaagatgatatatatgtacgagatgaacatgcccctaggttcatgaaagactaaataaggatcgtcatctcaccatgttatcataggtagtaactattgtttgaaataaattatcctttgtgtgc

SEQ ID NO: 3896 - DNA, 943 bp, Zea mays
  Clone ID: TF_ZmC21266_2
cgctgctttcagatatctcaccggaccgtcgtcgtcggcccctccgagaacataccaccgcgcccgccgccgcgcgcgccaccacgtccacgtacgccggccggccaccaagcaagcatggatacggtttcacagtccgagcacctgtgctacgtccgctgcacctactgcaacaccgtgctcgcggttggggttccatgcaagaggctcatggacacggtgactgtcaagtgcggccactgcaacaacctctcctacctcagtccacggccccccatggtgcagccgctctcgccgactgatcatcccttggggccattccagtgtcagggaccctgcagtgagtgcaggaggaaccaaccgctgccgctggcctcgccgacatcgactgacctcaccccgagaatgcccttcgttgtcaagcccccggagaagaaacatcgcctcccatctgcttacaatcgcttcatgagggaggagattcagcgcatcaaagctgcgaagccagatatccctcacagggaggccttcagcatggctgccaagaattgggcgaagtgtgacccgcgctgctcgacgactgcctctactgccacttctaacagcgctcctgagcctgctagagtcgtcgtgcccactcctcatgtaactgagccacgctttgatctggaggatagggccaaggagcatgtcattgagagcttcgacatcttcaagcagattgagcgcaacatctagatgtctccatttcgagtaccatcagctctatatataacctatgcatgcatatgcatccccatcttgtactttttacccccatgttactgttgctattattcttgctcttgttggattgtacgcaccctttaattgacagttgctaccctatataatgtttgccatcttatatattgtcgtcgttccttatatagggttatgatcc

SEQ ID NO: 3897 - DNA, 803 bp, Zea mays
  Clone ID: TF_ZmC21266_3
tgggggccccctcgaggccggccaccagcaagcagcatggatacggtttcacagtccgagcacctgtgctacgtccgctgcacctactgcaacaccgtgctcgcggttggggttccatgcaagaggctcatggacacggtgactgtcaagtgcggccactgcaacaacctctcctacctcagtccacggccccccatggtgcagccactctcgccgactgatcatcccttggggtcattccagtgtcagggaccctgcagtgagtgcaggaggaaccaaccgctgccgctggcctcgccgacatcgactgacctcaccccgagaatgcccttcgttgtcaagcccccggagaagaaacatcgcctcccatctgcttacaatcgcttcatgagggaggagattcagcgcatcaaagctgcgaagccagatatccctcacagggaggccttcagcatggctgccaagaattgggcgaagtgtgacccgcgctgctcgacgactgcctctactgccacttctaacagcgctcctgagcctgctagtagagtcgtcgtgcccactcctcatgtaactgagccacgctttgatctggaggatagggccaaggagcatgtcattgagagcttcgacatcttcaagcagattgagcgcaccatctagatgtctccatgtcgaaatggtgcggtagcccaggatcgagtaccatcaccatcctgtactttttaccccccatgttactgttgctattattcttgctcttgttggattgtacgcaccctttaattatggacagctgctaccct

SEQ ID NO: 3898 - DNA, 1362 bp, Zea mays
  Clone ID: TF_ZmC13380_5
aaaccgaaaagaaaagaggaaagtgggtcagctcaatctcttcttcgtcattcctctcctgtaggttctctctctctccctccctccctcccgcagcacacataaactcgagatacatatatatcagtaggatggatgtgcaaacctagcctgctgcctttgtagctgcaaattaaactgagctgtacctgttggccttcctcctcgctcctcttggttctcgctggttgccgggagctggggtcgagagtacttctgttgttcgcacggcgaggcggcggcggagaccggtcagaaggaatgtcttcgtcccaaatcgcgccggcagatcatgtgtgctatgtgcactgcagcttctgcaacacagttctcgcggtgagtgtcccggggaatagcatgctcaacatcgtgacagttcggtgtggacactgcgcaaatctactgtcagtgaacctgagagcactgacgcactcactcccagaacaagatcatcagctccaggagaacatcaaggtccatggcatcaacggcactttgcatgatgatcatcagtgcggccatttggatcagctcggttcttcttcgtcgtcaaggttccggcggcttccagtgatgtgttcgccacagaacgggcagcacctgctgcaggagaaaacacttaacaacaatgctcgtcgtaaggctcccttccacgtacacgccgacgaccatgcatatgcatgcctcaatttgcataatcttctttttttagcttaattagcatatccacatgcatgcaatcatacgccaaataatgataattaactgtactacgtcggtcgaccttgcttcgaactaaatgcgccgcgcgcagctccagagaagaggcagcgggttccgtcggcgtataacagattcatcaaggaagagatacgcaggatcaaagcgaacaactcccgacattaaccacagggaagccttcagcacggcagccaagaatgtaagtaaagcctttttctagctagctggctaattgctatagtacgtacttgtcgtcgtgggcgcctgaattggttgttttacatatatatacactacgtacgaccgttgttgcatgcagtgggcacattatccaaacatccatttcggtttagacgactccgggcgagagggcaagaagaagctcgtggatcatgaggcggcggcgtctgtcgtcgcagtcgcagcagcaccgacagctgctaaaaagatccagggtttctactgatggtagcagatagatgtgtagattgattgatacatcatcggccgggtggaagaattgataccaaaaaaaaaaaaaaaaaaaaaaaaaaaaaagtactctgcgttgttaccactgct

SEQ ID NO: 3899 - DNA, 700 bp, Zea mays
  Clone ID: TF_ZmC32886_1
cctccatcccccccactcccccctcctgcgcccgaggcctagcgccggcagcccgggcccccagctgctacagcaacgcctgcccgccgccgcgatccccagcggcaggaacgggctgcacccgcacccgccccagccccagccccagccgcccgcagcgggtaaaggggccaaagagccgtcgccgcgcgctaactccgccatcaacagacctccggagaagaggcagcgcgtgccgtcggcgtacaaccgcttcatcaaggacgaaatccaacgcatcaaggctggcaatcccgacatctcgcacagggaggccttcagcgcggcggccaagaactgggcgcactttccacacatccactttggactcatgccagatcaccaggggcccaagaagacaagcctgctacctcaggatcaccagagaagcgacggcggcgggctactaaaggaagggctgtacgctgcggcagccaacatgggggttgctccatactaatataataataatcactcctacttacgtgctcaagcttataatattagagtagcaaagctgctacgtactgttagggctctatggactactacgaagctatggacgtgtttggtaggctgcatatgggccggccaggctggtaagatacagcgtacgcttgtttggttgctaaaaaaaaaaaaaaaaaaaaaaaaaccgatt

SEQ ID NO: 3900 - DNA, 785 bp, Zea mays
  Clone ID: TF_ZmC13380_4
cccgggcttttttttttttttgcaatttcttggttgaaatgagatagcggctcctgagaagaggcagcgggttccgtcggcgtataacagattcatcaagtgagctcgctcgatgatcgacgacctcctcagatcagcagcttacgtttggttcattctaccaaataattaaacgctgtgtacgtgtgtgcagggaagagattcgcaggatcaaggcgaacaaccccgacattagccacagggaagccttcagcacagcagccaagaactgggcacattatccgaacatccatttcggcttaaactccggccgagagggtggcaagaataagctcgtggacgaggctgtcgcggcggtggcggtggctccgaagaagatccaaggtttctactgatcgatgccggtcgatcgagggatcagcgctcgtcgtcatcaactggccggccgggtgtggaagaattaataataccacacaaattataaatgtactgtgatgagtaaattaaagagttatagtggggaatgaagggagagagagatatatagcaatacgtatattaccttaccttattaatgagtgcaaaaaaaacacttgtgaagggagagagagatatatagcaatagtggcgcgtactgatgcatgagtgggaagtgaagcatcatacaatcacatgaattatattgctactggcatggcgtgggcgccatgcatggtttaaattaaccgagaagacgacttaataaatcattatttgacctgaaaaaaaaaaaaaaaaaagcggcc

SEQ ID NO: 3901 - DNA, 2075 bp, Zea mays
  unsure (1)..(2075): unsure at all n locations
  Clone ID: TF_ZmC13380_2
atttcgatctgccagatctagacatatataccctccacgcgtccggcatttcccctctctccagcacattgctgcttccacagttccacacacataaggccaccacagcaaataaaggcactgctgcactctctctctctctctctctctctctctctctctacgcgaaaagaaaagaggaaagtgggatagctcaatctctccttccacgcgtcctcagttctcactctagcgctctctctccctcgctctctctctacacatatatatcagtataggatggatgtgcaaacctagcttgctgctgcctttctagctgagaactgagctgtagctgttggtacggttttcctcctcgctcttcttctcctccttcttgctgctggttgccgggagctgagatcgatcgagagcactgctgttgttcgtgcggccggcggcggcggcgcgcggcagtgggcggagacgacgaccgatcggtcagaaggaatgtcgtcggcccaaatcgtgccggcggaccatgtgtgctatgtgcactgcaacttctgcaacacagttctcgcggtgagtgtcccggggaacagcatgctcagcatggtgacagttcggtgtgggcactgcacaaatctactgtcagtgaatctgagagcactcatgcactcagtcccagaacaagatcagctccagggagaacatcagggtccatggcacgttgcgtgagcatcatcagtgcggcggcggccaccatctggagctgggctcttcgtcgtcctcaaggttccggctgccgatgatgatgtcgtacgcgccgcagaacgagcacttgctgcaggaacagacactgaacaacgctcgtccggctcctgagaagaggcagcgggttccgtcggcgtataacagattcatcaaggaagagattcgcaggatcaaggcgaacaaccccgacattagccacagggaagccttcagcacagcagccaagaactgggcacattatccgaacatccatttcggcttaaactccggccgagagggtggcaagaataagctcgtggacgaggctgtcgcggcggtggcggtggctccgaagaagatccaaggtttctactgatcgatgccggtcgatcgagggatcagcgctcgtcgtcatcaactggccggccgggtgtggaagaattaataataccacacaaattataaatgtactgtgatgagtaaattaaagagttatagtggggaatgaagggagagagagatatatagcaatacgtatattaccttaccttattaatgagtgcaaaaaaaacacttgtgaaggtttctactgatgcatgagtgggaagtgaagcatcatacaatcacatgaattatattgctactggcatggtgggcgccatgcatggtttaaattaaccgagaagacgacttaataaatcattatttgacctaccaaaaaaaaaaaaaaaatcatgcatatgcacacacacagcatggcagctagcaatctatccacctcttggccttttgtgtgtgtacgtctgcatgggctaaacacacatgcatatactcaatcattgttgttagctaggggtcatccatggactttgtttattcattgtttttgggagtgggcgccgagaaagatagatggtgagcagataatatcagactgagccatgattttagcctgcactatcagatatgattgtgtgtgtacctatactcccaaagagagaaaaggaaagggaaacaggagcacaaaaagtgatcggcatgcagggtgttaggaaagtgagaaaccatcagcaggcagcaacagcaacgagcgtctgataaaagtcatacactggaccagcagcagcagcttgttgatgcagctagctgcttaaagtagtgacaaactgacaacaacaaaagtagggctagaaaagctactacctggtgtgaaatctctctctagtcctttccgatctaccgtgatctttgatttcgnttatttctctctctcttctttttttttttggtttgggttcatcacaacttttccgatctaccgnggatctttaaattttttt

SEQ ID NO: 3902 - DNA, 1154 bp, Zea mays
  Clone ID: TF_ZmC13272_2
cctcgaggccggccgggactacttctttctctctctctcaccacacacagacacaaataaaagaaatcagtagttcgatttctcccgggacctttatttacacatatctctgtatttacaaattaggttgttgatgtaggctgtacgcacctgctagtttgctactcgatcctatatatcgtccaatcctatctgacctctcgacatctggtccttgattactcgtcctttttgcttggttatatcgtcgccccggccgcttgagctagcttcctctagttctcgcgctcgtcgtcgatcggttgtttgcatagcccacggcgagccgaaggaataatgtcgtcggcgcccctgcagatcgcgccggtgccggagcatgtgtgctacgtgcactgcaacttctgcaacacaattctcgcggtcagtgtcccgagtcacagcatgctgaacatcgtcacagtccgttgtgggcactgcactagcctgctgtcggtgaacttgagaggactcatccaatcacttcctgtccagaaccaccactactcccagcagcaggagaatttcaccgtccaaaatatgggttttactgaaaattaccctgagtacgcaccttcgtaccgcatgccaacgacgctgtcagcgaaaggtgatctggatcatatgctgcacgtgcgcgctccagagaagaggcagcgtgttccttcagcatataacagatttattaaggaggagatacgaaggattaaagcatgtaacccggacataagccatagggaagccttcagcactgcagcaaagaattgggcacattttccgaatattcattttggtctagggccctgtgaaagtagcaacaatcttgatgaggccaccggtgcaatgtgccatccccagaaagtccaagatctctactaagacctatatcagcactgccctttgtttcctcttagttctggactagttggtgagtgccatatatatatgcatgagtgtgatatgatcatgaggtaaggaattatgattaagatgatatatatgtacgagatgaacatgcccctaggttcatgaaagactaaataaggatcgtcatctcaccatgttatcataggtagtaactattgtttgaaataaattatcctttgtgtacagtttta

SEQ ID NO: 3903 - DNA, 1462 bp, Zea mays
  Clone ID: TF_ZmC7254_8
ccggccggatcgatcgagcaaggaggggcgccccagcagtcctcgtcggatcgatccatctcgtcgacagcgtcagcgcctcaggtggatcggagcggaggtggtggaccggagctagtagctgccagccacacatttcggtcgtcggaaccacatatcatgatgtcgtcctcgtcctcgtcctcgtcgtcggccgcctgctgcttcccgctggaccacctcgcgccgtcccccaccgagcagctctgctacgtgcactgcaactgctgcgacaccatcctcgccgtcggcgtgccttgcagcagcctgttcaagacggtgacggtgcgttgtggccactgcgccaacctactctccgtcaacctccgcggcctcctgctcccgcccgccgcgccggcgccgcccaaccatctcaacttcgctcactccttgctgtcacccacatccccgcatggcctcttggacgagttggctctccagcaggcgccgagcttcctgatggagcaggcgagtgccaacctgagcagcaccatgacgggccgcagcagcaacagcagctgcgccagcaacctgccgccgccggcgccgatgcctgcagctcagcctgtgcagcaggaagccgaactgcccaagaccgccccgtcggtaaacaggcctccggagaagcggcagagagtcccgtcggcatacaaccggttcatcaaggacgagatccagcgcatcaaggccggcaacccggacatcacccaccgggaggcgttcagcgcagccgcaaagaattgggcccatttcccacacatccacttcggcctcatgccggaccagggcctcaagaagaccttcaagactcatcaggatggcgctgaagacatgctactcaaagacgatctctacgccgcagcggctgcagctgcagcagccaacatgggcatcactccattctaataactctggttaggcatgtgttctgaatcagctggcacgtcgtagtggctatcgccctttgtgctgcattctagggtttcgtctcagatcttgatctcaacatcgatcgtgtgtcgtttaattagggtactttccagtgtggggatagaaatggagaataatcaagttagagcgcgcatcaagtaggccactgatgatccgtaggtacagacttgattgtctcctctatatatcccttttcatttcatgttctctctctttttcctattttttgttcctggaccccttcaactcgccagtagagagctcgttgtgcctctccaatcccatgtttgcgtatgtctgctcaacaacatgtttttaccatggagaacaagttgaacatctgttagatctatcaagagtgtcatatatatgttccatcgtcctttaccatgtacttctactactactatgtggtttctttcaacatatagggttatattgcgttgcgaaaaaaaaaaaaaaaaaagcggcc

SEQ ID NO: 3904 - DNA, 1160 bp, Zea mays
  Clone ID: TF_ZmC21266_1
cgaactgggtctgaccggcagcggtgcggcgctcgagcaggccggggggggatctatctgtctgcccgtggcgtgctccactgattcttcttcttcttctacctcccggcctcctcccccttcttctttgcctgccttattagtatctcgcctcacaccacacagctagcagacagccagacacgcgctgctttctgatctctccccggatcggaggctcctcccaacataccaccctgccagccgcgccgccacgtccacgccggccggccaccaagcaagcatggatatggtttcgcagtccgagcacctgtgctacgtccgctgcacctactgcaacaccgtgctcgcggttggggttccatgcaagaggctgatggacacggtgactgtcaagtgcggccactgcaacaacctctcctacctcagtccacggccccccatggtgcagccgctctcgccgactgatcaccctttggggccattccagtgtcagggaccctgcaacgactgcaggaggaaccaaccgctgccgctggcttcgccgtcatcaactgagctaagcccgagaatgcccttcgtagtcaagcccccggagaagaaacaccgcctcccatctgcttataatcgcttcatgagggaggagattcagcgcatcaaagctgcgaagccagatatccctcacagggaggccttcagcatggctgccaagaattgggcaaagtgtgacccgcgctgctcgacggctgcctctaccgaaacttctaacagcgctcctgctgagcctagagttgtgcccactccccagttaactgagccacgctttgacctggaggatagggccaaggggcaagtcattgagagcttcgacatcttcaagcatattgagcgcagcatctagaggtcgttcgatgccgctgttgtagcccagtatcgatcgagtaccatcagctatatgtataacctatcccgtatcgccgtcgtcgcctcgcaatcatgcatccccatcctgtacttttacccccgtacgtgttactgttgctgttattctcgttatggttggattgtacgcaccatttaattatgaacagctgctacctatatatataatatttgccttcttttttgttcctaaaaaaaaaaaaaaaaaaacgagagta

SEQ ID NO: 3905 - DNA, 965 bp, Zea mays
  Clone ID: TF_ZmC21266_4
aagcatggatatggtttcgcagtccgagcacctgtgctacgtccgctgcacctactgcaacaccgtgctcgcgctgcaggttggggttccatgcaagaggctgatggacacggtgactgtcaagtgcggccactgcaacaacctctcctacctcagtccacggccccccatggtgcagccgctctcgccgactgatcaccctttggggccattccagtgtcagggaccctgcaacgactgcaggaggaaccaaccgctgccgctggcttcgccgtcatcaactgagctaagcccgagaatgcccttcgtagtcaagcccccggagaagaaacaccgcctcccatctgcttataatcgcttcatgagggaggagattcagcgcatcaaagctgcgaagccagatatccctcacagggaggccttcagcatggctgccaagaattgggcaaagtgtgacccgcgctgctcgacggctgcctctaccgaaacttctaacagcgctcctgctgagcctagagttgtgcccactccccagttaactgagccacgctttgacctggaggtactgcaaagccttctcccttcactcttctctgtagacaaataagcaagatttgaatatgctatgctatttcctatacgcacatgcatgcatgctgctcttgcaggatagggccaaggggcaagtcattgaaagttttgacattttcaagcatattgagcgcagcatttaaaggtcgttcgatgccgctgttgtagcccagtatcgatcgagtcccatcagctatatgtataacctatcccgtatgggggtggtcgcctcgcaatcatgcatccccatcctgtacttttacccccgaaagtattcaagttgctgttattctcgttagggttggattgtacgccccatttaattatgaacagctgctccctatatatataatatttgccttttttttgttcct

SEQ ID NO: 3906 - DNA, 569 bp, Zea mays
  Clone ID: TF_LIB3596-045-Q6-K7-A8
ccgggttcgacccacgccgtccgatcgggttctcggcggcgtctaacaggttcatgcacggaagattgcgccaggatcaaagcgagacaaccccgacattaagcacagggaagcctttagcacgggagccaagcattgggcacgttatccaaacatacatttcggtttacacgactccgggcgagagtggcaagcaagaaactagcggatcatgaggcgggggtgtctgtcgacgcagtcgtagcaagactcaactgctgctaaaaagatacagggtttttactgatggctgcagatagatgtgctaatggactgatgcatagtcgaccggttggaagaatggataccacatacactgctttaaaaatatgtacttgtgagtaaacagtgaaaatataacttgtgagatgtaccgtacatatgatagaggtagctaggatgcgtgtcctagagctgggaacagtgaagcatatgttgtaaccagaaacatcacatgaattgctattgggcgccatgtctatgcacttaattatattggttgaggagacctagttctcattggtcctgcc

SEQ ID NO: 3907 - DNA, 638 bp, Zea mays
  Clone ID: TF_LIB4828-125-R1-N1-C9
ccggccgggatctggtccttgattactcgtcctttttgcttggtgcctgtgtatatcgtcgccccggccgcttgagctagcttcctctagtgctcgctctcgtcgtcgatcggttgtttgcatagcccacggcgagccgaagcaatgtcgtcggcgcccctgcagatcgcgccggtgccggagcatgtgtgctacgtgcactgcaacttctgcaacacaattctcgcggtcagtgtcccgagtcacagcatgctgaacatcgtcacagtccgttgtgggcactgcactagcctgctgtcggtgaacttgagaggactcatccaatcacttcctgtccagaaccaccactactcccagcagcaggagaatttcaccgtccaaaatatgggttttactgaaaattaccctgagtacgcaccttcgtaccgcatgccaacgacgctgtcagcgaaaggtgatctggatcatatgctgcacgtgcgcgctccagagaagaggcagcgtgttccttcagcatataacagatttattaaggaggagatacgaaggattaaagcatgtaacccggacataagccatagggaagccttcagcactgcagcaaagaattgggcacattttccgaatattcattttgg

SEQ ID NO: 3908 - DNA, 1744 bp, Zea mays
  unsure (1)..(1744): unsure at all n locations
  Clone ID: TF_ZmC13380_1
cgcagaacgagcacgtgttgcaggaccggacactgagcaacgctcgtccggctcctgagaaaaggcagcgggttccgtcggcgtataacagattcatcaagtgagctcgccctatgatcgncgtcctcagatcagcagcttacgtacgtttggttcatttcggcccaataattatgggcctcgaggccggccgggacaacaaataaacgcactgctgcttgccagtattgctttgctttgctttgccttgcttgcccccacacgccctctctctcctctctctctctcaaaccgaaaagaaaagaggaaagtgggatagctcaatctcttcttccttcgtcattcctctcccgtaggttctctctccctccctccctccctccctcagcacacataaactcgagatacacatatatatcagtaggagaggatggatgtgcaaacctagcctgctgcctttgtagctgcaaattaaattgagctgtacctgttggtcttcctcctcgctcttcttggttctcgctggttgccgggagctgggatcgaaagtactgctgttgttcgcacggcgaggcggcggcggagaccggtcagaaggaatgtcttcggcccaaatcgcgccggcagatcatgtgtgctatgtgcactgcagcttctgcaacacagttctcgcggtgagtgtcccggggaatagcatgctcaacatcgtgacagttcggtgtggacactgcgcaaatctactgtcagtgaacctgagagcactgatgcactcactcccagaacaagatcatcagctccaggagaacatcaaggtccatggcatcaacggcactttgcatgatgatcatcagtactgcggccatttggatcagctcggttcttcttcgtcgtcaaggttccggcggcttccagtgatgtgttcgccacagaacgagcagcacctgctgcaggagcaaacacttaacaacaatgctcgtcctccagagaagaggcagcgggttccgtcggcgtataacagattcatcaaggaagagatacgcaggatcaaagcgaacaaccccgacattaaccacagggaagccttcagcacggcagccaagaattgggcacattatccaaacatccatttcggtttagacgactccgggcgagagggcaagaagaagctcgtggatcatgaggcggcggcgtctgtcgtcgcagtcgcagcagcaccgactgctgctaaaaagatccagggtttctactgatggtagcagatagatgtgtagattgattgatacatcatcgaccgggtggaagaattgataccacaaaaactgctttatatatatgtactgtgagtaaacagttaaaattaaacttgtgagatgtaccgtacatatgaagagctagctagtagtgagtcataaagtgggaaagtgaagcatatatagtcgtaaaaacaatcacatgaattgctattaggcaccatatatatgcacttaattatattggttgaggagacctaataaatcatttgacctaccatacaaaaaaaaaaaaaaaaaacccgcggccctttgagacaatgcaggcagaaaaaagtgaggttagtacgcagcttcagctgatgagctataagagttaaaggggggaatgaaggagagagagattttttacgtttttaccttacnnnnnnnnnnnnnnnnnnnnnnnnnnnnnnnnnnnnnnnnnnnnnnnnnnnnnnnnnnnnnnnnnnnnn

SEQ ID NO: 3909 - DNA, 804 bp, Zea mays
  unsure (1)..(804): unsure at all n locations
  Clone ID: TF_ZmC151488_1
ccggccgggctagcactccctcccgtgcacacccatccactcgccgcccaagcccttagcttcctgcccaacgctgctgcgcttcacgctccatcgcccctcatccaataactccaacaaagaccgggttgcttcgagctgcacacaacagaagaagcacgcccatccgcggctcttgcttcttttggcgctatgatgtcgtcggcgccggaggagacgttgttcaacctggaccagcagcagcctccgccggcggagcaggagcagatctgctacgtgcactgcagctactgcgacaccatcctcgcggtgggcgtgccgtgcagcagcttgttccagacagtcaccgtgcggtgcggccactgctccaacctgctctacgtcaacctccgcgccctcctgctgccggcggcggcggccaataaccagctaccacccttcggccagcctctcctctcccccacctccccgcacggtctacttgacgctgaggcgatgtcgttccaggcgccgagcctgccgggtgctgaaccgccgagcgcttgcgtgagcggcgtcacgagcatcaacaacacgtgcggtggcaacaccaccacgtcgtcggccatgtcgtccatggcgccgccaccggccaaacatgcactgcaggaggcgcagcagctgcccaggaccgcggcgtcggtgaacagaacttcagagaagcggcagagagttccttccgcgtacaaccgtttcatcaaagatgaaatccagcgcatcaaggccagcaatccngacatcactcacagggaagctttcagcgcg

SEQ ID NO: 3910 - DNA, 682 bp, Zea mays
  Clone ID: TF_LIB4744-101-A1-K1-B10
cctcgaggcggccgggaatccatacaaaagaatggtttgcttccttcctttctccctctatatctcgccttctcctcgaccagcggagggtacgttgttgccgatccacgaaccgacacttgtcatgccagtatgcatccgaacatgcttgctatgtcaactgccactattgcacactatactggtggtaaatgtcccaagacagctgttcctacaacgcccctgactgctaaacgtgcgcttcgtacaaaggggctgctactggatctcagtcccttccatcaccccccactaactgtcccacacaatgaagttgctcacaactgaggcctcgaataacctttccttagtactaacaacccataagccagcaaatctatccacacgccctcccagtgtgatccacgtgtccgaacacatctgccacaattgccacccttacgaccctcatagaaaacacccactgctccatcatgatacaactcattcctctactgctaaccacgaaggctaaagacaagccacccagagattagccacagggaagcattccgtgctgcaacgaagaattggcctcatctacctcatactccatttcaggctcatcgtatgtgaccatcggtagggtaacaactagcaaagacaatgattacgtatcgatctcttcgacttaccatatata

SEQ ID NO: 3911 - DNA, 761 bp, Zea mays
  Clone ID: TF_LIB4975-011-R1-K1-D11
atcctcaccgcggactctcctcatcccttccccgatctctcaccacgctcctcttctgctaccttgctttccctgctgcgattcgttccttgctctattagtattagctagccggccggccggatcgatcgagcaaggagaggcgccccagcagtcctcgtcggatcgatccatctcgtcgacagcgtcagcgcctcaggtggatcggagcggaggtggtggaccgggagctagtagctgccacacatttcggtcgtcggaaccacatatcatgatgtcgtcctcgtcctcgtcctcgtcgtcggccgcctgctgcttcccgctggaccacctcgcgccgtcccccaccgagcagctctgctacgtgcactgcaactgctgcgacaccatcctcgccgacgagttggctctccagcaggcgccgagcttcctgatggagcaggcgagtgccaacctgagcagcaccatgacgggccgcagcagcaacagcagctgcgccagcaacctgccgccgccgccgccgatgccggcagctcagcctgtgcagcaggagcccgaactgcccaagaccgccccgtcggtaaacaggcctccggagaagcggcagagagtcccgtcggcatacagccggttcatcaaggacgagatccagcgcatcaagggcggcaacccggacatcacccaccgggaggcgttcagcgcagccgcaaagaattggggccatttcccacacatccacttcgggctcatgccggaccagg

SEQ ID NO: 3912 - DNA, 605 bp, Zea mays
  Clone ID: TF_LIB4073-012-Q6-K1-G12
cggacgcgtgggcggacgcgtgggcacaaacacacacaaatcagtagttcaatctctcctctcagctttacatctctgtatttacaagctgtttgcacaacccaaggcgagaagagccgaaggaatgtcggcccagcagatcgcgccggtgccggagcatgtgtgctacgtgcactgcaacttctgcaatacaattctcgcgctccagagaagaggcaacgtgttccttcagcatataacagatttattaaggaagagatacgaaggattaaagcaagcaacccagacataagccacagggaagccttcagcactgcagcaaaaaattgggcacattttccaaacattcattttggactagggccctatgaaagtagcaacaagcttgatgaggccattggtgcaacgggccatccccagaaagtccaagatctctactaagacctatatccacatcgtcctttgttttcctattgtaagtaatttgagataaaatgtatcttagttgtgtactagtttgtgagtggcgtacatatatatagatgagtgatatgatcatgatgtaaggaaataagacgtatatatatgtacgagaagaacatatc

SEQ ID NO: 3913 - DNA, 717 bp, Zea mays
  Clone ID: TF_LIB4703-004-R1-K1-F7
ttgatgacgacgagcgctgatccctcgatcgaccggctttgatcagtagaaaccttggatcttgttcggagccaccgccaccgccgcgacagcctcgtccacgagcttattcttgccaccctctcggccggagtttaagccgaaatggatgttcggataatgtgcccagttcttggctgctgtgccgaaggcttccctgtggctaatgtcggggttgggcgccttgatcctgcgaatctcttccttgatgaatctgttatacgccgacggaacccgctgcctcttctcaggagccgctatctcatttcaaccaagagattgcaaaaaaagatatgaaacaaagcagtcaaaacgcacgcatcgacttacgcatgcatgattgcatgtaattaatatatagcaaacaaaacaagaaacgaaacttacgacgagcgttgttcagtgtctgttcctgcagcaagtgctcgttctgcggcgcgtacgacatcatcatcggcagccggaaccttgaggacgacgaagagcccagctccagatggtgcccgccgccgcactgatgatgctcacgcaacgtgccatggaccctgatgttctcctgctggagctgatcttgttctgggactgagtgcatgagtgctctcagattcactgacagtagatttgtgcagtgcccacaccgaactgtcaccatgctgagcatgctgttccccgggacac

SEQ ID NO: 3914 - DNA, 578 bp, Zea mays
  Clone ID: TF_LIB4744-099-A1-K1-A7
ttgctacttccgctgtacctactgctacatttccgttcgctgctgcaggtctggatctctactgcaacaatgtgatggacacgatgactgacgagtgcggccagtgctacaacctctcctacctcacataacgatcccgcatggcgcagacgctcatctcgactgatcacccgttattgccataccagaggctaggaccctgcaacgactgccggaggaatcaacctctgccgttgtgttcacacatgtcatctgatctaactcggagaatggcctttcgatgccatccacaacacaaaagacatcgtcttccatctggtcataatctatgcatgacggactatattcaacgtatctcagctgactggccacatatccctcactgggaggccttcaccatggatgttcacaattgagctaaatatgaccttcactgatccacgactgcttctacttactgttctaacgactgtcctgctgacactaaaggagtgtgctctccccaacttcctgacccatgctttgatctgacactagactctcccatgcgcaactcattagtatagcttatcacatct

SEQ ID NO: 3915 - DNA, 1600 bp, Zea mays
  unsure (1)..(1600): unsure at all n locations
  Clone ID: TF_ZmC1397_2
cgggatggtctacaaccgtatgcgtactttatcagttaactgcccatgatctagcagtggtccaatgtttgtcctagactcctagggggaaaaaagatctgcactttgtgctgtgctgtttcttcttcttgttgttgttgtacgtagcgccgagatttcccagcaccgcttgcgatttagaaacccacagtttgttctttttcgtttaggggatggctgtacactgctgctgcttcttactaatgatagaaaggagaggtgaagttcgcagttgctgagatagacagatgatagaaggcaacgctagctaccgcgagggggaggaagatgagcaatcgggaaagcacggcatcaagcaagttgttgccttgtagttgtaggagtgtccttattgcgactttgtcaccctggtgacctgagcgctcccacgcggccatgtctgatgaattacggcggcccattcgctcccatcagcaaacacccacgaatggccaatcgttgcccagcagcagcgggcttcagtattcgtcaaccaaattgtcagagagagtccttttgcgccgcgcggatcgcatactanagaggaggttgagcggagtaggcggcggccagcaatgaaggtacagtgcgacgtgtgcacggccgaggcggcctccgtcttctgctgcgccgacgaggccgcgctgtgcgacgcatgcgaccgccgtgtccaccgcgccaacaagctcgcggggaagcaccgccgcttctccctcctgcacccgtgttcttcctcttcctcctccgccgcgcacaagccgccgctctgcgacatctgccaggagcggaggggcttcttgttctgcaaggaggacagggcgatcctgtgccgggagtgcgacgcgccggtgcacagcgccagcgacatgacgaggcggcacagccggttcctgctcaccggcgtgcgcctctcgtcagcgccggtggactctgcgggcccatccgaagaggaggagcaggagaacagccgcggcccctgcaacgacgaatcctgcagcagcggcagcggcgccggcggcgcgaccacggcgaccgccagcgacgggagcagcatctccgagtacctgaccaagacgctgcccgggtggcacgtcgaggacttcctcattgacgacgcgtccgctggcgacgtcggcgcctgctcggatggcctctatcagggacaaaatggacagatcagtggggtgctgcaagaagcttacctgccgtggacggagcgggagcaggtgcaaactgacgtcgcagacgagcgggccagctgggagcggtgggtgccacagatgcatgcggagttcggcggcggcggcaagcgacctagagcgtcgccttcgcctccctgttcgtactggtgattggtgaaaagttcgccgtcttcagcaagatgatttgtattgggctaattagtagagctactgtaggaacgaccgaaaaatgagccaaaaaagtaacggcctccatcgagctcgttttaaattattctctgcctaaagccaaactttcagaaaggagaacggtattttcctgttcgattaattaggtcgatttcgatcgaactcgttcc

SEQ ID NO: 3916 - DNA, 1694 bp, Zea mays
  Clone ID: TF_ZmC1397_1
gtacatgactgcattctgtcacctcgctcccagtgtgtgtgtatatatatcgtcctccgacactattgtatctgcagttccttcggttgctaacatctctagccgagacatttgacttggacaatctgctcatctaccactccggcactcccacgccgggccgcgcggatcgcatcgagtttgagtggagtaggcggcgggcagcgaatcagcgatgaaggtgcagtgcgacgtgtgcgcggccgaggcggcctccgtcttctgctgtgccgacgaggccgcgctgtgcgacgcgtgcgacgaccgcgtccaccgcgccaacaagctcgcggggaagcaccgccgcttctccctcctccacccctgttcgtcctctgcgcacaagccgccgctctgcgacatctgccaggagcggagaggcttcttgttctgcaaggaggacagggcgatcctgtgccgggagtgcgacgcgccggtgcacagcgcgaacgacatgacgaggcggcacagccggttcctgctcaccggcgtgcgcctctcgtcggcgccggtggactctgctgacccatcagaaggggaggaggaggaggagcaggagaacagcagcaggcccggcaacggtgagtcctgcagcggcggcgccggcgctaccacggcgaccgctagcgacgggagcagcatctccgagtacctgaccaagaccctgcccgggtggcacgtcgaggatttcctcgttgacgacgcgtacgccagcgacgtcggcgcctgctcatcagacgggctttatcaggtcagttcagttcttccatgcgaatggaactgcaagctttcactgaggcgttcctgagaacgccaagaacattattaaacttgtgcattgcgccgccatttgcacacagagccacagcggccaatgcgccataccggtctcgccgccggcgccggccatctatcgcgtcgccattaatcacggggcaggctgttgccatgctcacacctgcaaggccgagttgctggaccagtctgtcaggataatatctcgtggagaccacctagatacgatacgatacgatctgatgcaagcgaacatcatgtgctaaaccaataaaacaatggaaaaggcaaaaattcattaatttcatgtgtggaaccatggtctcacttggcgtgtggtcatttaacttgcatttttagcagggacaacaagatggacagatcagcggggtgctgcaagaagcttacatgccgtggacggggcgggagctggtgcccgctgacgtcgcagacgagcgggccaactgggagcggtgggtgccgcagatgcacgcggagttcgccggcgacagcaagcggcccagagcgtcgccttcgcctccctgttcgtactggtgaaaagctcgccgttacccgttattagtagagttgatttactgggtaccgtaggaacgaagagaaatatgagccaaaaaaaatcatggaacggaccggtgtttctctgttggattattattgggtccatttcgatcgagctgctttaaggtgacgtttggttcataaaatgtaacgtaaataacaataataacgattgaccctcgagtgacagcggtaataagtttaaataggccgataccagtttttaatatgagatccgattacggttggaattaaacaaatatgatttaacgttatcagtt

SEQ ID NO: 3917 - DNA, 1335 bp, Zea mays
  Clone ID: TF_ZmC3762_1
cccacgcgtccggtcctctcctctgtctctctctctttgagcctcctttttcaacctaacctttgacgctgtagctcgagagcaagcatagtgcctagtgcctaccagattctctccctgagcggctgagctctgccgatccgcgataggctcgcgccatgcagatgctctgcgacgtctgcgccgccgcgccggccgccgtgatctgctgcgccgacgaggccgcgctctgctccgcctgcgaccgccgcgtccaccgcgccaacaagctcgcccacaagcaccgccgcatccccctcgcccagccctctggcgacgaatccgacgccgacgccaagccgctctgcgacgtgtgtaaggagcggaggggcctcgtgttctgcgtggaggaccgcgccatcctgtgccccgactgcgacgaccccatccacagcgccaacgacctcaccgccaagcacacccgcttcctcctcgtcggggccaagctctcagccgcgctcgtcgacgcccaggcgccccactcccctgacgacgacgacaacgactgcggccgcggcaacggcgccgccgccgagcccgacgctgtccccgccgtctgcgcgcagggctcctgcgcggccaaggcctcgtctcttgagtccggtggcggcggcggcggcggcagcggcagcggcagcagcatctccgagtacctcaccaacatctgcccaggctggcgcgtcgacgacctcctctttgacgactcggcgttctcagcggcatcgaaggccgacagctgcgacgacgggcacgagcaggtgccgtccctggacgccgacctcttcgacgtggtggctggcgccggctggccggggaagcgcggcagcgcgtggtcaggagtcggagctctgggcttcgacaaggtgccggcctccgttgttgtcgtcccgacggcggccaagcaacagcaggggtgcgtgagggagaggacctgggactcggacagcgacagcgacgtgttcgcggtgccggagctcccgcaaccaccgcaggccaagaaggcgcggccggcgccggctccggcgccgactttctggtgcttctgagctgcactgtcccagtccggtccggccggcctgtgtgcactgtgtacttgccgtgacttctgtaaccagtgtgtgtgagcgagcttgctcgtgctttttacccatgtactgttgttactgcatacacacacacactccactactattagtagctagcagtgctcaaacccaagttaattaagtttggcgcagtttatattatgacttaatcataaggtgatattgctgttgccggtcgagatcttgaact

SEQ ID NO: 3918 - DNA, 636 bp, Zea mays
  Clone ID: TF_LIB4741-061-R1-K1-E4
tgggtccctcgggccggccggaatcccctcccgccgcgtacatcgccgccgtcctcgtgccccgttacctctaaaaccctagcggggagccggggatgaagatccagtgcaacgcgtgcggggccgcggaggcgcgggtgctgtgctgcgcggacgaggccccgctctgcgtcgcctgcgacgaggaggtgcacgccgccaacaagctcgccgggaagcaccagcgggtgccgctcctgacggacgccgccgtcgctgccgccgcggcggccccggccgtgcccaagtgcgacatctgtcaggaggcttctggatacttcttctgcctagaggaccgtgcactactttgtagagactgtgatgttgctatacacacagtgaattcctttgtttcagtacatcagagattcctgctaactggagttcaggtgggtcttgatcctgctgatccagttccacctattgctgaaaagcacgttaatgctgctggtggatcagtaaatcaaccagtgagacatcagccaaagagaagcccgacagttcaattttcagttgaagggagtgcttctgttcctactaaaaatgtaacaaatggagattgttcaaggcagaattttgtcccaacagccaggggag

SEQ ID NO: 3919 - DNA, 1656 bp, Zea mays
  Clone ID: TF_ZmC460_8
cttaatccaacgattagtgctttttattcacttaagccctcccacctcaacgatgagtgttcctggccagcagcctgatctttataattacatatgtgtccaacgtaagtgtcagtgcatcccatgatggcatacatacatattttgcgtacatacacatcacatgactggataattacatatgtccaatgtaagcgtcagtgcaccccatgatggtatacatacatattttgcatacatacacacatcacatgactggagaatcatgcagagatctctcatctcagccaagatcaggaacgatgaagtagtcctcgtcgtcgtcgtcaggcacctccatccgtgacttcttgaacaggcgcgccccgttcgccttgtagaacccggcgttactcactggctgcggcgaggcgaagaactccgccatggcagttttagctggcgaatgggcgtggaacaggtcgatgtcctcgaaccactccagctccttgagcccaagagacgagtctttcttgtcgctggattcgtagtccgacagctcgaggaggtcctcgacggcccaaccggacggtggcaggaacggcgaggacggcacctcctgcggcagcgcgtccttgaccgtccttgttttggtggtcgtcccggcagctggcgcgctgacgacggccgcgggcttggagctgcccttgggcggcgccggcgggaggccctcggcgctggcgccgcagacggagctgaagccgacgcggatgccggtggcgaggtagcgctggtggttgccggagagcgtgccggggacgtggatgggctcgtcgcagtcgcggcagaggagcgccctgtcctcgacgcagaagatgaaggccggcctctcctggcacacgtcgcagcgcgggaggctggcggggagcgccgcggcgtcgccgagcgggagccgctggtgcttgctggcgagcttgttggcggcgtggatctccacgtcgcagcgcgcgcacagcgccgcctcgtcggcgcagcacaccaccgtggccgccgcggcctcgcacgcgtcgcactggatcctcatgccgcccgttgggaagggagcttcgaggcggcccgccgcggcgcgtcggccgggcgggctgagccaatggcacgggcccttggggcgcgaacgccctaacgtgggtcggggcttccagtggagacaggcaggccagcagccgcctaaaaaaatcagcatgggaacgcgaacgcagacgtcgcagcgcggaaggctggcggagagcgcctcgagcgggaggcgctggtgcttgctggcgagcttgttggcggcgtggatctcgacgtcgcagcgcgcgcacagcgcggcctcgtcagcgcagcacaccacggtggcagccgcgccctcgcacgcgtcgcactggatcttcatggccgctccacctctctgtctgcagtctatactcccaggcccagctcgctatcctgtcctgtcgtctcgcaagtcgcaacaacgagggaggcaaggacgaacaagataaggccactgactgcgatggaggaggacgagcttgcgcgcgcgagcacgcaactggagcaatcagtgagctgccgctgctgggcgagcttgtggtggaggactcgccggggagacttgtggccaggggctcccgg

SEQ ID NO: 3920 - DNA, 1796 bp, Zea mays
  Clone ID: TF_ZmC3_1
cccacgcgtccgcccacgcgtccgccccgcgtccgagcattggtacctcgaggccggccggggaaaacgcaacagcgcactcgcccccctcgcttaaaagctgtagctcacacgagccgtgccactgcgagggaaggagggagagaaaaaggggagcccgatccaatcccaatcccctcccgccgcgtcacatcgccgccgtcctcgtgccccgttacctctaaaaccctagcggggagccgccgagccggggatgaagatccagtgcaacgcgtgcggggccgcggaggcgcgggtgctgtgctgcgcggacgaggccgcgctctgcgtcgcctgcgacgaggaggtgcacgccgccaacaagctcgccgggaagcaccagcgggtgccgctcctgacggacgccgccgccgctgccgccgcagcggcgccggccgtgcccaagtgcgacatctgtcaggaggcttctggatacttcttctgcctagaggaccgtgcactactttgtagagactgtgatgttgctatacacacagtgaattcctttgtttcagtacatcagagattcctgctaactggagttcaggtgggtcttgatcctgctgatccagttccacctattgctgaaaagcatgttaatgctgttggtggatcagtgaatcaaccagtgagacatcagccaaggagaagcccgacagttcaattttcagttgaagggagtgcttctgttcctaccaaaaatgtaacaaatggagattgttcaaggcagaattttgtcccaacagccagggcagaagtggttgattggactatgaataatagtacaattcgatcagtagaatctccgcctaagtacatttcagaggaaagccccacacttctgcaatctagccagaccacaacagtcttctccaaccaaattaatggcaatagtgatggggcctaccacttgtcattctcaggtggtaatgtgacagacagcctaccagattggcccgtggatgagttcttcagtaactcagaatatggtccaaactttggcttctccgagaatggttcttctaagggtgataccgctaagctggggggcgctggtggatctccacaatgccgtttggctgaaggctcagttgctgaggaactattagggcaggtgcctggattgatcaccgatgaatatatgggccgagtacctgagaattcatggacagtgcctgaggttccctctccaccaacagcctcggggctcaactggcacgggaatttgtgtttccctgcgtatgacagcaccatgttgttcctgaaattacctcccttcagaactccgaaagtcacttcaccgtaccttccagtttcaagcgccggagaagagagtactgagaggcgacaagaagatcactagacaccactgtccggtctaggctatcttgagaaaggcttcttggtgggctaaatgacgaaagaaaatatccaggactgggtggtcattcaaacatcaactgagctatccagtagccaggttttaagtgtgttgtaatgcttcaatgtgtttcattttccaaagacctgagcttcgcttgtgatttgttccgagctgtacggtgtcgattttgtgtatataatataatataacgaaataaagggtacccagtatgagtatgatcattccgaaataaaaaaatattaatgatataataaaaaaaaaaaaaaaaaaaaaaaaaaaaaaaaaaaaaagaagaaaagaaaaaagggggggaggggaaaagggagaaaaaaaggggggggggggggaagag

SEQ ID NO: 3921 - DNA, 398 bp, Zea mays
  Clone ID: TF_ZmC3809_2
ccggccgggctttcctgctaagcccgggctagctaggaagtaacacactctagtagcatcccccatcatccagcctcgcggtcgctacagttagcttcgctttcctccagcccatccttctatacacgattgacctgagctgagccgcctccgacccgtctcgagagggagggagagggagagggagagcgagagctagcgcgcgcgatcgcaaagagagcggtgaaagatgaaggtgcagtgcgacgtgtgcgcggccgaggcggcgtctgtgttctgctgcgccgatgaggccgcgctgtgcgaggcgtgcgaccgccgcgtgcaccgcgccaacaagctcgccggcaagcaccgccggctctcgctgctcggcccggtggcgccgtcctcattgt

SEQ ID NO: 3922 - DNA, 608 bp, Zea mays
  unsure (1)..(608): unsure at all n locations
  Clone ID: TF_LIB3597-024-Q1-K6-F4
gctgcagagaactcccggcagcaacgttgaggagtcttccatcctggagacagtcaccgctgtggctgcgggcaagcctctctcctgcccaaaccacgatgggaatgtgatggacttttactgccagtcttgtgagaccgccatgtgccgggagtgcacggagggggagcatgcagaacaccccacggtccccctcaaggacgtggtagagcaacacaaggcctcactccaggtccagctggacgccgtcaacaaaaggctcccagaaatcgattctgctcttcagttcatctcagaaatcattcatcagttaaccaaccaaaaggccagcattgtggatgacatccactctacatttgatgagctccagaagactctaaatgtgcgcaaaagtgtgctgcttatggaactggaagtcaactatggcctcaaacataaagtccttcagtcgcagctggatacgctgctcgagggccaggagagtataaagagctgcagcaacttcaccgcgcaggccctcaaccacggcacggagacggaggtgcntgctggtgaagaagcagatgagcgagaagctgaacgagctggcggaccaggacttcccgctg

SEQ ID NO: 3923 - DNA, 810 bp, Zea mays
  Clone ID: TF_ZmC9242_2
cttgccatcagtatgttcagtgtgagatatgtggagaaaagcacctgaagaagaacatcaagcggcatctgcaatcacatgacaaggtgccctctgatggaaggatgaaatgcacttttgatggttgtgaacacttcttttccaacaaatcaaatctgaccaagcatgtcaaggcatgccatgaccagctgaaacctttcaagtgcggaatcgttgggtgtggcaaggcgttcacctacaagcatgtcagggataaccatgagacatctggtgctcatgtatacatggaagtgagttgtgctacctgatctatgttaattccgagtttgtgttttttggcctattaggtcaaactatcagctcctgattttcgtacgtatctctaatttaaacgtatgttcacatctgctttgtgatcaaaccgtgtgaacctgtggataacaaaaatctgcttcatgcagggagactttgaagagttggatgagcagttgcgtgcccggccaagaggtggtcggaagaggaaagcattgacggtggaaacactgacacgcaagagggtgaccatctccggcgaggcttcatccttggatgatggagtggagtatcttcgctggttgctatctggtggggatgattcaattgattgtcagtagccggcgtctttttgctatcaccgctgctttgtacatgggttagattatgtaatgtaagttgtttggtagactacgatggtgttcatgacgcgtttgatatattgtcagcagtatggtagtgcagggctctcatagtaaagcttgccatttttgttgt

SEQ ID NO: 3924 - DNA, 1387 bp, Zea mays
  Clone ID: TF_ZmC205_12
gacactgggccttcttaccctttgcttctcttctctgccgctagggaggcgctgacactgttcctcttccctcctcctgctctctccccatgtcctcctcctccggtcctcggcggccatgactgctgcggcctctttcgtccgtgcctgcgcgctgcatggctgctgccagctctagatacacactcctagctaggcagctgttgccttcacctgctgccgcgcgctgctcgatcgactgcacgtcttcacagttcacaccacagagcagagggagagagaaagccaagaagccgtcaggggagagtagggagagagagaggggaggagtcgtatgatagaaagaatctggaattgctttccctctcgttttgtcccccctgcgcctccttgattattgtgttgcttgctgttcctccctgcctgcttgctccctgcttcggcttggaggccttctcatgcatcaacctccttagcatctctctccccctctcccatacatacccccttgtctgatgcctgcttctgcttgccccatcctccttcatccttcacgagttcgtctctcgatttattgtctgccacacctcccttcagctagctatcttcccctagctagctaggtaccagtagtgtgtgtatatatagatagatttatagatatagacacacacaacaagtgcaagatcaggcgaaagctactagccgcccttgcaggtcttggactccattcgtcgtccttgggttctcctcctcacctagctactatatgttccaccatcagcaggagctcttgcaggcagaagctgcagcggcagatcgggagagcagcatgtccaacctcacctcctccgcgtccggcggccccaacgcggctgctgctgctgctgccccgccggcgcccgcggcctccggcaacaacaagcggaaacggagcctcccaggcaaccccgaccccgaggcggaggtcgtggctctctccccggcgacgctgatggcgacgaaccgtttcgtgtgcgagatctgcgggaaggggttccagcgggaccagaacctgcagctgcaccggcgcggccacaacctggccgtggaagctgaagcagcgcggcacgggcaaggaggcgcagcgggaggaagggtgtacgtgtgcccccgaggccgtcgtgcgtgcaccacgaccccgcccgcgcgctgggcgacctcaccggcatcaagaagcacttcttccgcaagcacgggcgagaaagaagtggaagtgcgacaagtgctccaagaagtacgccgtccctttccgactggaaggcgcactccaagatctggggcaccagggagtacaagtgcgactgcggcacctccttctccaggcgggacagcttcatcacgcacc

SEQ ID NO: 3925 - DNA, 896 bp, Zea mays
  Clone ID: TF_ZmC28550_1
cccacgcgttccccctcccctaacactgtagccgatatccgtgttggaacactgtagccgctccttcaacggcgtcctcctcctcctcctctcccttcctgattctttctctctcccgctaaatcgatgggcacgctacgccgtattccttccccgcagccccgcagccgcttcttcgcccgcgcgctcggaatactccgcaccaatcctagctgcgggcaggggttccagccgcttcttcgcccacacgcccgctcgctcggaatactccgcaccaatccgtgtcggaccggtacgtgtgcgagatctgcgggcaggggttccagcgcgaccagaacctgcagatgcaccggcggcggcacaaggtgccgtggaagctgctgaagcgggaggccggggaggcggcgcggaagcgcgtgttcctgtgcccggagccgagctgcctgcaccacgacccctcgcacgcgctgggcgacctcgtcggcatcaagaagcacttccgccgcaagcacagcggccaccgccagtgggcctgcgtcttctcccgcattgtgtggggatcaattgcttggcttatctagatggttccatatttagtacaagtgatcatcttttttgcgggagccgtgatggtaccttgaaaagatgggaattaaataatggggatgcaagcttctcaggaacttttgagtctcatgttgattgggtatgcttttttctgtttttaattaagtaggcttactgtttcatcaatcagtgctttaaatagacattatgtttataaattagttatgtttatgtttaacatggtgtctgtggtcttgctcctggagccaaagctgtgcacgcttctggggtccaggttccttagcgtcaccccgcgcctgctttgacaa

SEQ ID NO: 3926 - DNA, 403 bp, Zea mays
  Clone ID: TF_LIB3279-048-P1-K1-E3
ggacggaggaacgcgagatagatcgagcgccggcgatgccgccaccgcacccgacggacgcggaggcggggcccgagcaggtggcgccgacggaggcggtgcccttggcggctgcggcgccggcgccggtcaagaagaagcggaacctccccgggacgccagatccggacgccgaggtgatcgcgctctcgccggggacgctgctggccacgaaccgcttcgtgtgcgaggtgtgcggcaagggcttccagcgggaccagaacctgcagctgcaccgccgcggccacaacctgccctggcgcctgcggcagcgcgggcccggcgcggccccaccgcgccgtcgggtgtacgtgtgccccgagcccggctgcgtgcaccactccccgacccgagccctcgggga

SEQ ID NO: 3927 - DNA, 1397 bp, Zea mays
  Clone ID: TF_ZmC12456_1
cgctagccaatccgagcgctggctccccagtccccaagcgtggctcttccagcccagcgccaccgcagccatgccccatgtcctctccttcctccacctccacctcccgctcaacactgcccctttgcattccttccgagtccatcgcactcgccactcccaccctcacctctccctccgtactcggcgcgcctcagcgacggcggcggccgccgaagcagagaacccgtccgcatcggcggacgtcgagatggtccgcgggcgggacggtgtttggacggcgcggtccccaactgtggtggtcctgtgggatctcgacaacaagcccccgcgcgggccgccgttcccggccgcaaccgccctcatcggcgccgcctctctcctcggccgcgtcgtctcgatttcggccttcgccaaccgccacgccttctcccacctccctggctgggtcaccgccgagcgccgcgcccgccgcgccctcgaccgctccgagcgcgcgggggtcgtcgtcccttccgtgccctactcctgctccgtctgtggccggcgcttccctacccgccccgatctcacccgccacttccgccagcttcacgagcgcgagcgaaacaagaagctctcccgcctccgctccctcaagggcaagaagcggcagaagttccgtgagcggttcatcaccggcaacaccaagtacgaggatgccgcgcgggagctcctcacccccaaggtagggtacgggcttgcctccgagctccggcgcgcgggcgtccacgtccgcaccgtccccgacaagccgcaggcagcagaccacgcgctcaagcgtcaggtgaagcactccgtcgcctgtggcgtcgattggctggtgctcgtctctgacgactcggatttcaccgatacggtgcgtaatgcacgcgctgccgacctgaggacggtcgtggtgggcgacggttgccgcgctcttggcaaggttgctgacatttggttgccatgggaccgagttgagaatggggaggttgatgaggagatgctgaggagttgcacgttttcagagtaccgagaagatcagggaactgagcgggatgggcagttcataggggattgggatgcaggtgactttgatgatgttgttgacgatattgttggaactagaaccagtttgcttggagctacgacaatgtctgcgtttgctgacgaggacattgcagatggcatatttggagttgaattgaccggggataacatgttttggagtagtgacgatgaggaagaggatgattacttgtgaggttcacatgtgtattgagcagtaaacatttagggcttgtttgctttttcttaatccatgtggatcggatgatattgggtgaatttaaatcctaaacaagtcaaaattcttc

SEQ ID NO: 3928 - DNA, 568 bp, Zea mays
  Clone ID: TF_ZmC3270_1
ccccgcgtccgccaagtctcaccgccgtctctctcccagtcccaaatcttgagctcgatcgcaaaccctcagacacttcttcccccagccgacgtacatgaagcacccgagagacgccggcgccatgccgctctccctcgcgctgtccctcggcgccggcgtggcccccgggcacggcagcagcaagcggccccggcgcgcggcgggcggcggggacggcgagttggtctgcaagacgtgcagccgcgccttcgtctcgttccaggcgctgggcgggcaccggacaagccacctgcgggccggccggcacggccttgcgctcgggatgcccgcgccggcgccggcgaaggaggcgccgccgcccgcgacgacccacctgtgccacgtctgcgggctcggcttccagatgggccaggcgctaggcggccacatgcggcgccaccgcgaggaggctgccgccaccaccgcgcaggcgccgcccgtcctcctccagctcttcgtgtagagttttgcccgtccacggagtctagctagtagaaggaattcttcgcgttccctgtcgtcactc

SEQ ID NO: 3929 - DNA, 736 bp, Zea mays
  Clone ID: TF_LIB4745-008-Q1-K1-G3
gtaccctcggagccggccggggggcctctcctcttccggtctttatctccttggttctgtcgggctcttcctcgatttgtctccggatcggaggaacggcaaaaatctttctcgtctcgcccccatggtcgccgctcgcatgctcgaagaaggggaaggacgaagaacactgccgaccctattcctagcaacgggccaaagcgaccagccgcaggaaggagaagcagtgttggcgtgttcgagctggtggtgccaggataaatcgggaggaagtgatggcatcgaattcatcggcggcgttctttggtgttagggatggggaccagcaagaccagattaagccgctgatatcaccgcagcaacagctggcagcggcgctgcccggtctggcaggcggtgtttctgcggcgtccggccaaggcgcgccgccggcgcagccaccgcccaagaagaagaggactatgcctgaccccgacgctgaggtgatcgcgctgtcgcccaagacgcttatggcgaccaacaggttcgtgtgcgaggtgtgcaacaaggggttccagcgcgagcagaacctgcagctgcaccggcgcgggcacaacctgccgtggaagctgaagcagaagaacccgctacaggcgcagcggcggcgcgtgtacctgtgcccggagccgacgtgcgtgcaccacgacccggcccgcgccctcggcgacctgacggggatcaagaagcacttctgccg

SEQ ID NO: 3930 - DNA, 845 bp, Zea mays
  Clone ID: TF_LIB4757-036-R1-K1-A8
attgggtacctcgagggccggccgggagtgctcataaccaaccaccactcagtcctcctcctctaccctttcccttccgccgcgttcctacttggtcctagagggagagagatctcgaactccaagggcgcatgctccggttgctagctacgatgccgtgtgcgtagctgcggcagcccttgatcgatcaatcgatcgcttgtgcggaaggagccggatcgagtggagtcaggtagactgctagcttccattccaacaaggggttgaggtacacacgcacaggcacagcgtgtgcgtgacttggactagtcgctgtgaccggccggtgcgtggtggcatcgatctttagcttgcttgctgattccttctttcctcctgtagctagctagatactccgtggtcgtcgtcgtcgttggacgtacgccagaagagggagctagagaagaataccgtacagctgcttccaacatggcagctgcctcgtctgcccacctgttcggactcggcgacgggcagatgcagatgcagccgcagcagcagcaggcgccgcctcctcctcttgtgaacaacccggccgcgccgccgcccaagaagaagcggaaccaacccggtaacccaagcaacagaccctgacgcggaggtgatcgcgctttcccccaagacgctgatggcgacgaaccggttcgtgtgcgaggtgtgcaacaaggggttccagcgggagcagaacctgcagctgcaccggcgcgggcacaacctgccgtggaagctgaagcagaagaaccccaaggagacgcggcggcgggtgtacctgtgcccggagccgacgtgcgtgcaccacgacccgt

SEQ ID NO: 3931 - DNA, 741 bp, Zea mays
  Clone ID: TF_ZmC205_25
aatactccagaaattgatttatagtggggcatattagatgtgggagaggaaagcagcaggagagaagagagagaaggaaaagtatgacaaggaaatgagagaaatgggagaacagccttcttagcctctccctccatgcatcctctctccaccactgctatctctcagtagcaagagcaaagcaagaggagagcaagctagcggtaccagggagagtgagatcagttccaagcacatacatatgagaagcgaagaaggggaaggacgaagaacactgccgaccctattcctagcaacgggccaaagcgaccagctgcaggaaggagaagcagtgttggcgtgttcgagctggtggtgccaggataaatcgggaggaagtgatggcatcgaattcatcggcggcgttctttggtgttagggatggggaccagcaagaccagattaagccgctgatatcaccgcagcaacagctggcagcggcgctgcccggtctggcaggcggtgttcctgcggcgtccggccaaggcgcgccgccggcgcagccaccgcccaagaagaagaggactatgcctgaccccgacgctgaggtgatcgcgctgtcgcccaagacgcttatggcgaccaacaggttcgtgtgcgaggtgtgcaacaaggggttccagcgcgagcagaacctgcagctgcaccggcgcgggcacaacctgccgtggaagctgaagcagaagaacccgctacaggcgc

SEQ ID NO: 3932 - DNA, 633 bp, Zea mays
  Clone ID: TF_LIB4729-120-A1-K1-D11
tttgtctcctgatcggactcggaggaacagcaaaatctttctagtctcgccccccaaatgcggcgaaggggacggacgaattgaagaacactgccagtccgatcgagctggtggtgccgccaggataaatcgggaggtatatgatggcgtcgaattcaccggcggcggcgttctttggtgttagggatggggaccagcaagaccaccagattaagccgctgatatcaccgcagcagcagcagcagctggcagcggcactgcccagcgtggcgtccggccaaggcgcgccgacggcggcggcgcagccaccgcccaagaagaagaggactatgcccgacccagacgctgaggtgatcgccctgtcgcccaagacgctgatggcgaccaacaggttcgtgtgcgaggtgtgcagcaaggggttccagcgcgagcagaacctgcagctgcaccggcgcgggcacaacctgccgtggaagctgaagcagaaggacccgctgcaggcgcagcggcggcgcgtgtacctgtgcccggagccgacgtgcgcgcaccacgacccggcgcgcgccctgggcgacctgacggggatcaagaagcacttcagccgccagcacggcgagaagaagtggaagcgcc

SEQ ID NO: 3933 - DNA, 799 bp, Zea mays
  unsure (1)..(799): unsure at all n locations
  Clone ID: TF_ZmC205_22
gacaaggtagtagcaaggaaaagatgtcaagaaaatgagagaacaaccttcttagcttctcctccaatctctctccaccactgctatctcctcggtaggaagaagagcaagcaagagagaagcaagctagctagcggtagcggtacaagggagagtgagcggcgaaggggacggacgaattgaagaacacctgccagtccgatcgagctggtggtgccgccaggataaatcgggaggtatatgatggcgtcgaattcaccggcggcggcgttctttggtgttagggatggggaccagcaagaccaccagattaagccgctgatatcaccgcagcagcagcagcagctggcagcggcactgcccagcgtggcgtccggccagggcgcgccgacggcggcggcggcgcagccaccgcccaagaagaagaggactatgcccgacccagacgctgaggtgatcgccctgtcgcccaagacgctgatggcgaccaacaggttcgtgtgcgaggtgtgcagcaaggggttccagcgcgagcagaacctgcagctgcaccggcgcgggcacaacctgccgtggaagctgaagcagaaggacccgctgcaggcgcagccggcggcgcgtgtacctgtgcccgggagccgacgtgcgcgcaccacgacccagcgcgcgccctcgncgaacttgaacggggatcaagaagcacttcagccgcagcacggcagaaagaagtggaagtgcgacaagtgctccaagcgctacgccgtgcagnccggactggaagggcgcactccagatctgc

SEQ ID NO: 3934 - DNA, 400 bp, Zea mays
  Clone ID: TF_LIB3354-032-P1-K1-D5
gttttgttttgtttttagtcgtttatagtggtccgaggtgtgtgtgcgtgccggggatagctagctctgtcgtgatcgatggcgacggcgccgtggccgtggtggtggtggcgcagatcctgacgcggaggtgatcgcgctgtcgcccaagacgctgctggcgacgaaccggttcgtgtgcgagatctgcaacaaggggttccagcgggaccagaacctgcagctccaccggcggggccacaacctgccgtggaagctgcggcagcggagcggcaaggaggtccggaagcgggtgtacgtgtgcccggagcccagctgcgtgcaccacgacccgtcgcgcgcgctcggcgacctcaccgggatcaagaagcacttctgccgcaagcacggcgagaagaag

SEQ ID NO: 3935 - DNA, 368 bp, Zea mays
  Clone ID: TF_LIB3205-044-P1-N1-E8
gctttttgtgcgttctcaggtcgggcacgatggataacatattggcgcggcaccgtacgcaggtgtggatcttctagcagaggctccgcctgtattggaacttcacgcacaggatggtcttgaggggctgtaagctttcgagcaggttgttccgattgcaccccgcgaacgggcacgagtaccggcgcttaaacggctcctgctacgggcccgcatccctcagcggctcggccagcgtcacacgagctcttgtactcgtcatcgtgccctcgcatgtgcatacgaacgttcgagtcccgcttgaaccctttgccgcacatggtgcacaagtgcgtgtgcggcagccagcatctgggactactccagct

SEQ ID NO: 3936 - DNA, 251 bp, Zea mays
  Clone ID: TF_701160730H1
catgatgattattgtgaccccacaagcacccccctcaccttacaattatcaacggctttgtataataatagcagcagcattaggagtactattaatgctaaagctaaagttcatgagtgttccatatgtggggcagaattttcatctgggcaagcgttggggggacacatgagaaagcatagaaattttctgagtgcacctattattgggcaattaatattgcaatggtggtgatggaagcctaaagtccg

SEQ ID NO: 3937 - DNA, 787 bp, Zea mays
  Clone ID: TF_LIB4602-001-R1-K1-A2
ggtcttccttactcgagtgctaacgatggtgatgatagtgctttatgttttcaagatcaaattggttcaattatggacaagacgaatgtgcattcaatttcttctcttaccttctccagctattccagtgatccaaatgatgtgaatgaaaggaacttaaacaaagcaaatgtttatcaatgccagaaatgcaatttgactttcggtgaccggacttcatatgcgcaacaccatttggcgtatcatgaaatgagtgttaagaggcgtaggactggcaagtttggtgagccagtagtagggaaagatggaaaatttgaatgccctatttgtcataagacctttgaggaggaaccacagtactttggtcatgtcggatctcatgcaagatatgaaggtttagctcctgaagcattcttggataaggctacttccagaagggcagctaatgattcattggcagaaattccatttagccttcaggaattgactgaatcacatggacagaacaacaaggtttcttatggtgaaaagggttttcagcaccacaatcattcaaataaacatggtgataataaccttacagccattgatctttttggtacaaattattcggataatttcatcaggccaaataaaacttgcggtagtcctgaagagggaccttcctgtaatgatgctccaagtgtatctagatatacaaattgtacaggccatgctgatgtgatagtttccagaagggcatcaatctccaataatcaatctggtagcaacattaatgggctttata

SEQ ID NO: 3938 - DNA, 1017 bp, Zea mays
  unsure (1)..(1017): unsure at all n locations
  Clone ID: TF_ZmC205_19
ctcgaggcttgnccggnngaagccgcaaataataatcgccaaagcccaaaagagatagagaggagagacgcgacgcgaggggagtggagaaaagcagagcacagagagagagaagggagagggaaaagagagagagaaaaaaagatccccgtccaccgcccacccgctgcgccggcgctgcacgcacggacggacagacggacctcccccccaagcggtgccggattcagtgcggtgggccaggggctgggacggagtgggcgacagatcgagcgctggcgatgccgcacccgacggacccggaggcggggtccgagcagaaggcgccggcggtgccttatttggcggctgcggcgccggctccggtcaagaagaagcggaacctccccgggacgccagatccggacgccgaggtgatcgcgctctcgccggggacgctgctggccacgaaccgcttcgtgtgcgaggtgtgcggcaagggcttccagcgggaccagaacctgcagctgcaccgcctcggccacaacctgccctggcgcctgcggcagcgtggtccgggcgcgccgccgccgcgccgccgggtgtacgtgtgccccgagcccgcctgcgtgcaccactcccccgcgcgggcgctcggggacctcaccgggatcaagaagcacttctgccgcaagcacggggagaagcgctgggtgggcccgccatcggcaccgcgatacgcgccagcgccggagccactgcgacagcaaccgcccccgcntgcgccgcatcatgcggagccacgtaatgagcctgacacgaatgcgactgaggccgtccagttcgcgccgccgcctccgccaccgccgccgccgccgcagttacagctgccggtgctttcgcaagcttcggtgagcgctgctgccaacgttagcgccagcagcagcagcagcagcgtcgcggggacgtcgcagagcctgctcgccggtatgtctcgcgccctcgtcgatggcgtcagcgccgcagtacgcggacctc

SEQ ID NO: 3939 - DNA, 737 bp, Zea mays
  Clone ID: TF_ZmC547521_1
ccggccgggctcccccaactccccaaggccccaaccgcacccgtcgccccaacaaaacctccgagcagatcactacctccgctagcttcgtcatcccgcttaaccacaccacaccatcctacctttcctcacctctcactctttcagcactctgcttgcctaacgcttgctccccccacctcccactcccagatcgcgccgcggatcctcctcgcgatcgcgtcctgatggctaccaggtcggtttcctgatccctcgatcctcaatcagtctcacggcttctcgcttatcgatggatgtcgtggagctcgatgcggcgaggcatggatgcaaggtctgcggaaaaagcttcctgtccggccggtcgctcggaggacatatgagatcgcacatctcgctcggcgaggcagcgctggaggttcacgccgccgacgagctgacgcctgtttcgtcgaatggtggccggggctgtgacggactggtcgcgtacgggctgagggagaatcccaggaagactcggcgcctatccgactttgctgacgagaaggatgtcggccatggcgttgagtgcgggaagtcgtggaggtctttgttcggccacatacgcaatcatgcgtccggcgacaggtatcacgacgtcgacgacgacgaggacgaggaagaggatgaattctctgtagaggagggggaagcagaggaagcagaaatggtgaggccgacggaggcgcctgtggcgg

SEQ ID NO: 3940 - DNA, 1242 bp, Zea mays
  Clone ID: TF_ZmC65823_1
accaggccccgagtaaacatagtaggacacccgtgtgactgattggttcttggattggggagctccgcctccctctcctcaagtttgaccaaccctcacccacctccctccgtcgtctagtatgcttcttgcctcccgcctgcttcctccgccgccctcctccgccgcggccggttcctcctcatcctctctgatctgcaggttctgacgaaccgaaccgttggggtttcaaatcttcttttgcagactccgatcccaactcaaaacacagagaactctgaaagctaatcggcaatggataaccacatccatagtcagccagctgctaacctctactaccagttcggcatggggactgagcagcaatacccaccaccgttcgcctcaccaccatccaccaacatcccgcacatggactggaacccggccacgatgctagacaacctcaccttcatcgaggagaagatacagcaagtgaaggacgtcatccgcacaatggtggacaacgccgggcaggtgcagagtgccaccaccaagcaggcgagctgctggctcagaagcagaagcagcaggtggtcaacgcggacctgacatgccttatagttcagctcatctccaccgccggcagcctgctcccgtcactgaagaactcgtcgttcctcagccacccccaccctgctggccacgtggacatggctaaccatgttggcccaagctcgagcctagtgcctaatgcgatgaccgtttctgaagactatgaggagctgttcaagggatggaccgatggcggcattgaggtcgacgacgacggcgttcttgtcgaggagcaggaaattaccaaggacggagacagcctctcgtacgagctgctgcagctggaggaggacgagatactggcgccgcacacgcacttttgcaccatctgcgggaaagggttcaagcgggacgcgaacctgcggatgcacatgcgagggcacggcgacgagtacaagagcccggcggcgctggccaagccgccgagggacccgggcgcggagcaggagccggcgaagcggcggtactcgtgcccgttcgcggggtgcaagcggaacaagctgcacaaaagcttccagcccctcaagaccatcctttgcgtgaagaaccactacaggcggagccactgcgagaagagccacacctgcggccggtgccacgccaagaagttctccatcgtggccgacctgaggacgcacgagaagcact

SEQ ID NO: 3941 - DNA, 641 bp, Zea mays
  unsure (1)..(641): unsure at all n locations
  Clone ID: TF_LIB3607-011-Q6-K6-H3
gaactgaagaaacacaactcctcattttccatctctcatctcctacaaacaagagtgtgcatatagcagtatagaaggcgtgtgtctgcctgtcaatttgttgatctcgctagcgcgtgtggctttggcgcatgcaagcagcaggttagctgattgctatcatccgcatcggatccatgtcgggagctgctggtagggagttcaccggcggcggcggcggcggcagtagcagcagcttctcttctgtgagcaacgcatcacctacggaggtggaggaagagttcctgcggtaccacaccaatccgctcctcggtggccccacgacggagatgcgagacgacggcggcccctcggatcagccgccgctgactgtgaagaagaagagaagccttcccgggacaccagacccgagcgcggaggtgatcgcgctgtcgccgcggacgctgatggcgacgaaccggttcgtgtgcgagatctgccacaagggcttccagcgcgaccagaacctgcagctgcaccggcgcgggcacaacctgccgtggaagctgcggcagcgcggcgggccctgaggaggcgctgactgcggcgggccgtcgaggaagcaggtgtacgtgtgccncgaggcgtcgtgcgtgcaccac

SEQ ID NO: 3942 - DNA, 736 bp, Zea mays
  Clone ID: TF_ZmC975_1
atcgccatctgcctcgccgcgctcgccgggacccgcaagttcgggctcggtcgggagaaggaccagcaccagcacaccaagtggtgcccgacgacgacgacaacccacgcgccatctgcgcagcaggagcttcggttccggtgcgcggtctgcgggaaggccttcgccacctaccaggcgctcggcggccacaagtccagccaccgcaagccgacgacgccggagcggtacgccgccgcccttggccaggcggcgacgacgacagcggcccggggcgaccactccgacgagatcacggcgtcgtctctgtcggggtcggcggctagcggcgggtaccaccggtgcagcatcaggcgtcacggctccgaggaactttgaccgctcgctgatgccaagcgcggagactactgggatgacgtgttgggttcgagatccggaggagccggaggtgcagagtcctctgccgatcaaaaagcgcaggattttgaattcatccttgcgccactctcccagcatcgggaatcataggtcattcaattctgggaaaaaggaaagtgggtgcagagttttttcccgattaagaagtgcatgatgtaaaactgactaaacaccaaaaaaaaaaaaaaaaacgtttcatgtaaaaatggatctacgccatcgttgtgtcgttaatttaatttcttttaattaggttctgtttttctggacataaattcgttcaattcattgattcgtc

SEQ ID NO: 3943 - DNA, 1267 bp, Zea mays
  Clone ID: TF_ZmC747_1
caattgtgtctatagagaactctggtgaaaaaggcgcaatggagaaagctgatatgtgtgtggcatcaacttctataacaaatactgatgatacttctctttgtattggaattcactctcatgatagtattgttgaatgccaggattatgccatgcaacatactctttattgtgagaagcaccttccaaggttccttaaacgtgccaggaatggtaagagtcgactcgtttctaaagatatcttcgtcaatctactgaagggatgcacatcaagaaaagataagatatgtctgcaccaagcatgtgaatttctttattggttcttgagaaacaacctttctcatcaacacactagtcttgctagtgaacatatgccccagatattggctgaagtgtctaaaaatccagatgttggagagtttttgttaaagttgatatctactgagagagagaaactagcaaatatctggggctttgatacaaatagatctaagcaaatatattctgaaaacaaagaagggtctctagtgttgcataaagagggaactaatctttcatctggtccgaagtgcaaaatctgtgctcaccagttctctgatgatgaagctcttggattacattggacaactgtccacaaaaaggaagcccggtggctgtttagaggttattcttgtgctgcatgcatggaatcatttaccaacaaaaaagtccttgaaagacatgtgcaggatgtacatggggctcaataccttcagtattcaattcttgtaatgtgaccaggaaggagagtctattcatcacttgcttgtttcttgtgtcctcgcgaggcaattttggtatcttctcctccagcgggtcggcctgtccgcactctcccccgggatggaagatatcaactttgaagcttggtggagtagatcggctgaggttactcctaaggaccttagagatggccttaactctttggtggttcttggggcttggactatctggaggcaccgtaatgactgtgttttcaatggtgctcagccttctatagctagattgcttacctcagccagtgatgagttcaatatgtggtgttttgcgggggccaaaggcttgacccgtctttcggacctagcttttgtgttcaaccccggttagaagggggttattattactagtgttgtttgtgtgtgtgtttgtgggagtggtgtttaggtcattgtaattattatcatccttcttttaatgaaatgatacgcagctctcctgcgtgttcgag

SEQ ID NO: 3944 - DNA, 213 bp, Zea mays
  Clone ID: TF_700432333H1
gaagctcgatcctacgactgtgaacaatgtgtgcaggtctttaagccgtccccaaaacttactaaacatcaggataatttagactggagaggaatcatacaaatgtgaggaatgtggaaaagcttttaacctatcttaacaacttactgacgataagatactttacgctagatagtaagcctacaaatgtaaagtctgtggccgagcctttaa

SEQ ID NO: 3945 - DNA, 424 bp, Zea mays
  Clone ID: TF_LIB3607-020-Q1-N6-H2
gcggcagtagagacggaggcggaggcggtgctgctgcagcaggagcacgacggccaagagcgcgcgaagcggaagcgctcgaggcgccgccgcgaccgcgacggcctgcagcccaaggaggcgaccacccaggaggagtacctggcgctgtgcctcgtcatgctggcgaccggccgccgcgacgccgacgccgcggctccgccgcaggaccacgcgtgctccgtctgcggcaaggcgttcccgtcgtaccaggcgctgggcggccacaaggccagccaccgcgccaagccctcgccctcgccttctccggcggcggcggcggcgctggcgccggagccgggcgcaggacacggtgaccgccacgacgagaagaagccggcgccgtcgttctcgttgtcggctggctccagacccgcggtggcgt

SEQ ID NO: 3946 - DNA, 1124 bp, Zea mays
  unsure (1)..(1124): unsure at all n locations
  Clone ID: TF_ZmC287271_1
gtctccgtgtccgtctgtcattagcatatccttcagagacacccgcagcaaagcaaagcacagaaaagcagcggcattcgcagctgcagcgccatcccttgccttctccacaagcatcaccggacaccggccagccaagccttcccctttgatctccacgcgcggccttcgtccatcctctccgccggtcgaggtcggggcgcgatgggcggcagcggcgtcctcggcgtccaagaagaagaggccggcacaccgccagccatggttgtgccaccggtggtcgtcaaggggcagcgcagcaagaaggacaggacgcgggcgccgccgccgttcccatcgcgatcgccatcgccgtggccgcgagcagcagcggcagcggcagcgccaagcaacatcacccgcgggtccacgagtgctccatctgcggcgccgagttcgggtccgggcaggcgcttggcggccacatgcggcggcaccggccgctggtgccggcggcggcggcctctcgggacgacctgcacgcgccgaggaaggagaagagcctcctggagctggacctgaacttgccagctccctgcaacgaggccgatgctccggagctgacgtccccacgcttcgctttcgccgtcgccgagcagcctccggcgccgctgcccttcccgccggccacgccgtccgcgctggttgactgccattactagtaaatacaacacaccaatcagcccccctcttctctgcttggatcatcatcatacataattacgactgcatacatacatatacagtgacacacacacacatacactacacgccacttcgttccttgctttctagatattcttcttcttctttcttcttctgttctttgtattcttagatcgatcggtctattttgattacattattttgttcatgttcatcaaaagattggggatttggaacgggagatgtgaattatcgggtacagaaacagagacgcgtgtgagattttattanaagttctattgattcattcgntgatttagaatccgccttcctggtttttttcccttctttgacttaaatatgtttttcgttgaattaactagggtttgcttccgactgtcgaaattgcgggtattggg

SEQ ID NO: 3947 - DNA, 557 bp, Zea mays
  Clone ID: TF_ZmC954085_1
cctgcgctgcccttacaagcctgtccaccagccctcttcttctgggggccccagttgcagccttcagcccagagcctggcctggagccctggaaggaggccctggtgcggcccccaggcagctacagcagcagcagcaacagtggagactggggatgggacctggccagtgaccagtcctctccgtccaccccgtcacccccactgccccccgaggcagcccactttctgtttggggagcccaccctgagaaaaaggaagagcccggcccaggtcatgttccagtgtctgtggaagagctgcgggaaggtgctgagcacggcgtcggcgatgcagagacacatccgcctggtgcacctggggaggcaggcagagcctgatcagagtgatggtgaggaggacttctactacacagagctggatgttggtgtggacacgctgaccgacgggctgtccagcctgactccagtgtcccccacggcctccatacggcttgccttccgcccgcctggagctgccagagctgctggagcccctagcacctgcctagtccctgca

SEQ ID NO: 3948 - DNA, 617 bp, Zea mays
  Clone ID: TF_20507554
cgtcagggaggccaataagacttccgctgccgccatggtgaagacgacgacgactacgaccaataaggaggagctggagagcccgtcctacaggtagcagcgtcaagagcctcttctcggcaggaacagccacgctcggccgcgggcgccggacaccggcaacaggagcaagagggggttgggctgctccgcgccggccatctgcaagctcaaggacgacagcgtgcccgcgccgcccaaggaaaccacgggcacggcgtcggcaggcgagccctgcaagcgccgcgcgtccgtgagcgggagcagcgatcggtgcgtgaagaagccccagtgtggcgctggcagcaacaagcagctgcagcgtggcgggtcgtcgtcgtcgtcgggcgggtcgtcgatcagggccggcatgcagctgaggcggctttcggggtgctacgagtgccacatggtggtggcgggcagcgcctccatgagggccaccaccatctgcccctgcccggactgcggcgaggtgttcgtcaggcaggagagcctccagctccaccagtccatcaggcacgcagtgtccgagcttggcactgatgacacgagccgcaacatcatcgagatcatct

SEQ ID NO: 3949 - DNA, 383 bp, Zea mays
  Clone ID: TF_LIB3088-019-Q1-K1-F8
cggacgcgtgggtctcctcaccatttgggctcctgccgagagctcaccgagctcggaccgtcgaaaggcgcaagcccggtggacatgccgaataacacatgcaagctctgctcccggcgcttcaccagtccccgcgccctcgccggtcacatgcgctcccattccctcgtcaaagctcatgctgaggccgcggaggcagcgaatcggctgatctcttctgcatcctccacgtccaccttcttcatcgccgccgacgactaggacgtcatctcgaagattcccacttccacccacggactctaatagaatccgaatcgcagccttctgttactcgattccagtttatcatatcgcgaaagctagtctgaatacacctcatcgta

SEQ ID NO: 3950 - DNA, 578 bp, Zea mays
  unsure (1)..(578): unsure at all n locations
  Clone ID: TF_LIB3959-020-Q1-K6-D10
gcgttctgccgccgcaaccggnagagagagagaggcggatacacaaacacgaaaccctagcaagcaagccctccacgcacagtcaagaagggagggggaggcgatggagtacccggcgacggccgccggatcggggagccacaagtactactacccgcagcagcactcgcactcacagccgcaggcgcttcgccgcccgccgcgccccgccgctcggtgggtcaagcaatggtgcgttcttaacttccctccctctccctgaaataagataatttccgcttcttctgactggaattaacctgagctaatccattgcgtgcggtggccattggtttcgggtgcgcttcgtttcccaggatcccgcaggatctcgcgtcctccggcggcaaatgctcgctcttcaagtgggtcagagaggatgggtacagaaactccaaggacaaccccagagtgttagatgtagaagcccccaagcctgaacccaccacggagatcctcttcctctgcagctacgagaactgcggcaagacctttgttgatgtcagcgcgctccgcaagcatgctagcgtgcacaacga

SEQ ID NO: 3951 - DNA, 333 bp, Zea mays
  Clone ID: TF_ZmC172980_1
agagaggggcgttgtggcgctggctagctatagctcgatccatcggaagaagttgaaccacacatcaactaacctctctgtcgtctcgcggcgatgtgtgaatctccatcatcctcgagaggccggtggcgccatagatatgatcagaagacaccgtcgactcagaaacgcggtgatgtgtgaatcgtcaatgttcctgatgtcgccgtctccgtcaccgtcaccgccgcagccgtctaggccgccaccggagtacaagcacttctgtcgagtatgcaacaagggattcacgtgcggcagtgcgctcggtggacatatgagagctcatggcgc

SEQ ID NO: 3952 - DNA, 405 bp, Zea mays
  Clone ID: TF_LIB3151-023-Q1-K1-G2
cttgccagcagctctctctatcgctccctcacgctctctctcctcaccatttttgctcctgccgagagctcgccaagctccgaaaggcgcaagttttcttgccatggggaagaacacatgcaagctctgctcccgccgcttcgccagttcccgcgcccttgccgggcacatgcgctctcattacatggccgcaactaaggagacagcggcgactgcaaccgcagcggctgcggcagccgcagcaacggcgcaacatcacatctcttcggcatcatccgcgtcaacctccatcgccatcgccgacgaggaagtcggctcgatgatgaccgcttccaccaacgggctccgggagaatacgaagcgcacccttggcgtggcggatgtacgtttctcggatcgcgagag

SEQ ID NO: 3953 - DNA, 377 bp, Zea mays
  Clone ID: TF_LIB3245-338-Q1-K1-B10
ctcaatccatgtggattgggtgggattgagtgggtttcaatcccaaataagtcaaaatcggggatgggtggttccaatctcatccaatccacatgggataggaataaccgaacaaagtcttactgggtatgaatttctgctcgtgagataattttgtaatgagacaaatataggctgtttgcctgcagaatccaggtgcttcggctatgaaccatagtgcaattggagaacagcatcagccccctaagccagcaaaggtctcagcaacgcctccagctccctcagctgagcgcccttacgtctgcccctacgatggttgcgacaaggcatacatccacgagtacaagctgaacctccatttgaaaaaggagcatccc

SEQ ID NO: 3954 - DNA, 394 bp, Zea mays
  Clone ID: TF_LIB3245-075-P1-K1-A9
ctagaactgtagacctgcatggttaatggcctggtggtgctccaaggtatcggccttggtgaacacctcgccgcactgcgggcacgcacacagctccctcggcctcgggtaccgcctgaccattaaccatccattaatcacggttagctttgccgcaatcaccagtcaccacatcatgattaccttaatcatcatccagctcaaaagctccatagtctaattagtaatcataaaactaatattgagctagtagctgggacggatcggacggacctcgacatgggctccacgttgatggcgcggcactcgtagcagccggagaggccccgcaaggaggagtgggggctgctgctgctgctgccggcgcccggcgccggagacgacgactaggcgc

SEQ ID NO: 3955 - DNA, 569 bp, Zea mays
  Clone ID: TF_LIB4762-051-R1-K1-D5
ccggggcatagctagctagctctcaatccatgaactcctccagcgccaccgctatggatcaaataggcaagtactggggcatgtggggagcaaggagaagcagcagcagcagcagcagcacgatccccatctctgcttgggctgcggcgtacggcggcagcagcgagccgtcgtgggaggagcaggccttcgcacgcgacgcggcggaacacctcggcggctgcgtctggccgccgcgctcctactcgtgcaccttctgccagcgcgagttccggtcggcgcaggcactcggtggccacatgaacgtccaccgccgcgaccgagctcttctccggctggggggctcgtcctcccccgaggacgtgcacgccaccaccaacgatcagccacacccgcagcaaggggatggagatgccaacaccaccaccaccactacttacttgccaagaattatcaaggagagcaagaacaagcgctttatgcccatgccagatcactctgtctcgtagatgacacaagatcatgcgtcggccatgagagatcatcctcaccatgaagatgggaacagc

SEQ ID NO: 3956 - DNA, 935 bp, Zea mays
  Clone ID: TF_ZmC32995_1
ccacgcgtccgaaattgctgacctccgtcatcagcatcttctctctctctctctctctgctgagctgcttactcattccagcttcaattttctttgtccgtgatctagctagcttgcatgtctctctagagtcgatctgaatcgatacaattgagactagctactatgagtttgcagatgcatagctagctagctctcaatcacatgaactcctccagcgccaccgctatggatcaaataggcaagtactggggcatgtggggagcaaggagaagcagcagcagcagcacgatccccatctctgcttgggctgcggcgtacggcggcagcagcgagccgtcgtgggaggagcaggccttcgcacgcgacgcggcggaacacctcggcggctgcgtctggccgccgcgctcctactcgtgcaccttctgccagcgcgagttccggtcggcgcaggcactcggtggccacatgaacgtccaccgccgcgaccgagctcttctccggctggggggctcgtcctcccccgaggacgtgcacgccaccaccaacgatcagccacacccgcagcaaggtgctctcctgtacagggcagcagcctctaaccctagcactaccacgccgagtactactgcagctgcaggtactactgctgccggcccagcagcagccataaccatagcaggtgcaggggatggagatgccaacaccaccaccaccactacttacttgtcaagaattatcaaggagagcaagaacaagcgcttcatgcccatgccagatcactctgtcgcggggatgagagaagatcaggcggcggccatagatgatcatcgtcataatgaagatggcgacagctggcggtcagcctcagccgcggaaaagaggaggcgtctggatcatccgttggcaacggcggcggcgcttctgatctttgt

SEQ ID NO: 3957 - DNA, 831 bp, Zea mays
  Clone ID: TF_ZmC32995_2
ttatctacaaattgctgacctccgtcatcagcatctttctctctctctctctctctctctgctgagctgcttactcattacagctccaattttctttgtccgtgatctagctagcttgcatgtctctctagagtcgatctaaatcgatacaattgagactagctactacgagtttgcagatgcatagctagctagctctcaatcacatgaactcctcaagcgccaccgctatggatcaaataggcaagtactggggcatgtggggagcaaggagaagcagcagcagcagcagcagcacgatccccatctctgcttgggctgcggcgtacggcggcagcagcgagccgtcgtgggaggagcaggccttcgcacgcgacgcggcggaacacctcggcggctgcgtctggccgccgcgctcctactcgtgcaccttctgccagcgcgagttccggtcggcgcaggcactcggtggccacatgaacgtccaccgccgcgaccgagctcttctccggctggggggctcgtcctcccccgaggacgtgcacgccaccaccaacgatcagccacacccgcagcaaggtgctctcctgtacagggcagcagcctctaaccctagcactaccacgccgagtactactgctgccggcccagcagcagccataaccatagcaggtgcaggggatggagatgccaacaccaccaccaccactacttacttgtcaagaattatcaaggagagcaagaacaagcgcttcatgcccatgccagatcactctgtcgcggagatgagagagatcaggcggcggccatagatgatcatcgtcatcatga

SEQ ID NO: 3958 - DNA, 447 bp, Zea mays
  Clone ID: TF_cC-zmle189065b10d1
gctgagtaatgtattatttcttaagctctcgcacaacagtctttatcttattatagactactccagctagctgcaggggagcgggaggagctggacctcgagctcagcctccagccctgctcggacttggcggcggaggcggcgccttccggcttcttcgtctgtacctactgcgaccgcaagttctacagctcgcaggcgctcggcgggcaccagaacgcgcacaagtacgagcgcaccctcgccaagcgccgtcgggagaacgtcgacttcatgcgcgcgcacggcgcccggcaggacgacccctacgacgcctacgggcatcatgagatgatgaggttcacgcttgtggaagcgcgttaggtgcctgctgtgcactctgccgccttgctgcgcggcacgagcagctctcttgagcacggcggcgagtcgctggatttgtctctg

SEQ ID NO: 3959 - DNA, 927 bp, Zea mays
  Clone ID: TF_ZmC29465_1
cggggcaactcggcggctgcgtctggccgccgcgctcctacacgtgcaccttctgccgccgagagttccggtccgcgcaggcgctgggcggccatatgaacgtgcaccgccgcgaccgggctcgcctccggcagtgcgccccgccggatcatgaccaggagccgatcgccgcgcctcttccagcgccggaattggcggatcaccagcagcagcttctgcaactgcatggatctcccatgaccaaggcggcagtattattctctggccgccctgctgctgcttgctgtactcatcagcaaacttattgcaataacaacagggagggggagggggaggattctcctgctcggtacatatcaacgacgacgaccatcatcaaggacagcaagagcaaggtactcatctccatacctgcagcaacgacagcaacggggagcaaaaaagccgctactactatagcaatcatcggtgaggaggaggaggaggaagaagaagaggaagagatcatggtgacggggcggaggacgaaacgaaggcggctagtccatcagccgttctacgacctgcggcggcttccgccggcatcatcatcacccaataaaggaggagttgaagatgatgatgcaaaggtacccaaattaagcagccctagtagcctcagtcatcatcttgcaggccggcaagaagaagtggatctggagctcaggcttggcactagctgctagctagtcgcgatccgccgtccggtccctaaattaagttgcgtgaatggatccatatatctctcttttcacttcaccataattaagatcgagtgtgtgcgtgcacaactgaatcatatatatcatctgctgcttgcttcattcatatatcatatatatagtatgcttctcgtgaaaaaaaaaaaaaaaaaaggcccctagggcc

SEQ ID NO: 3960 - DNA, 886 bp, Zea mays
  Clone ID: TF_ZmC13146_2
cccaatcacaccagctctctctagagctagccctctcttcctccaacacttgttgatcccctcccatctcctcaagccttcttcactgaatttctggccggtcgatcgtcatgcacagctacagagccatgcacccgtacactcatcactcgtaccagcaccacaccgcggccgttgcgcccaccaagcacggccacggccacggacatggacatggccatggcgacgaggaggacgaccagtccatgctgctcctctccctctggcctcctggccaccaccacggcaacgccgctgcttcatcggcgtgctcgtctcccccgatctgcgccagcgccaccaccacctctatggcagccgctgcctcctcccccgcttcttacccttggctcacccaccaaagcctttacaataatgccggctgcggcggagggagcagcagcagcagccacagtagcttcctgttccaggagcatcagcaggagccaggtgtcagcatctcactgtccatagccccgccgtgcagcaacaacgcggcttcgtcctgtggtggcggtggcttcgctgcaccgccggcggcaccgtcgacggtgacgacgaccgtgacgccgggcgggggccaggttcccagacagtactggatcccctccgccgccgagatcctggtcggctccacgcagttctcctgcgccgtctgcaacaagaccttcaaccgcttcaacaacatgcagatgcacatgtggggccacggttcgcagtaccgcaaggggtcggagtccctgcgcggcgccatcacggtgggcacggctccgccggcgtcgctgatgcggctgccgtgctactgctgcgcggaaggctgccggaacaacatcgagcacccgcgggc

SEQ ID NO: 3961 - DNA, 749 bp, Zea mays
  Clone ID: TF_ZmC53387_2
acaccacctgcgcatcttctttccgagcagtacgtacgtagctgaattgctgaaaagagaggcagagatccgatccggaccgcgaagagacgatgactcacccgaggccggatcatgaaccgtcgggcgaggtgtcgctggcgctggcgctgagcacggactcgtccggctccgcgggtgcaccggcggcgaagcgggcgcggcggaggggcgccgcggcggccacgtcgggggagggggagttcgtgtgcaggacgtgcagccgcgccttcacctcgttccaggcgctcggcggccaccggaccagccacctgcggggccgccacggcctcgagctcggcgtcggcgccagggcgctcaggcagcagcacaagcatcatcagcaggccggcggcggcggcggcggcggcggcggcggaggaggaggtggagacagggagccgcaggcgcagcacgagtgccacgtctgtgggctcggcttcgagatggggcaggcgctgggcggacacatgaggcggcaccgcgaggagacgacgacgggcgccgccgatgcctgggtctggcgcgccgacgacgcgctgcagcgggcccgcgggggcgccgccgacccgcccgtcttgctcgagctcttcgcctagctagctagatgatccgtagcggcggcattgattagtatataatccacccaggacatgtaaatcttcttaggccctgtttgggaacaaagtttttgaaaaccacagtttttg

SEQ ID NO: 3962 - DNA, 528 bp, Zea mays
  Clone ID: TF_ZM4161.C2.o1.fg
atgactcacccgaggccggatcatgagccggcgggcgaggtgtcgctggcgctggcgctgagcacggactcgtccggcggctccgcgggtgccccggcggcgaagcgggcgcggcggaggggcgccgcggcggccacgtcgggggagggggagttcgtgtgcaggacctgcagccgcgccttcacctcgttccaggcgctcggcggccaccggaccagccacctgcggggccgccacggcctcgagctcggcgtcggcgccagggcgctcagccggcagcagcacaagcatcatcagcaggccggcgacggcggcggaggagacagggagccgctggcgcagcacgagtgccacgtctgcgggctcggcttcgagatggggcaggcgctgggcggccacatgaggcggcaccgcgaggagacgacgacgggcgccgccgacgcctgggtctggcgcgccgacgacgcgctgcagcgggcccgcgggggcgccgccgacccgcccgtcttgctcgagctcttcgcctag

SEQ ID NO: 3963 - DNA, 859 bp, Zea mays
  unsure (1)..(859): unsure at all n locations
  Clone ID: TF_ZmC53387_1
acccacgcgtccgcccacgcgtccggcacaaaacacatcaccgcatctttttccttccgagctgtacgtatctgcagagagagagagagagagagagagagagagaaagattaggtcagagaccatgaagcacccgaggccgacggagcaggatgtgtcgctggcgctgtcgctgagcacggactcgtccacgacgacgtccgactcggcggggacgccaccggcgaagcgggcgcgggcgcgggcgcggcggcggggcgccgtggtggccacgtcgggggagggcgagttcgtctgcaggacctgcagccgcgccttcccctcgttccaggcgctgggcggccaccgcaccagccacctgcgcgcgggccgccacggcctcgacctcggcgtcgtcggcgcccgggcgctcaagcagcacaagcagcaggccgccaacgccaacgccaacggctgcgaaggaggcaagcagcggcacgagtgcaacgtctgcgggctcggcttcgagatgggccaggcgctgggcggccacatgcggaggcaccgcgaggaggagatgggcgccgccgacgcctgggtcaccctctggcgcaccgaggcgtcgcgcgccgccgacccgcccgtcttgctcgagctcttcgcttagctgattagatgatccgtagcgccagccggcattgattagtataatccacccagctggacatgtaaatcttcttagtggctgcatgcagctggttgcttgcttgctttgcttctgtaattataattacgatggtacgcacgtagttggattncnnnccctngatgattcatttggttcatcccacaatctacatgcatccgtcaaatatcatct

SEQ ID NO: 3964 - DNA, 2024 bp, Zea mays
  Clone ID: TF_ZmC205_6
tcgttcacgagttcgtctctcgatttattgtctgccacacctcccttcagctagctatcttcccctagctagctaggtaccagtagtgtgtgtatatatagatagatttatagatatagacacacacaacaagtgcaagatcaggcgaaagctactagccgcccttgcagtcttggactccattcgtcgtcgtccttgggttctcctcctcacctagctactatgttccaccatcagcaggagctcttgcaggcagaagctgcagcggcagatcgggagagcagcatgtccaacctcacctcctccacgtccggcggccccaacgcggcgcctgctgctgctgctgctgccccgccggcgcccgcggcctccggcaacaacaagcggaaacggagcctcccaggcaaccccgaccccgaggcggaggtcgtggctctctccccggcgacgctgatggcgacgaaccgtttcgtgtgcgagatctgcgggaaggggttccagcgggaccagaacctgcagctgcaccggcgcggccacaacctgccgtggaagctgaagcagcgcggcacgggcaaggaggcgcagcggaggaaggtgtacgtgtgccccgaggcgtcgtgcgtgcaccacgaccccgcccgcgcgctgggcgacctcaccggcatcaagaagcacttcttccgcaagcacggcgagaagaagtggaagtgcgacaagtgctccaagaagtacgccgtccactccgactggaaggcgcactccaagatctgcggcaccagggagtacaagtgcgactgcggcaccatcttctccaggcgggacagcttcatcacgcaccgcgccttctgcgacgcgctcaccgaggagagcgccaaggccatcggcctcaacgccatggcggccgtgccggcgcagcaccaccaccacccgatgctcttctcgccgccgcccacgcacgtcatgcagcaggacgtcgccctcctccaggagcaccaccaccaggaggtcatgcagcaggagcactgcaactacgccatgaagacggagatgccgccgtggccggggatgacctacgaccacccgctgctgcagccgctctgcaacgccgccgcaccgcagagctcggccacgtccacgccgccgccgccgacgacgatgcagcttcccgctgcctacgcgcacctatcggccacggcgctgttgcagaaggcggcgcagatgggcgccaccgtcgccggcgcgggctacacccagatggcgggggccgcgacaagcgccaccttcggcctcggcctcccggacctgcagaatacccagcagcagcagcatcaggacggcgagatcatggccgggctcgcgaggacagcctcccacggccgcggcggcgaggaaggcggcggcggcggaggcgacggcatgaccagggatttcctaggcctgcgcgccttctcccaccgcgacatcctcggcctcgccggcttggactcctcgtgcatgggcgccatcatcagtgccagcgccagcatgaactgctacgacgagccacagcagcgtgcacaggctcaggcagagcagcagcagcaaagcagcaacgagcaatggcacagcatgggcagccatcaaagctaggtcgataaaagctactttcttcttcctctcgccagccgtcatcggtacgtcgccatcgctgcatctcatcgctgccgtcgctgtgcagaggcaaagctagctagggccggccgctcggtgcaccgtgccttttgctcatcttttgcttctgttcaggatatcatctcatgcatgtggtaaccacgcaagcgatcaaaccgttccgatcaaactctagcccggtccaaggatggtgatgacagattggtgatacagaggtacgcagggagttgtataattttttttttttgggttggcgaagagatcggccaacatgtaagctaagctccaatcaagggaagaaaaccatagctatatgtgacagtaataatacatgcatgcattcatcatctttt

SEQ ID NO: 3965 - DNA, 704 bp, Zea mays
  Clone ID: TF_ZmC7589_1
ctgagctgcggcctgtggggtcggtccgctgtggcctgggtgatggtgttctaggcgagtaggtgggggcgctgttgtgatctctgcctcgtggtgttcaagacagaagctgagcttgctgtccacaagaagaacatgtgcacggtcagttcatgcagcagacatttcagatcccacagatacctgaggcgccaccagagtgcacacaacgatgatatgccttacaagtgcccatgggatggttgtaatatggctttcaagtggtcatgggatcgggctgagcatttcaaggtccatgctggggccaagccttacaaatgcacgacgcctgggtgcagcaaaatatttaagtttgtttcagatttcacccggcataggaggaggtgcaaacctcagaggtaaaagcttgcttgatactacagaattaggataatagtgaagtttgtgcttgctacagacctacagtagatgttttttatttgctaggagatccatcgtgcaactgttctgacaacttatagtgggactgtctgtttctttgttgaggaaaatgctaaaatcgttagcttagaaactcgagtttctcaaaatgtatgtacatttgcggaaggtagttgtgcactggttctggttatgatcgcgctgtatcggatctgagacttagagctgtaaatgggaaggtattatttattttattttgtttc

SEQ ID NO: 3966 - DNA, 1533 bp, Zea mays
  Clone ID: TF_ZmC342_1
tcagcctgtaaattctgataatcatgccaaatatgaagatggagatgaaagtgaaagtgtggaagcacggaacacccgacatcatcaacaatatgaatcgctaaataaaaaatcaagtttgaagaggcgaaaggataataatagaagcaacagctttcatgagctacacaaggacaatgttgacattgactgcaggtttgatacagacggcactgaaaacacctcaataggtgactgggataatagtccaccacaagggggtgatgtcaaagcagtgaaatctggtgctcgattgctaggcactaagaggtttagcaaggagaagggaagtaatggtttgtcaaatgtaaacaagaaattggtaaagatgggtaagaaaattagtactaagaagcaaaagaatgacaaaacaaataggcagtttcaagaaaatcacaaaaaagctgacattgtggatttgcttcatgaagatgatggagatgaaggcacatacatagactgtaatgaaattcgaaaacaaaaaacagatgacgtgagagtaaaatctagaggcaaaatgcaaagtggcaagaaaaaagtcagcagatgtcaggcaagtgatggttcgcacaatggaggcaaggaaatgaaattatcaagtgacatagaagtgtgcaacagaagaggagatggaacaacggcagccaattttgaagaaattccaaaagaaaaggccgatgctgtgaaagtgaaacccaagatgcaaggtgacaagaaaaaaaccagtaaacatcaggcaggcgatggagataaaggagcaaaattttcttgcgatatagaagggtgtgacatgagtttcagcacccagcatgacctgtcgctgcacaagagagacatctgtcctgtcaaaggatgcaagaagaagttcttctgccataaatacttgctccagcaccgcaaagtgcacctggatgaaaggccgctcatgtgctcattcccaggctgcgcgaagacattcaagtggccatgggcgaggacagagcacatgagggtgcatacaggggtgcgcccgtacgcatgcacggaacctggctgcacccagacgttccggtttgtgtcggacttcagccgccacaagaggaagactggcactcgtgtgacaagaaaaagaaacgcggcctttgactgctcgtgcacaagtacaggtttcttctctgacggcgagcgatcagaaggggatggatgctaatcgaataattgcgccaggttccattgtttgcagaattaatctgcattaggagtctaattcatttcattgtttattaccgctgcaacataacagctcattcactgtcgctttaggtccaactgacctgctggtgactgagattgtaccatgtcaattgtatcgttctttcgttcatacttagaaatcgggaagtttctgttgacaggaacgttggatttagtgtacggcgcctgttattaacatgcgtgtaattctgtactgaagtgctcctttcttatttttacattttttaaaatctggaaaaa

SEQ ID NO: 3967 - DNA, 1134 bp, Zea mays
  Clone ID: TF_ZmC97_2
aattcggcacgagggccaagcaaccagtaaccacagccagccaccaccgcgagaacaagtcgcagccaagagaagtcgtcctcgcgcgcgtctcgatctcccagcgaagctagagcttgccgtgtgccgtgacttccatggagctactccacgccgtcatccatggagctgcgacgacgacgacgaccaccaccaccaccaccacgagcagcagcgccaccgtcaccagcggcgacgagggcgcccacctgccccaggggtgggccaagaagaagcgctcgcggcgccagcgctcagaggaggagaacctcgcgctgtgcctgctcatgctctcccgcggcgaccgccaccgcgtccaggcgccgccgccgccggtcccgtccgcggagttcaggtgctccgtctgcgggaagtccttcggctcctaccaggcgctggggggccacaagaccagccaccgggtcaagctgccgacccctcctgccgctcatgtccagctcccggcaccaccggcagtggccctcttggtggaggcccccgcaccaccaccagtcactgccaccccgcccccgctgccgctagtcgcggtcgccgtcgccgtccgtgagccggccacgtcgtccacctccgacggggcggccgcgagcagagtccacaggtgctccatctgccacaaggagttcccgaccggccaggcgctcggcgggcacaagaggaagcactacgacgggggggtgggcagcgccgccgcgtccaccgaggtcccgggggcgcccgccgagacgtcccccgaggtcgggagctcccccgcgcgtgcgtttgacctcaacctcccggccgtgccggagttcgtgttccggtgcggcaagcccggcaaaatgtgggaggaggacgaggaggtgcagagccccctcgccttcaagaagccccgccccctcatgaccgcgtgaaacccctgcgcgcgcgggcggcggatccccccccatcacccgtccaagattttggtccgcagctgccgagttcagcggtggaagtggaacacactattcgttcattcatttcgtatggtgccagtagcgctattgtttgattttaaaaaaaaaaaaaaaaaaaaaaaaaaaaaccacaaaaacc

SEQ ID NO: 3968 - DNA, 777 bp, Zea mays
  Clone ID: TF_LIB4743-089-Q1-K1-F8
cattgggtacctcgaggccggccgggggtcctagagggagagagtctcgtcgaactcgaagggcgcatgctccggttgctagctacgataccgtgtgcgtagctgcggcagcccttgatcgatcaatcgatcgcttgtgcggaaggagccggatcgagtggagtcagctagctagatactccgtggtcgtcgttggacgtacgccagaagagggagctagagaagaataccgtacagctgcttccaacatggcagctgcctcgtctgcccacctgttcggactcggcgacgggcagatgcagatgcagccgcagcagcagcagcaggcgccacctcctcctcttgtgaacaacccggccgcggcagagccgccgcccaagaagaagcggaaccaacccgaccctgacgcggaggtgatcgcgctttcccccaagacgctgatggcgacgaaccggttcgtgtgcgaggtgtgcaacaaggggttccagcgggagcagaacctgcagctgcaccggcgcgggcacaacctgccgtggaagctgaagcagaagaaccccaaggagacgcggcggcgggtgtacctgtgcccggagccgacgtgcgtgcaccacgacccgtcccgcgcgctgggcgacctcacgggcatcaagaagcactactgccgcaagcacggcgagaagaagtggaggtgcgacaagtgcaacaagcgctacgccgtgcagtccgactggaaggcgcactccaagacgtgcggaacccgcgagtaccgctgcgact

SEQ ID NO: 3969 - DNA, 1654 bp, Zea mays
  Clone ID: TF_ZmC205_5
gcttagcccggcggccggccagaactgcaagagagaagaccaagaaacagagagagacaagcgcaggggacagcagcgggtagctagctagctagcgatcgacgacagacgatgcagatgatgatgctctctgatctctcgtctgacgaccacgaggccactggatccagctcctatggcggggacatggccagctacgccctcagccctctcttcctcgcaccggcggcctcggccaccgcgccgctgccgccacctccgcagccgccggccgaggagctcaccaacaagcaggccgcgggcggcggcaagaggaagagaagccagccgggaaacccagaccccggcgcggaggtgatcgcgctgtcgccgcgcacgctggtggcgacgaaccggttcgtgtgcgagatctgcaacaaggggttccagcgggaccagaacctgcagctgcaccgccggggccacaacctcccctggaagctccgccagcgcagcagcctcgtcgccccgtcgtcggcggcggcaggctccggcggcaggcagcagcagcagggcgaggccgcgccgccgcgtaagcgcgtctacgtctgccccgagcccacgtgcgtgcaccacgacccggcgagagctctgggggacttgactgggatcaagaagcacttctcgcggaagcacggggagaagcggtggtgctgcgagcgctgcgggaagcgctacgccgtgcagtcggactggaaggcgcacgtcaaggggtgtggcacgcgcgagtaccgctgcgactgcggcatcctcttctccaggaaggacagcctgctcacgcacagggccttctgcgatgccctagcagaggagagcgcgaggcttcttgcagcagcagcaaacaacggcagcactatcaccaccacgaccagcagcagcaacaacaatgatcttctcaacgccagcaataatatcacgccattattcctcccgttcgccagctctcctcctcctgtcgtcgtagcggcggcacaaaaccctaataacaccctcttcttcctgcaccaagagctgtcccccttcctgcaaccgagggtgacgatgcaacaacaaccctcgccctatcttgacctccatatgcacgtcgacgccagcatcgtcaccaccaccggtggtctcgcggacggcacgccggtcagctttggcctcgctctggacggctcggtggccaccgtcggccaccggcgcctcactagggacttcctcggtgtcgatggtggcggtcgtcaggtcgaggagctgcagcttccactgtgcgccacagcagccgcagcaggtgccagccgcaccgccagctgcgccaccgacctgacaaggcagtgcctcggcggccggctgccgccggtcaacgagacctggagccacaacttctaggcccgctatatacttcaagctgcattgagactttgagagacgaatgaacggaacacccaaactgcatgcactctagcttgaagagcaaccaaaactggagtagcaagtatggtgcactactgttgttaatttaccttaatttattgatctctgttagttctattttcatttagggcaatgcgggctagctaattaattcgatgtgcacaacttttgatgaatggaccagaaagtttatctt

SEQ ID NO: 3970 - DNA, 733 bp, Zea mays
  unsure (1)..(733): unsure at all n locations
  Clone ID: TF_LIB4172-014-Q1-L1-E2
gacgcctgcaggtccggtccggaattcccgggtcgacccacgcgtccgggcagcggtgcgggctttgtggccgcccggggttacccgcctggatgctgctcggcttggttccgcgccgtcctctcgccgccgagctccggattctcctgtagggagccagtggcaagaaggggatccggaagcctgaatttctggggatgaaaattcacataagatgatgtcagacgaactcacagtgctggagccctctgcctctgagtctcgggaatttcatgaagacagattggcgcagctgttggggaacccagacaagcagagcttggagagtccctcctctcaggacgggggcttcactcagatgacagtgacccactggaagattcaaacaggagacacagcccaaacgtgcagtaagtcaggaagaaaccccattctcaattcaaaccttcttatacttcagagagaactcatagatgcggaggcccgttcctgtggtggtggtggcaaaggcttcccatttaattcagatgtagttccgcatcagatctcgcacacgggggagaagccttacaaatgtgatcattgtgggaaaggcttcagtcagacctccctcctcactgaacaccagagagtccacactggggacagactctgtgtgtgccacgtgtgcggganagacttcgttcactacgcaagcctgagggagcatcagcatgtccatactggngaaaag

SEQ ID NO: 3971 - DNA, 1779 bp, Zea mays
  Clone ID: TF_ZmC13442_1
ctgccctcctttttctttgttttaggtcaacggtttttctgtgatttatgtgggaggtcttacaagtacaagcagaatatgaccgctcataaaaaatacgagtgcggacgcgagcctaaatttcaatgtgtcgtctgctttaaaaaatttaaagtcaaaagcaatttaaaagcccatttagccgttcatggattagcttcttattctttttgattcctaattttttaaaaaattatgttcctgacattttgcttccgtttactccgaaataagcaaaaaaatttttcgtcccaagggtctaatttacgaaaaaaccaaattttatcgtccaatgtatataaagactgtaaataaaaaacattttttaatgaatttgtttaaaaaatacattttttctaacattgtaaataaaccatattttccttcctccctttccttatttgtttatctttattattatttttttttattatttattattttttttaggtctctttgtatgccctcagtgtggaaggtcttatcgaaagttgggcactttgagccgccatgttaaattcgaatgtgggcgcgaacgtcaatttaaatgccacatatgttctaagccttttcacaggagagacgtacttaagcgtcatatggtcatacacagcataaatatttttccttagtttttgttttttttttctgttatattttttctgtatattttatttctattatattttatttttatttattttgttttctaatctatttttgactcctcacttttttcggagactgtcgacctgagaatccatggaaatatggggaaagccccccgcctaggtccctccctgttacaacaaaatagggctttcgcttttatgtcgctgtactcatgattttataacctgaaaattttgtttctttttttattgatctatgttgtttttagggttttattgtgaatgcggtaaaagatatttacgtttgaacacgttgaaccgtcacaggcggtacgagtgtgggaaagaaagacgtttcatatgtactttttgtaataaagcttttaaaagaaaggaccacctacaggtccacctgttatccgctcgtcattaaatatcaagtaagcgttgtttttcttgatgggcccatggcgggggctttaccgttaggccaaaaggttattccattttttttctgttatgtttttgttttaaatcaaatatttgacatttttcttttgtttttagttaagccaccatttctgtgtgtctgcgggaggaaatatcaccatctcggcaatttgactcgccataaaaaattcgagtgcggtcaagaaaaacgtttcgtctgctcaacctgtgggaaagcctttaaaagaaaagaccaacttactgcccactctattcaacactatcctcaccaataaattattttgaacattttcattttttttaaaccctctcattttttccattgattttcagcaaacaaaaattagttttaattaaaattttgtttttaatttttttccttctttttttatagatgggttattcatgtgcttccgttgtggtaaaaagttgaagaacagcaccgtcctttaccatcatgttaactacacttgtggtgtcgagccgaaatttcgatgtgaagtttgcagcaaaatgtttaaaaggaagacaaatcttaaatctcattatattgccatacatggacaagatacttaaattgtccagataattaattaattattggtttaattaaataataaataattatttttaaaaa

SEQ ID NO: 3972 - DNA, 970 bp, Zea mays
  Clone ID: TF_ZmC205_16
accctttcccttccgccgcgttcctacttggtcctagagggagagagatctcgaactccaagggcgcatgctccggttgctagctacgatgccgtgtgcgtagctgcggcagcccttgatcgatcgatcgatcgcttgtgcggaaggagccggatcgagtggagtcagctagctagatactccgtggtcgtcgttggacgtacgccagaagagggagctagagcagaataccgtacagctgcttccaacatggcagctgcctcgtctgcccacctgttcggactcggcgacgggcagatgcagatgcagatacagcagcagcagcaggcgccgcctcctcctcttgtgaacaacccggccgcgccgccgcccaagaagaagcggaaccaacccggtaacccaaaccctgacgcggaggtgatcgcgctttcccccaagacgctgatggcgacgaaccggttcgtgtgcgaggtgtgcaacaaggggttccagcgggagcagaacctgcagctgcaccggcgcgggcacaacctgccgtggaagccgaagcagaagaaccccaaggagacgcggcggcgggtgtacctgtgcccggagccgacgtgcgtgcaccacgacccgtcccgcgcgctgggcgacctcacgggcatcaagaagcactactgccgcaagcacggcgagaagaagtggaagtgcgacaagtgcaacaagcgctacgccgtgcagtccgactggaaggcgcactccaagacgtgcggaacccgcgagtaccgctgcgactgcggcaccctcttctccaggagggacagcttcatcacccaccgtgcgttctgcgatgcactagcgcaggagagcgcacgggtgccgcccatgggcgccggcatgtatggcactggcggcatggccctcggcctctccgggatggccacatcacagttgcagtcattccaagaccagacccactcctcgg

SEQ ID NO: 3973 - DNA, 2200 bp, Zea mays
  unsure (1)..(2200): unsure at all n locations
  Clone ID: TF_ZmC205_4
cattgggtacctcgaggccggccggggccttttttcgagctgagctgagcatcatggggtagtgtgtgtgtgaggcgatagagaagctagtgctcataaccaaccaccactcagtcctcctcctctaccctttcccttccgccgcgttcctacttggtcctagagggagagagatctcgaactccaagggcgcatgctccggttgctagctacgatgccgtgtgcgtagctgcggcagcccttgatcgatcaatcgatcgcttgtgcggaaggagccggatcgagtggagtcagctagctagatactccgtggtcgtcgtcgtcgttggacgtacgccagaagagggagctagagaagaataccgtacagctgcttccaacatggcagctgcctcgtctgcccacctgttcggactcggcgacgggcagatgcagatgcagccgcagcagcagcaggcgccgcctcctcctcttgtgaacaacccggccgcgccgccgcccaagaagaagcggaaccaacccgcagaccctgacgcggaggtgatcgcgctttcccccaagacgctgatggcgacgaaccggttcgtgtgcgaggtgtgcaacaaggggttccagcgggagcagaacctgcagctgcaccggcgcgggcacaacctgccgtggaagctgaagcagaagaaccccaaggagacgcggcggcgggtgtacctgtgcccggagccgacgtgcgtgcaccacgacccgtcccgcgcgctgggcgacctcacgggcatcaagaagcactactgccgcaagcacggcgagaagaagtggaagtgcgacaagtgcaacaagcgctacgccgtgcagtccgactggaaggcgcactccaagacgtgcggaacccgcgagtaccgctgcgactgcggcaccctcttctccaggagggacagcttcatcacccaccgtgcgttctgtgatgcactagcgcaggagagcgcacgggtgccgcccatgggcgccggcatgtatggcaccggcggcatggccctcggcctctccgggatggccacatcacagctgcagtcattccaagaccagacccactcctcggccactaccgccatcagcagcaacccggcggcgcagttcgagcacctcatgcagtcgtccaccggctcccccgttttccgcggcgcgcaaccgacatcatcgtcttcctcgccgttctacctcggcggcgccgaggacggccatcaaagcctatccggccacacctctctgctccacggcaacaagcaggcctaccacggcctgatgctgttgccggagcagcagcaccaggcggggagtaacggcctcctcaacctggggttcttctctggcgggagcagcggtcaggacgcgcgcctcgtgttcccggaccagttcaacggcgccgttggcgggaacgtccgcggcgacggcagcgagcacggccacagcggcgctaacacggaatcagcggccatcttctccgggaacctaatgggaaaccaccaaatggcaagcagcgcgggcttttcttcctccttgtacaactcgtccgagaccgttgcgccggcgcagatgtcggcgactgcgctgctgcagaaggccgctcagatgggcgcgacgacgagcagcggcaacgtgaactctctgctcagggggcttggtagcagcgccggcggcaccttgaacgggaggcctgccggagcagcagctgggttcatggccggcgagggatcctcgtcgaggagcacttcccaggccgagaacgagagccagttccgggacctgatgaacacgctcgcagcttccgggagcggagctgctggcacagcgttcagcgggggtttcccgggcatggacgacagcaagctgagcacgagagacttcctcggcgtcggcggcggcgtcgtgcggagcatgggtggcgcggcagggctgccgctgcggcacggtgccgcgggcattggcatgggctcattggacacagaaatgaagtaggcgaatcgaaatccgaaacgagcattattatgctccactcttgggctcttgcattgcatgcaaggtaagtagtagcagcctaagcaaacgacctatggaaagatgagaccatttgcgcccaaaataacaaatgaggccgtcaaccatccaaaaaaaaaaaaaaaaaaanaaaaaaaaaaaaaaaagaaaa

SEQ ID NO: 3974 - DNA, 601 bp, Zea mays
  Clone ID: TF_LIB3597-024-Q1-K6-C9
gggccgcactggctgtgtgaccgtgggattgtgtctgtccccttgctcagggcggcgtgcgggcgatggagcgcgcggtggagccctggggcccggatctccagggcgcagaggagagggagcagctgagaagcgcccgcacaggtatagggagtgagaatgtggagatttctcagccggatgagtttgaacataccccacaggaggatgacttggggttcaaggaagaggaagatttggccccaggtcatgaagtaggaaatgcctctctcaaacctgaaggcatccagacctgggatgacttgtgggtccagagagaggtaccaggaaaacctcaggctcgggacggaggtccccggctcttgggagagccacgttggggccaggctagtgatcgggctgccgtgtgtggtgagtgtggcaagagctttcggcagatgtcagatctggtgaaacaccagcggacccatactggggagaaaccctacaagtgtgcggtgtgtggcaagggctttggggatagctctgcccgtatcaaacaccagcgaactcatagtggtgaaaaaccctacagagcccggccaccagcccaaggcccccc

SEQ ID NO: 3975 - DNA, 288 bp, Zea mays
  Clone ID: TF_700447294H1
tgacaattcataatggggatgaaccatatgcatgtaaggactgtggaagggctttattcggggctctgtactgatgcaacatcagaggattcaagctggtgataaagcctataaatgtgaagaatgtgggaatgcctttatccgtggctcacaacttactcagcaccagagaattcacaccaatgaaaagccctatgaatgtaaggaatgtggaaagatgtttagtcatggctcacaacttactcaacatcagagaatacacactggtgagaaaccctatcaatgtaa

SEQ ID NO: 3976 - DNA, 2152 bp, Zea mays
  Clone ID: TF_ZmC205_3
gccggccgggccgggctctttgcttgcgtgtatcccccgtcctttttagcggcttctccgactccttccgatcctctcgcctcgtctccgtcgtcagtcgcctagctagcttccctcacaagcagcaaggcgggagcgaacacgccggcgaccgttagcgccgaccgacctccgcgccggcgctccgcccttgcaaagccgcagccgcgcgcttttatgctcgcggcagctcggttcgtggtctctactagcggtatcctctcgccctcggacctttctgagaaagcgaagattccggtatggaggtggaggcgacgcccacgacggccgtgtcatcttccggcgtggccgcgcagctgccgccgcccggcccgcccgccaagaaaaagcgtgccctccccggcatgccagatcctgacgcggaggtgatcgcgctgtcgcccaagacgctgctggcgacgaaccggttcgtgtgcgagatctgcaacaaggggttccagcgggaccagaacctgcagctccaccggcggggccacaacctgccgtggaagctgcggcagcggagcggcaaggaggtccggaagcgggtgtacgtgtgcccggagcccagctgcgtgcaccacgacccgtcgcgcgcgctcggcgacctcaccgggatcaagaagcacttctgccgcaagcacggcgagaagaagtggaagtgcgacaagtgctccaagaagtacgccgtgcagtcggactggaaggcgcacgtcaagacctgcggctcccgcgagtaccgctgcgattgcggcaccctcttctcccggagggacagcttcatcacccaccgcgccttctgtgacgcgcttgccgaagagagcgccaaggcgcgggcggaggcgccttccgcggaggatgggagctcggcagccgccgtggttccgccaccggcacccccgcctgcgccggcgccactgcgacagcaaccgcccccgcctgcgccgcatcatgcggagccacgtaatgagactgacacgaatgcgactgaggccgtccagttcgcgccgccgcctccgccaccgccgccgcctccgccaccgccgccgccgcagttacaggtaccggtgctttcgcaagcttcggtgagcgctgctgccaacgttggcgccagcagcagcagcagcagcgtcgcggggacgtcgcagagcctgctcggcggtatgttcgcgccgtcgtcgatggcgtcagcgccgcagtacgcggacctcggcggccggccggagcgcgcccatcccgccaagcccccgccgctgtgcctcgccacggacgcatcgtcgtcgatcttctcggcggcgccggcggtgaccgccgagcgccagcagttcgcgccgccgcctccgtccccgtccccgtccgcacacatgtcggccaccgcgctgctgcagaaggccgcgcagatgggcgccacctcgtcgagctcctcgttcctgcgcgggctgggcctggacgtctcctcgtcgtcgccgggcgcctcgtcgtcaggccagcagcaccagcaccaggaggccatgcgggtgtcactcccggacgcctcgctgcagcaatggccgccgcggctggagctggagccggcgccaatgctgtcggccgggctcggccttgggctgccgtacgactccaccggggctcaggtgagcctgccggagctcatgatgggccagtcgtctctgttcagcgggaagccggcgacgctggacttcctggggctcgggatgagcccgtcgggcgcgtcggcaggacgaggcctccccgcgttcgtccagcccatcggcggcatggccgggaccggggccggcgcagccgagacgttcggcgccgggcgtggcgcgcaggcaacgccgtgggagaggaatccgagtagctcgccgatcctgtaactaaaaacttggatagcaatgcaagtagtttggattgaaccccaggcgctgtgattttgggcaaaaggaagaggaaacagtagacgccaggttcgattagcagctacgtagtcttatgttgcactgccggttcttgctgttcttttgtttctcttagctcggtacgaagaaactcactcactctcctacaagaatgctgctttgcacttgcttcaaaaccccccccccccccc

SEQ ID NO: 3977 - DNA, 768 bp, Zea mays
  Clone ID: TF_ZM4398.C6.o1.fg
atggcactgctggtcaagagccaccaccaaatgttggtctcctcctccacctcctcgtcgtccccttccgcgtcccagcagcggcagccaccgccaccacctccctcctcctcctgcctcaccgagcagcagccgtcccccgccaagcgcaagaggcgccctcccggcactccggaccccgatgcggaggtggtggcgctgtcgccgcggacgctgctggagtcggacaggtacgtgtgcgagatctgcgggcaggggttccagcgcgagcagaacctgcagatgcaccggcggcgccacaaggtgccgtggcggctcgtgaagcgggcgccgccgcctcctgctgctgctgctggcggcggcggcggcgccgccgacgctaataacagcagcggcacaggaggtggtgcaggcggcggcgcgccccggaagcgcgtgttcgtgtgccccgagccgagctgcctccaccacgaccccgcccacgcgctgggcgacctggtgggcatcaagaagcacttccggcgcaagcacggcgggcggcggcagtgggtgtgcgcccgctgcgccaagggctacgccgtgcagtccgactacaaggcccacctcaagacctgcggcacccgcggccactcctgcgactgcggccgcgtcttctcacgggtggagagcttcatcgagcaccaggacgcgtgcaactccagccggatgcgcggcgaggcggtggtggtggccgtgcccgtgcccgtgccgccgccgtcggcgctcccg

SEQ ID NO: 3978 - DNA, 2233 bp, Zea mays
  Clone ID: TF_ZmC1295_1
cattgggtacctcgaggccggccgggcattgttggactcctgccgggagtcggctcgagcgagagcgagagagagagagagagagaggagagagagagagagagaggagggagggagctcgagaggtcaacgagggggagctggcaggaaggctcggggctccttcctcctataaacccaccgcacctgccttacaggctcccattttctcggccgggagccgcaattccatcctgctgctagagttacatactcacccaatagaacaattctatgcccggtgattgtacctcctgaagtagaagagcatactgaagcagaactcgagtggtgttggatcgaaatggaaggcgggatgtcaagtttggaagccgccatgaaagcttcttcatcgatggcaagcagcatggcaaggaatgctgaccctaaccaacagactctccgccccaatttagtggagcagttctattttccaagacctggtcaatctttgccaggcattcctccattttttgggcctccctctagtttgtatcttcctaatgacaatgaagctaaatttggcaacaactttgaatcaaatccttcacagaatacagattggaacccacaggcaatagtgagcaacctaaccttccttgagcagaagatcaagcaggtaaaggatattgtgcagtccatgagtaaccgagagaaccaagtagctggtggttcctgtgaggtagctgcaaagcagcagctcataaccgctgatctcactagcattataatccagctcatatctactgcgggttcgctgctcccttcaatgaagaatccacttcttagcagcaatccagcagtcaggcagcttggcaacactcttggttctcctacgggctttggcatgaatgctaatcagcgaccaagcgtagacagcaagactgatattcctgacacaggaaaaacttctgattatgatgaactgatgaatagccttaatcctacccaagctgaaagagatgagatgatcaaatgtccaaatccctgtggtggggaagggtctgaaccgactccgatggaggaccatgatgtgaaggaaagtgatgatggtggtgagggagagaatctcccccctggttcatatgtagtcttgcaattggaaaaggaggagattttagcaccacatactcatttctgcttgatctgtggtaagggtttcaagagagatgctaaccttaggatgcacatgaggggccatggagatgagtacaaaactccagctgctcttgccaaacccacaaaggattcaggtgcagatcatgcacctgttacaaggtactcatgcccatttgtgggttgcaaacggaacaaagagcacaagaagttccaacctctcaaaacaatcttgtgcgtgaagaaccactacaagcgaagccactgtgacaagagttacacctgcagccgttgcaacaccaagaagttctctgtcatcgcggacttgaagactcatgagaagcactgtggtcgtgataaatggctctgttcttgtggaacaaccttctccaggaaggacaagctttttgggcacgttgcccttttccaaggccacacacctgcgcttcccatggaagatgtgaaggtatcagaagcatcagagcaacctcaggacagtgagccgatgaatgaaatggcgaggagcaatgtgtatagcttcccctgtagttcgtctgatggtatatcgaacctcgacatgaaaatggctgatgatgtgcgtggttatttctcgccgctgaactttgatccttgctttggcgcgctcgacgatttcactcgccctgggtttgacatctctgagaaccccttctcattcctgccttcaggatcttgcagttatgggcagcagaacggagatagctgatggatgccgccatcgatgatgacgacaacagcactgccaacctttatttatgttgttgcatgatgctagcttggttcttcctctgttcaagagccatttgaggttatgcctttatattttccctaaatgtacttacgtttgtggtcattaataatgatcaaggacttctagcatttcttagacccagatagccccaattttcagtatacatacgcaagtattgcttgttcattttgtctgaatcggcgtgatgcttgtagcactgacaatttatcataacaagctgctcagctattaaaaaaaaaaaaaaaggggactagttctagatcgcga

SEQ ID NO: 3979 - DNA, 1110 bp, Zea mays
  unsure (1)..(1110): unsure at all n locations
  Clone ID: TF_ZmC205_8
cattgggtacctcgaggccggcccggggtgtgcataggcgcaggggggaaaattccagaaattgatttatagtggggcatattagatgtgggagaggaaagcagcaggagagaagagagagaaggaaaagtatgacaaggaaatgagagaaatgggagaacagccttcttagcctctccctccatgcatcctctctccaccactgctatctctcagtagcaagagcaaagcaagaggagagcgagctagcggtaccagggagagtgagcgaagaaggggaaggacgaagaacactgccgaccctattcctagcaacgggccaaagcgaccagctgcaggaaggagaagcagtgttggcgtgttcgagctggtggtgccaggataaatcgggaggaagtgatggcatcgaattcatcggcggcgttctttggtgttagggatggggaccagcaagaccagattaagccgctgatatcaccgcagcaacagctggcagcggcgctgcccggtctggcaggcggtgttcctgcggcgtccggccaaggcgcgccgccggcgcagccaccgcccaagaagaagaggactatgcctgaccccgacgctgaggtgatcgcgctgtcgcccaagacgcttatggcgaccaacaggttcgtgtgcgaggtgtgcaacaaggggttccagcgcgagcagaacctgcagctgcaccggcgcgggcacaacctgccgtggaagctgaagcagaagaacccgctacaggcgcagcggcggcgcgtgtacctgtgcccggagccgacgtgcgtgcaccacgacccggcccgcgccctcggcgacctgacggggatcaagaagcacttctgccgcaagcacggcgagaagaagtggaagtgcgacaagtgctccaagcgctacgccgtgcagtcggactggaaggcgcactccaagatctgcggcacccgtgagtaccgatgcgactgcggcacactcttctccaggagggacagcttcatcacacaccgggcgttctgcgatgcgctcgcgcaggaaagcgcgcggctgccgccgacgagcctcagcagcctcaccagccacctntacggcgcgaccagcacg

SEQ ID NO: 3980 - DNA, 1673 bp, Zea mays
  Clone ID: TF_ZmC1140_2
ttttccggccgggccgggctaacgctcctgtcacatgacatatgctaaaggtctagtctgagattgcgatgccacttttttcaacaagttgggcgtctgctgttctagtcatatttgataattgatgaatttacactgcaatgctgtttgagtatatctagctgtcaccgtttgatggccctcattattgacaggatagatttagcaggcatagagagacacaattcctgttctgcatagtttatgtgctcgactttagttatgtgttcactgaaatgattggatcatgatcttccttagttgaattatacattccctgccaaaatcaaattgattttcatttgaaggtgagttatgcggatacggtgtgctgctatttgcccctgtatttggggactggtgtacgacatttgatttgctggtttttgtaggcaatttgttgacatatgaatgcgtgaagcattggatcccaaagaactccaaaatgcgataaggccttgaatggactagtatcaggattgggagaccatcctgagaagctccatcaagcatgccttgttcacgcgtttcttaagaggcccttttcctgcactgttgatggttgcccctttagctatagcaggaaggatcatttgaacagacatttacttactcatgaagggaaactatttgtgtgccctgtcgaaggatgtggccgtaagttcaatatcaagggtaatatgcagagacatgttcaggaaatccacaaagatgtctctccttgtgaaagcaagaaagaattcatctgtccaaaggttaactgtgggaaggctttcaaatatgcttctaagttaaagaagcacgaagaatcacatgtccagctggaatacacagaagttatgtgctgtgagccaggctgcatgaagttcttttcaaacatggaatgcctgaaggcgcataaccaatcttgccatcaatatgttcagtgtgatatctgtggtacgaaacagctaaagaagaatttccagcgccatcatcggatgcatgaaggttcctgcgtcactgagagggttaaatgccacatcgaggactgcaaatgttcgttctcgaagaaatccaatttggacaagcatgttaaggcggtacatgagcagcgtcgtccttttgtgtgccaattctctgggtgtggcaagaggttttcttacaagcacgtaagggacaatcatgagaagtcaagcgctcatgtgcacactgagggtgattttgtcgaggctgatgagcagcggccacgttcagtaggtgggtgcaagaggaaacccgtatctgttgagagtttgatgcgtaagagggtagccgctcctgacgatgggcctgctcatgctgatgcaactgaatatttgagatggcttctgtcggtttgattggacgttcaagtgcactttgtgtagttggaaacatcagcgatttacttggcatgtataggaagatgaatgtctctagtatgttatgtaaatgtttatgtacggtatcagaaatacagatcattggacctcaattataaaggcaatatgctgtattggcaagatcttgaatgtaagagcggttgctcatgatcattagatctatgtgtcttcagcacagcttggcaacatgttttggtatgttcgcaaaaaaaaaaaaaaaaaaggccccta

SEQ ID NO: 3981 - DNA, 1295 bp, Zea mays
  Clone ID: TF_ZmC104_51
agggaattagttaatttcttaatgataaccaaattgctgtcagggaaccaacctaatcgtgggctctatagaatccgtttactaatggaattgtgagcacagaccaccatgggttttgggtgctaaactgttaaggcattgttcgtttgtatcggattgcacccggaatcgttccacctaatcaaagtttatataaattagagaagcaatccggttaggaattgttccgacccaccgatccggcagaaacgaacaaggcctaacggaatgtacaaactttctcctattccttccaagaaccaagactagtgtaagttactgctgctttgccttacttctttgctttcgcctttggacgcatgtcctgcgcttgtggcggctgaaatcagagacgaacctgaacgtctgtccgcacccaggttcaaggcaaacgtagggcctgtcgcccgtgtggaccctcatgtgctctatcctagcccatggccacttgaacgccatgctgcagcccttccacgggcatttcgtggacggtcgtcggcgtgaaccttgcgatgctgcagcagatacttgtgcgagaagaacttcctgcagcagcccttctccgggcagatatcattcttatgcagagacagtgcctgtttcgtgccgaaactcatggaacagccctcgatgtcgctcgcatattcttccttgcgttctggagaacttgggggagcccttcccctgtatctggattcctccgtctgctgcttttcttccgttttagcccccttcttacgtagagacagacgttgtttagtgatagaacatccctcagcatcatatgcttgctcttcttcatccttctgagaagctggactaggagcccttcgcttttctgctctagtttcctttgttttcttcttagtgtctgctttagtcttttgccttggtgattttgctcttgaacggccagcaggattatctttgtcgccttcagcctttggctttggagggttagctgagccattatcctcttcttccatctttgatttcctattggcaatcctagagctactgcggactaccatcccagctggtgcggggaaggaagcttctgaaggaccttttagtgcttctgaaaccttttcagtatgtttgagcttcttggtttttgctttttccacgtgttctttctccttcttgattgttttttctagaactgatctgctctttatcttccgtgtggaggcctcagcagtaccctctagtgatttggaattgtcctcttcagtaaattttggcggacgcgtggg

SEQ ID NO: 3982 - DNA, 2251 bp, Zea mays
  Clone ID: TF_ZmC205_2
gccggccgggctacctagccacgcatcactcttgtcctattgaacatacgctaactaatttctctatcaatccatcctttgcaaccttggtgctaaaacaacgtttgtcatgcatacctactatctctttctcacacaagtctcttctccgttttcactctcttgctagctcctctttgtccttcagatcagatctctcagaagagtagagtgcctgccagtgccatgtcgctgccagtcacacagcccattgcatgagcagaagggcaaggaagcttgggagggtgtaagctgaggatcggtgacgtgcaaatgcggccacggggaacctctctgcaacaaagctccgcatctgctctcggcgacggcgatgcggcgctaccgaagaagaagaggaaccggccaggcaatccgaaacctgatgcggaggtgatcgcgctgtcgcctcgaacgctgctggcgacgaaccggttcgtgtgcgaggtgtgcagcaagggcttccagcgggaccagaacctgcagctgcacctgcggggccacaacatgccgtggaagctgaagcagaaggaccccaaggacgcgcgccggcgggtgtacctgtgcccggagccgacgtgcgtgcaccacagcccgtcccgggcgctgggcgacctcacggggatcaagaagcactactgccgcaagcacggcgagaagaagttcaggtgcgacaggtgcagcaagcgctacgccgtcgagtccgactggaaggcgcacggcaagacctgcggcgcccgcgagtatcgctgccactgcaacgccctcttctccaggaaagacaacttcatcacccaccgcgctacctgcgacgcagcagttcgtgggaccgcccagaagccaccgctggtcgccggcctctacgtcggctcaggcagcgatgataggctcgggctctccgacgccgccgcccagatgcatggcttcgcagatcaaggccagtcctcttcagcagcagaagcctcacagtttgaccatgtcatgccatcgtactcgggctcctccatgttccgttctcaggcgtcagacttctcgttgtctttcttcctcggcggcggcactcctcttatcgaacaagacctgtccgacaacggtggtgatctctccgaaggcagccagggccctctgctccatggcaaggcgcccttgcatggcgtgatgacgcatctccccgagcagcagtatcagccaaacagcggcaacgccaacgttaacctcctggacattgggttcttctctggcaacagtggtggcacgtctggcagccagggccctctgctccacggcaaggagcccttccatagccatgacctgacgcaacttcccgagcagcagcaccagccaggcagcagcaacgcccgcgtcaacctccctaaccttggggtcttctctggcaacagcggtggatggcccggaagcagccatcaggacgcgcgccttgtcatccaagaccaactcaacggcggcagcagcagcaacaccgagcatggtaacgggatggcgtccatcggaagccacttcggcggaggcttcgtcccttccctgcacaactcatctccgtcggccgggctctcagcgacggcgctcctgatgaaggcggctcagatgggctcgacgacgtcgagcaccacccacaaccccaacggccccagcgcgctgctccgcgcagccggcttcgcaggcactgccagcgtccgggagactagtagcagggcagcggaagaagagaagtctcacgaggcatatttccatgatctcatcatgaactcactgccattaacgggaggaggcaccggcggcctctcagggttggcgggcgtggacgacggcaatgtgagcacaagggacttccttggcgtcggcagggacgacgcgacggcaccgcagggcctccacggcatgggcgccccgaatccgacccagatgaaatggtacatgtgatggatcaggtcggaaacgcgaaaagaggaagacaacaagaagatgcaagctaagaagggagtcaataaacagaacagaagatcgtgcactagctagtgagtggcgatcagagagatcgagaaaacttaatctagttttgtttcgtggattagttcacttttctcatatgccgcccgccatgattgatatggctaatagtaacagggctgcaagcaatgcagctgctgaacttgttcattgcttttatttcggtacaattttgtggtgtttttcc

SEQ ID NO: 3983 - DNA, 1655 bp, Zea mays
  unsure (1)..(1655): unsure at all n locations
  Clone ID: TF_ZmC3754_1
ggcatggcatccataggcatacatctcctcgcggagcctggggtggggcggtcaccaccatgcctaatcctatcgcaccaaggagtctgtctcgtgctcctcgtagtcttcctacccacccctccacccccccccccctttgcccccaatccctagccctgcccctctcctccagcgccgctcgccagctctctgcccccgccgcgcccagagatgcagatcccccaccgccgttaccgctgggtgaaggagtgggtcccgcaagatctggtcgtcaccggaggcccctgcacgctctacaagtgggtgcgagaggacagactagcagctttgaaggctaaggacaagaagcatgggggcagaatctgcaactcctgaacccaactctgaggttctcttcctgtgcagctacgaaggatgtgggaagacattttttgatgcaggggctcttaggaagcatgctcatgtccatggggagaggcaatatatctgtcactatgagaactgtggcaagaaattcttagatagttctaagttgaagagacattttcttattcatacaggagaaaagaattttgtgtgcccacatgaaggttgtgggaaggctttttcgttggattttaatttaaaggcacacatgaaaacacattctgcagataactatcatgtgtgccagtacccagaatgtggccgaagatttacacaagaatcaaaactgagagctcatatcagggcacaacatgagaaagctgttggcttgcagaatccaggtgcgtcatcaatgaaccacagtgcaattggaggtccgcaccagccccctaagccagcgaaggtctcagcagcacctccagctccctcagctgagcgcccttacgtctgcccctacgatggttgtgacaaggcatacatccatgagtacaagttgaacctccatctgaaaaaagagcatcccaaccactaccaggatggtggtccaaatggtgctgccgccccttcaaagcgcagcatctcgaagagttcccacaggagcaagctggacatcacctctaggatgccaccggccaacatccccaagcacagagggtatgcaacaccattgccagctgtggtgagcctccctgaggagcagcagttgctaaggaaagtggtgtacgaggatgacagcgaggagactgaagaagagggggataacaatggcgaggacagatggaactacaagagagctgctagcagcgacgacgaggaaaccgaagacgaagaatgagctgctagcagggattcatttttttttcttctgtagctgtgcatataccataatctatagactggtggttatagatttcaatacatgtacatttttaaaatacggctggcctatagtagacaagaggttgttgctgccatgccccttctcaactacacaggccatgagttcagaaaggataatggatcattgctcccgtctgcctgtgtttgtgccttttggtttgttgtcataaatgagttctcagttatcgtagccctgattgagtggatgtcaacagatctcgtcaaccgtacatttgtatgagcatgccatgtttactttgagaaatttatgcatccaccggtttcagaaaaaaaaaaaaaaaaaaaannnnnnaaaaaaaaaaaaa

SEQ ID NO: 3984 - DNA, 595 bp, Zea mays
  Clone ID: TF_jC-zmX700083408a1
ccttaacaaagaaacaggcaatcccactataagttggcagaacagttgtgcgatggatctcctagcaaataaataaatagaacatctacagtagcaagcacaaacttcactgctatcctaattctgtagtatcaagcaagcttttacctctgaggtttgcacctcctcctatgccgggtgaaatctgaaacaaacttaaacattttgctgcatccaggcgtcatgcatttgtaaggcttggccccagcatggaccttgaaatgctcagcccggtcccatgaccacttgaaagccatattacaaccatcccatgggcacttgtaaggcatatcatcgttgtgtgcgctctcgtggcgcctcaggtaactgtgggatctgaaatgcttgctgcatgagttgactgtgcacatgttcttcttgtgggcagcatgctcagcttttggcttgaatgtcatgtggcagtaatcaattttacattcaaatatatttctcttcatctttgtaaccttgcttgcagctgaaatatccataaggtctttcttatgtcggcaatgttacatctatggacccggctgttgacaagacactttacaac

SEQ ID NO: 3985 - DNA, 1603 bp, Zea mays
  Clone ID: TF_ZmC13313_1
gggtacctcgaccccggccgggcgtctccggcgccgtcaaccccgcgacgcgcaaaggtgagcttcgacccgaagccgaaccgatcgagaggcccagccgccgcaaccggaggagagagagaggcggatacacaaacacgaaaccctagcaagcaagccctccacgcacagtcaagaagggagggggaggcgatggagtacccggcgacggccgccggatcggggagccacaagtactactacccgcagcagcactcgcactcacagccgcaggcgcttcgccgcccgccgcgccccgccgctcggtgggtcaagcaatggatcccgcaggatctcgcgtcctccggcggcaaatgctcgctcttcaagtgggtcagagaggatgggtacagaaactccaaggacaaccccagagtgttagatgtagaagcccccaagcctgaacccaccacggagatcctcttcctctgcagctacgagaactgcggcaagacctttgttgatgtcagcgcgctccgcaagcatgctagcgtgcacaacgagaagcagtatatatgcaacgagcccaactgtgggaagaaatttgttgatagctccaagttgaagaggcattatcttacccacacaggacaaaaggattttgtctgtccacatccaggctgtggtaaggccttctcattggattttaacctacggtcacacctaaaaacacatgcattggagaattatcacatatgccctttcccagcatgtggcaaaagatttacaagtgacttcaaactaggagcacatgtcaagtcacatgaaaagactggaactcctattgcagtgcagcatgcgccagcgccaccagcagaaaaaccgcgtgtcgccccaaagcctccgactccagcaaccacaagctatgctgatcggccatatgtctgcccctatgaaggttgtgacaaagcatacattcacagttacaaattgaaccttcatctaaaaactcagcaccctgaacacggtcaagaggaaaacggtaaggtcggtgcttctggtgggcagcatgctgcgaacgaacacacttaccagtataactatgccgaggttggcgagattgcaccaaaccccaaaaggagcaagacgaatcatgggcacaaggtccactcatccaaagcctacaatgccaaggtttcgagagcaatgccttctgacattggcgtcaggaaccagtggccaggtaaagctacgtaccaagatgatagtgaagagacggaagaagatggaggcaacaacattgaagatggctggagatatggcaacaatgatgacgatgaggaaacaccagatgaagattgacctttatttaggtttggatatgtagatatatgagggtgatctgttgtcctttagtttcaatgcagtcatggggaagttcaagctttaaccttaggtagtagttcattcagatggtgcatggatatattgtactcagttacctgctcctaaatgctttcactcccctatcttccagagccacatgtattttagatagtttggatatgtttgccttggaataaattttcatttgaaatgttaaaaaaaaaaaaaaaaagcggcc

SEQ ID NO: 3986 - DNA, 288 bp, Zea mays
  Clone ID: TF_700017019H1
gtactgattcaaatgtgtgtcgagtatgcaaggagagtttctctaccaatatgcttctgatagaacatgccaaactgcatgaagaggatccctacatttgtaaatactgtgattataagacagtaatttttgagaacctcagccagcacattgcagacacccattttagtgatcacctctattggtgtgaacagtgtgatgtacagttctcctcaagcagtgaactctacctacatttccaggagcacagctgtgatgaacagtacttgtgtcagttctgtgaacatg

SEQ ID NO: 3987 - DNA, 1480 bp, Zea mays
  Clone ID: TF_ZmC22728_1
gtaggccgcgaacctttttcccattatctaaaaaatctatctccaagccatgaactgcaaaagtcagaagaagcagctgagtcagtaacaataacaagtaatcctgatctgattcccagcagaagcttctttctgtccctccaacggaatctgtccatggttcatcaaccatgcgtgctgccgtggcacggcgtcgactcggcgcgaatcgacgccgtctgcacttgcctctgtgcccaatcatcgtcgctactgcacgccgtagctgcgaatcgatccacataaaacaactccgtctccagcctagctaatactaacagctatagagctgagtgactgacacccattggcggctggactattagtttatgcttggcgtttgtaatgctcggcctataaatacgcctgctcagtgatctgatgctccttcattcagatatatacagataagattttcttgctagcctcgaatcgcgatcgagtagctcatcagctgattcacaagtgcaagcatttgatgaagaggtttgcagttcaggagagcgagatggcgcgcatgctggtgctcatgtcgcgctcgcacggccaggaccaggcgctgccactgtcggcctgcctcgccggcggccagcaaggcgaggaccggcaggcgccggagcgcgtgttcgtgtgcaagacgtgcaaccgcgtgttcccgtcgttccaggcgctgggcggccaccgcgccagccacaagaagccgcggctggacggggacggcggcggcgacccctcgctcgccaagcccaagctgcacggctgctccgtctgcggcctcgagttcgccatcggccaggccctcggcggccacatgaggcgccaccgcgccatgacgggcggcgtgccggcggtgccgcccgcgacgacgaggatcgtcgtcgacgagaagccggacggcgacgtcgtcggcatcatccgccacgaccacgtccacgaccacggcggcgtcaagcagccccgcggcgggctgtggctcgacctcaactacccgccgtgcgacgacggccgcgacgcggtggaggcggagtgtggccgcaatgccgccgccgccacggggatcacgttccatcagttcctcgacactgccaccatggccgtcgactgccttggctactagatagatagataccaccaagctccatgattcttctcccctgccgcgtactactggtgcaccggtctcttcttcttcttctttcttttcttttctggaatcttcttcctcatttgcttctgcgcggagggggagaaatccacattttgtagcagtagtagaatgaaggtgcctactgcctaatgcatgcatgggcatggctgatgtgcatgaaggttttgggatgtctttgagctgctcggtggataatctggaggattgattccaccaaagctagcttattttgccatgggtttcatgttattatggataaaaaccctttggtcc

SEQ ID NO: 3988 - DNA, 798 bp, Zea mays
  Clone ID: TF_ZmC119244_1
gtcagcaaacttccgtcgatctctctcgatggtcatgacgcttacgagacacgactcgggagagagcaaggagatggagggcctccgtgcgcactccgaggccgcgctgctcacgctgtcgtcgacgacgacgggcggcaccggcaccggcaccggcaccggcacggccgcggcggcggagggcgcgttcgagtgcaagacgtgcagcaagcggttcccgtcgttccaggcgctgggcgggcaccgcaccagccacacgcggctgcaggcgcggacgctcgtcggcgacccggccgagcggtacgacgacaggccggcggcgcgggtgcacgagtgcgccgtctgcggcctcgagttctccatgggccaggcgctcggcggccacatgcgccgccacaggggcgagggcccgccgccaccggccgcgcacgacgacgacggcgacggccccgcccagccggaccgggacatgcccgacctcaacctgccgccgttggacgacgacgatggcagccaagcaggttcacggcagtcgggcggtggtcgcggctccgggcctcagctgctcaacctgctcgtatagcgtgcgtggcgtgcacagattgtggttcggatcgagatgtaaatgaatcgtggcttagattttggaacctactacacgtgagatggaattcttcgatgacgagcttatttagttccataggttgttcctggttttagttggtttgctccttcgtgtaatgcctattgttcggttcaattcatttgttgtgagtaaaatatactctcacattagac

SEQ ID NO: 3989 - DNA, 830 bp, Zea mays
  unsure (1)..(830): unsure at all n locations
  Clone ID: TF_LIB4756-101-R1-K1-A3
ctcgaggccggccgggcctttctacgaatgcgcccgcacaataccgacaaagcgccaacaacatgtcatcgatggttgaccaaacgcccgagtttcctgcacacatgacatctatggagtctagtgcgagcgaagcggagccgcccaatggcagccaaaacagcgtgctatcggaccggtacatgagcaagccagcgtcaacgggcgccgagtctggcacatactcatgcacatatcatgggtgctcgcagcgatttgaaacaccgcagaagctccagaagcacaagcgcgagggccaccggagcgccaatctcagcacggctatgacgtcggcggctatcctagaacgcaactcgcaagcgggaccccacaagtgtgagcgcatcaacccaaccactggcaagccttgcaacactgtcttctcccggccatatgacttgacccgtcacgaggacactatccacaatgcgcgcaagcaaaaggtgcgatgtgcactgtgcgtcgaggagaagacgttctcacgcaacgacgcattgacaaggcatatgcgtgtcgtgcaccccgaggttgattttcctggcaagcatcgcagacgcggcggcaaccacgactgagcgagcgggctttgacgaggtgcgcggaaccgaccgaagaccgcggagaccgtgcccttgcagccccaggcctgcctgcctgcacatttcagaacagccgggaccgttggcctgcatgcagcccacgcaccccaacacagncaacgtgacgcacagaatcttcgatgggcatctcgactgcgaagactgtgtgatggctgcaggcatggctttact

SEQ ID NO: 3990 - DNA, 282 bp, Zea mays
  Clone ID: TF_700346018H1
atcagagagttcatacgggagagagaccttacgtatgtaaagaatgtggcaaatcttttactaagtgttcaactcttcaaacacatcaaaaaattcatactggagcgaaaccttacaaatgtagggaatgcaacaaatcctttacccaggactcacatcttagaacacatcagagagttcatactggagagagaccttacatatgtaaggaatgtggcaaatcttttactaggtgttcatatcttagagcacatcagaaaaatcatactggaagagaacgta

SEQ ID NO: 3991 - DNA, 1453 bp, Zea mays
  Clone ID: TF_ZmC97_1
attaccgcaaggaggtctcgggcggtcggggccggatcgcccacctcgcaccgtctcaccacagcgagcgagagcaaggcgcccaagcaaccaccgcgagaacaagtcgcagccaaacagccccgtctcccagcgaagcttgagcttgcattattctaccatgtcttccatggagctgctccacgccgtcgtcccggagaagcagagcgaggaggaggtcgcgcccgcagcgacgaccacgagcagcagcgccaccgccacgggcggggacgagggcgcccacgtgctccaggggtgggccaagaggaagcgctcgcgccgccagcgatcggaggaggagaacctcgcgctctgcctcctcatgctctcccgcggtggccaccaccgcgtccaggcgccgccaacgccggtcccgtccgcggcgccggccgccgcggagttcaggtgctccgtctgcggcaagtccttcagctcctaccaggcgctggggggccacaagaccagccaccgcgtcaagctgcccacccctcctcctcctcctcctcctgctgtaactgtcccggcagcagtgcccgtcccggaggcccccgccccgaccaccgtcgtcgtcccgccgctgccgccagtcgaggtcggccgcgagccggccacgtcatccaccgccgcgtcctccgacggggcggcctcgagcagagtccaccggtgctccatctgccacaaggagttcccgaccggccaggcgctcggcgggcacaagaggaagcactacgacgggggcgtcggcagcgccgccgcgtccaccgacgtcccggcggcgcccgccgagacgtccgccgaggtcgggagctccgccgcgcgtgcgttcgacctcaacctcccggccgtgccggagttcgtgttccggtgcggcaagcccggcaagatgtgggaggaggacgaggaggtgcagagccccctcgccttcaagaagccccgcctcctcatgaccgcgtgaaaccgctgcgcgcgcgggcggcggatctcatctcatcacccgtccaagattttggtccgcagctgccgagttcagcggtggaagtggaacacactattcgttcattcatttcgtatggtgccagtagcgctattgtttgatttttgtggctgctcctcttgtacagtaccgagtgcgagaaaagatgcatagtcatcgtatacataccaatacaataccgtacctataggtcttcctattcctgtggaagagtagaacttgtatccttattagctgtcagttcatacacacttggttctcattaccagagatcattggtgaattagtggttttgtatcataagcttattgtaaatgatggattggagattagtatggaatcagataccccatttgttccaaacctggttcaagtcccagacttttttggatgttcggtggaacactattcgttcgttcc

SEQ ID NO: 3992 - DNA, 831 bp, Zea mays
  Clone ID: TF_ZmC3585_1
ccctgctaaaccacttgctaaaccagcggaaacctaaccagctagcagcattagcttttcaacaagcctcgctcgcgcgccgtgaccgatagatggccatcacccacgacgactacgtctccctgtgcctcatggcgctcgcagccgcgggaggaggaggagggcacgctgcggctgccagtgccaggacgacgacgatgacgacgcaagagtgcgagctccgcttccggtgctccgtctgcggcaaggccttcgcgtcgcaccaggcgctgggcgggcacaaggccagccaccggaagccgccgccgacgctcgtacaggcggcgtcgtcgtcgtcgtcggtgacgacgaatacctcgtcggcgggcggcagcggcgccgggcaggggaggcacaggtgctcggtgtgccaccggggcttcgccacggggcaggcgctcggcgggcacaagaggtgccattactgggacgggctctcggtgtcgctcaccgcgtcggcggcgtcggggtccgcgtcgagcttgaggggcttcgatctgaatttggtgccggccgccggcgcggcaaggtggcgagaggaggaagaggtgcagagccccttgccggtcaagaagcggcggctgtcctccggtccttccaccgaacttagtttaacgatttagagttccttttggcgatctgaggcttgtagagtgttttcgttgcttcattcttttaaccgtattttagtttttgtgtttgcgcggtgaataaacgtgtatttaattttgtcgagccatatatacttgagataaaagccataggccatataggcatctaccaattgaggtt

SEQ ID NO: 3993 - DNA, 1489 bp, Zea mays
  unsure (1)..(1489): unsure at all n locations
  Clone ID: TF_ZmC1140_1
ttttggcttgttctcccactaacgcttggcgacgcacgagtcnagggtttctcgcctgcgcggcggctacctctctccacggcggcggcgggcgatcctgcagatcccgcggctccctccgcgattcgagactcagatgggggaaggcacagagagcggcggcggggcgaccacagcgccgcctctgaggtatataaggtgctacaagtgcgggttctgcgacgtggtccggtccaagaagtgcttgctccgcgcccacgtgcttgagcaccacaaggatgaggtggatgctttggggggttactgggaaggtggagatgctggtccgcgcaaagagatcagccgtgcgtgcgaacagtgcgggatgagcttcaagaagcaggcgcatctgaagcaacatatgcagagccattcgctcgagaggcccttttcctgcactgttgatggttgcccctttagctatagcaggaaggatcatttgaacagacatttacttactcatgaagggaaactatttgtgtgccctgtcgaaggatgtggccgtaagttcaatatcaagggtaatatgcagagacatgttcaggaaatccacaaagatgtctctccttgtgaaagcaagaaagaattcatctgtccaaaggttaactgtgggaaggctttcaaatatgcttctaagttaaagaagcacgaagaatcacatgtccagctggaatacacagaagttatgtgctgtgagccaggctgcatgaagttcttttcaaacatggaatgcctgaaggcgcataaccaatcttgccatcaatatgttcagtgtgatatctgtggtacgaaacagctaaagaagaatttccagcgccatcatcggatgcatgaaggttcctgcgtcactgagagggttaaatgccacatcgaggactgcaaatgttcgttctcgaagaaatccaatttggacaagcatgttaaggcggtacatgagcagcgtcgtccttttgtgtgccaattctctgggtgtggcaagaggttttcttacaagcacgtaagggacaatcatgagaagtcaagcgctcatgtgcacactgagggtgattttgtcgaggctgatgagcagcggccacgttcagtaggtgggtgcaagaggaaacccgtatctgttgagagtttgatgcgtaagagggtagccgctcctgacgatgggcctgctcatgctgatgcaactgaatatttgagatggcttctgtcgaaatacagatcattggacctcaattataaaggcaatatgctgtattggcaagatcttgaatttctcattgtgcagaaccacagcactcttcattccgatttgcagatgcacgtgaccaaaaaagataatttgcagatgcaccatgaacccgtggcaccagatgcccgtcagcagctggcacccgtccagctcgcgccggagagcctccaggcggaccagctccgccgccccgcggatcgattggactag

SEQ ID NO: 3994 - DNA, 266 bp, Zea mays
  Clone ID: TF_700582866H1
ccgatcttttcgtgatgtctaatcccatgagagaagtcacactggagagaaaccctttgtgtgtacagaatgtgggaaagccttcagttattatagctctttccatagacacagaagaactcaccagacagtaaccttgaacacagagcttgagaagacttcataacacccataagattgcatatggagtaaaactgtaaaagttaagcgagtgaaacacctggttctactcatgggtacaggacctttaggccagacatggtgtg

SEQ ID NO: 3995 - DNA, 1162 bp, Zea mays
  Clone ID: TF_ZmC3754_2
ggacagactagcagctttgaaggctaaggacaagaagcatggggcagaatctgcaactcctgaacccaactctgaggttctcttcctgtgcagctacgaaggatgtgggaagacattttttgatgcaggggctcttaggaagcatgctcacgtccatggggagaggcaatatatctgtcactatgagaactgtggcaagaaattcttagatagttctaagttgaagagacattttcttattcatacaggagaaaagaattttgtgtgcccacatgaaggttgtgggaaggctttttcgttggattttaatttaaaggcacacacgtgaacgctgtcggcagataactatcatgtgtgccagtacccagaatgtggccgaagatttacacaagaatcaaaactaagagctcatatcagggcacaacatgagaaagctgtttgcctgcagaatccaggtgcttcggctatgaaccatagtgcaattggagaacagcatcagccccctaagccagcaaaggtctcagcaacgcctccagctccctcagctgagcgcccttacgtctgcccctacgatggttgcgacaaggcatacatccacgagtacaagctgaacctccatttgaaaaaggagcatcccaaccactaccaggatggtggtccacaaggcgctgccccttcaaagcgcagcatctcgaagagttcccataggagcagaccggacatcactgctagaatgccaccagccaaggtctccaagcgcaaaggagggtacgcagcgccatcgccagctgtgaacctccctgaggagcaccttcccgaggagcagcagtggccaaggaaagtgatgtacgaggatgacagcgaggagaccgaggaagaagaggggggcaacaatgtcgaggatagatggaactacaacagagctgctagtagcgatgacgaggaaaccgaagacgaacaatgagcttctagcaggcgtccatctgttctgtagttgtgcatataccataaattttaaactttgagggttatagcttttgcatacatgtaaaattttaaaataaggcggacttgttgtagacagcataggttgtaggtggtctgccccttctcaatcagacatgccatgagttcagaaaggataatggatcattgttctcgt

SEQ ID NO: 3996 - DNA, 937 bp, Zea mays
  Clone ID: TF_ZmC205_15
ggaccctcgaggccggccgagatataggctttggaagggggcgcaggggtggaatttcgggaatcgatttgtagtggggcatgtaagcttgtgggagaggaaagcagcaggagacgaaggtagacaaggaaaagtatgccaaagaaaatgagagaacaaccttcttagcttctcctccagtctctctccaccaccgctctatctcctcggtaggaagaagagcaagcaagagaggagcaagctagctagcggtacaagggagagtgagcggcgaaggggacggacgaattgaagaacacctgccagtccgatcgagctggtggtgccgccaggataaatcgggaggtatatgatggcgtcgaattcaccggcggcggcgttctttggtgttagggatggggaccagcaagaccaccagattaagccgctgatatcaccgcagcagcagcagcagctggcagcggcactgcccagcgtggcgtccggccaaggcgcgccgacggcggcggcgcagccaccgcccaagaagaagaggactatgcccgacccagacgctgaggtgatcgccctgtcgcccaagacgctgatggcgaccaacaggttcgtgtgcgaggtgtgcagcaaggggttccagcgcgagcagaacctgcagctgcaccggcgcgggcacaacctgccgtggaagctgaagcagaaggacccgctgcaggcgcagcggcggcgcgtgtacctgtgcccggagccgacgtgcgcgcaccacgacccggcgcgcgccctgggcgacctgacggggatcaagaagcacttcagccgcaagcacggcgagaagaagtggaagtgcgacaagtgctccaagcgctacgccgtgcagtcggactggaaggcgcactcccagatctgcggcacccgcgagtaccggtgcgactgcggcacgctc

SEQ ID NO: 3997 - DNA, 878 bp, Zea mays
  Clone ID: TF_ZmC205_10
ccggccggcctgccgggatcgagctgagctgagcatatggggtagtgtgtgaggcgatagagaagctggtgctcataaccaaccaccactcagtcctcctcctctaccctttcccttccgccgcgttcctacttggtcctagagggagagagatctcgaactccaagggcgcatgctccggttgctagctacgataccgtgtgcgtagctgcggcagcccttgatcgatcgatcgatcgcttgtgcggaaggagccggatcgagtggagtcagctagatactccgtggtcgtcgttggacgtacgccagaagagggagctagagaagaataccgtgtacagctgcttccaacatggcagctgcctcgtctgcccacggcctgttcggactcggcgacgggcagatgcagatgcagatacagcagcagcagcaggcgccgcctcctcctcttgtgaacaacccggccgcgccgccgcccaagaagaagcggaaccaacccgaccctgacgcggaggtgatcgcgctttcccccaagacgctgatggcgacgaaccggttcgtgtgcgaggtgtgcaacaaggggttccagcgggagcagaacctgcagctgcaccggcgcgggcacaacctgccgtggaagctgaagcagaagaaccccaaggagacgcggcggcgggtgtacctgtgcccggagccgacgtgcgtgcaccacgacccgtcccgcgcgctgggcgacctcacgggcatcaagaagcactactgccgcaagcacggcgagaagaagtggaagtgcgacaagtgcaacaagcgctacgccgtgcagtccgactggaaggcgcactccaagacgtgcggaacccgcgagtaccgctgcgact

SEQ ID NO: 3998 - DNA, 838 bp, Zea mays
  Clone ID: TF_ZmC205_14
ccggccgggagtggctcataaccaccggccgggagtcctccttctctaccctttcccttccgcgttcctacttggtcctagagggagagagatctcgtcgaactcgaagggcgcatgctccggttgctagctacgataccgtgtgcgtagctgcggcagcccttgatcgatcgatcgatcgcttgtgcggaaggagccggatcgagtggagtcagctagatactccgtggtcgtcgttggacgtacgccagaagagggagctagagaagaataccgtgtacagctgcttccaacatggcagctgcctcgtctgcccacggcctgttcggactcggcgacgggcagatgcagatgcagatacagcagcagcagcaggcgccgcctcctcctcttgtgaacaacccggccgcgccgccgcccaagaagaagcggaaccaacccgcagaccctgacgcggaggtgatcgcgctttcccccaagacgctgatggcgacgaaccggttcgtgtgcgaggtgtgcaacaaggggttccagcgggagcagaacctgcagctgcaccggcgcgggcacaacctgccgtggaagctgaagcagaagaaccccaaggagacgcggcggcgggtgtacctgtgcccggagccgacgtgcgtgcaccacgacccgtcccgcgcgctgggcgacctcacgggcatcaagaagcactactgccgcaagcacggcgagaagaagtggaagtgcgacaagtgcaacaagcgctacgccgtgcagtccgactggaaggcgcactccaagacgtgcggaacccgcgagtaccgctgcgactgcggcaccctcttct

SEQ ID NO: 3999 - DNA, 711 bp, Zea mays
  Clone ID: TF_ZM4183.C11.o1.fg
atggcactgctggtcaagagccaccaccaaatgttggtctcctcctccacctcctcgtcgtccccttccgcgtcccagcagcggcagccaccgccaccacctccctcctcctcctgcctcaccgagcagcagccgtcccccgccaagcgcaagaggcgccctcccggcactccggaccccgatgcggaggtggtggcgctgtcgccgcggacgctgctggagtcggacaggtacgtgtgcgagatctgcgggcaggggttccagcgcgagcagaacctgcagatgcaccggcggcgccacaaggtgccgtggcggctcgtgaagcgggcgccgccgcctcctgctgctgctgctggcggcggcggcggcgccgccgacgctaataacagcagcggcacaggaggtggtgcaggcggcggcgcgccccggaagcgcgtgttcgtgtgccccgagccgagctgcctccaccacgaccccgcccacgcgctgggcgacctggtgggcatcaagaagcacttccggcgcaagcacggcgggcggcggcagtgggtgtgcgcccgctgcgccaagggctacgccgtgcagtccgactacaaggcccacctcaagacctgcggcacccgcggccactcctgcgactgcggccgcgtcttctcacggcacagcaaagtgcagtgggatatgatcgttacgggtggcgggttgcggtag

SEQ ID NO: 4000 - DNA, 1624 bp, Zea mays
  Clone ID: TF_ZmC7489_1
aatcgattggagactcatgatctgggtactggtccagtgaaactaaattcaagctttaatgagatgcacagtgctgatagacaatgccttgactcagctgatgttcctgcttcaactcagcctctgtcagtttcacctgttttgatgagtgatgagcagcatgtcgatgacgcccattctgctgtcaaggccattgagcacctgggcaataatctggctaacataaagcagaaatccctgcatatggatgtcctcatgttagaggacgcccaagttgcttccatggctgcagtccctgggcatgagggagaatctgtcgacgctggatcaaattcttttgatattttacttggagctctggctgaagagtccaaggcagcagatgctcctgggaaagatgaagttggcaaagcttccttgacattaataacactggctagcaatgagccctctgttacagaaggcagagttgtagacgtggtggaaacagacacaattttgggagcaggaaaagatgataaacaagttgatcaggcacatgacttccatttgtcagatctggtgtctagatgcatcgggagctcaaatagatccgatatcatatgctatgtcagacgcaaacacaaaaggaagagggattactcgtgtttcgtccgctctccctgtgagcgcttgaggccaaggtccaagcctgcagtagtcgaggagtcggaatggagcagaacagccgaggcttcttttgctaaaaggggtaagaggacacaagcagtgggatcatttcagtgtgatattgatctgtgtggcatggcatttgagactagggccgaactcaatgcccacaagcgcaatatttgcactgacgagtcatgtggcaagcgtttcagctcacacaaatacttgaagcgacatcagtgtgtccacagcgagatgaggccatttaaatgcccctgggaaggttgtaaaatgaccttcaagtggttgtgggctcagactgaacatgtcagagtgcacactggagagcggccatacaagtgctcggctcctgactgcgggcagacattcagatatgtatcggattacagccgccacagaaagaaatttaaccattactgacagcttctagttttccgagttattggccgcagctcggggcaaatctccagctgcttgtgtcggtgggccttgtttgttgtagtagctcagctcacgtatttattaacaacctgacagctgataggcctagtgaatgttccccgttaacaatgggctagtaatttagtcggtgtaggagttagaaattgttggggggtgaagtgcaacccccttctgttggtgtaggtttgcataagctgatcaccccccactgacacgtggccattcattatttgtttctcagatcagtgatgatgtatttaatccctgatgacaaacttcatgaacactgaaaccatatgatgtcggatgtcaaaatgatcaggggttgccaccgtcctcatgtaattcctgtctttgacgcattgtccaggtcctcattattctgtcatactgtttcagcggattacttgtatgcctttgtctacgcgaaatctaatcatttttaaattcagaaataaaaaaaaaaaaa

SEQ ID NO: 4001 - DNA, 550 bp, Zea mays
  Clone ID: TF_ZmC3270_2
gccaaaccactgcggcctgctgctttcacctccctctccctctcgggctctctcctaacatctcgagctcgatcgcaagccctcaccccctcagacactccttccccaccaccgacatacgtacatgaagcacccgagagacgccggcgccgtgccgctctccctcgcgctgtccctgggcggcggcggtggcgtggccaccaagcacggcatcagcaagaagccccggcgcgcggcgggcggcgagttcgtctgcaagacgtgcagccgcgccttcgggtcgttccaggcgctgggcgggcaccgcaccagccacctgcgggcccgccacggcctcgcgctcggcgtgcccgccgccgcgccggcgaaggaggataccgcgacgaagccggcagcggcggaacccgcgcccgcgagccacctgtgccacgtctgcggcctcggcttcgacatgggccaggcgctcggcggacacatgcgccgccaccgcgaggaagcggccgccgccgccgcgcaggcgccgcccgtcctcctccagctcttcgtgtag

SEQ ID NO: 4002 - DNA, 423 bp, Zea mays
  Clone ID: TF_LIB3068-001-Q1-K1-C7
caagaccttctaccggaactcgcagctggttttccaccaaagaactcacagccgggagacgtacttccagtgccccacctgccaaaaggccttcctgcggagctccagcttcatgaagcaccagcggatccacacgggggagaagccctgcaagtgcgactactgcgggaagggcttcagcgacttctcggggctgcgctaccacaagaaaatccacacgggtgagaagccctacaagtgccccgtgtgtgagaagagcttcatccagaggtccaacttcaaccggcaccagagggtgcacacaggtgagaagccctacaagtgcacccgctgcggcaagagcttcagctggagctcgagcctcgacaagcatcagagatcccacctgggaaagaagccccgcccgtagccgggctctctgag

SEQ ID NO: 4003 - DNA, 716 bp, Zea mays
  unsure (1)..(716): unsure at all n locations
  Clone ID: TF_LIB4172-013-Q1-L1-F9
cgcctgcggtttcggtccggaattcccgggtcgacccacgcgtccgaaccttatatatgttagtgagtgtgacaaatgctttacccaaccatcccatcttagtattcatcgtagaattcattcaggagagaaaccttacaaatgtagtgaatgcgacaaatgctttactgacaaaggcagtctgagagttcatcagagaattcatacaggagagaaaccttacaaatgcagtgagtgtgacaaatgctttactgacaaaagcagtcttagagttcatcatagaattcatgcaggagagaaaccttacaaatgtagtgaatgcgacaaatgctttactggcaaaggctatctgagagttcatcatagaattcatgcaggagagaaaccttacaaatgtagtgaatgtgacaaatgctttactcacaaaggctctctgagagttcatcatagaattcatgcagaagagaaaccttacaaatgtagtgaatgtgacaaatgttttactgacaaaaacggtctgagaacgcatcagagaattcatacaggagagaaaccttataaatgcantgaatgtgacaaatgctctacccgaaatcacatcttagtattcatcagagaattatacaggagagaaactgtacaaatgcagtgaatgtgacanatgctttacccagcactgccatcttagtattcatnaaacgattcattcaggagag

SEQ ID NO: 4004 - DNA, 1260 bp, Zea mays
  Clone ID: TF_700220213_FLI
ccctctcccgctcccgtccgagagatcccagttgtggccgcttccgcccaagagcaacccctggaggccgccaaggacgacggtggctacgaggtcgtggagctcgacgccgccgagctgctagcggagcacgtccacttctgcgagatctgcggcaagggcttccgccgcgacgccaacctcaggatgcacatgcgcgcccacggcgaccgcttcaagaccctagacgcgctctcccgccctggtcacggccagccgaagccgcccgttggcagcaacgtgcgcttctcctgcccctttgcgggctgcaacaggaaccgcacacaccgccgcttccggccgctcaagtcggcggtgtgcgcgcggaaccacttccggcgcagccactgccccaagctctacgcctgcgagcgatgtggcggcaagaagcgcttcgctgtcctggcggacctccgcagccacctccgccactgcggcgaggaggcacagtggcgctgctcctgcggcaccaccttctcccgcaaggacaagctcttcggtcatctagcgctctttgaaggccacacgccagcagttactaagccaaacaaggatgtggtgacagggcctacagagtccaccattgatgctatggaggaagggggatttgaagaaggcattcctgaccgggaggaggatgaagagggcggttatgatccagagttcttcaaggagtggatggatgagctcagaggtggtgctggtggctccaattggcctggaccagcagcagatggacattagcaatgttgcgagggttaataggaattattcggcaagccaaccaacctagttgtgatgttatgaatatgtcagcttgattgtctagcaagtcatcctcatacaaaaagtgtaagattcaggtgataaatattataattagtcctattgtggaagaatgtaaacaacaaatgagtctatgactattatcaagagagcagagctagtgctagaggatcccacatgagtggggttgagaggagggataaaccaaggcaagcctccccccaatgtggagagactgcttcgatcccgcgacctggtaactcagtgaagcagctctcaccagtcaccactacatcaggcctgctcctcaagagatgaaacttttttgttaaacttttgccaagaactctgactagaatgaacagcatgtagcttgaattcaatggtggctgcacttataagtgagtttcataaagtaatatttagtaggtttta

SEQ ID NO: 4005 - DNA, 1818 bp, Zea mays
  Clone ID: TF_ZmC587_1
ctcgaggccggccgggaaaaactatcttagcacagcagcaccaaagcgcgtcgtgtcgtgcaaacccaactttgataccactcgctgcctggttatggactccaccaggagcaaccaggtcgccggcagatgcagcagcaccatcgcgtcaagggctgccacggtcccgccgtcgctgaccatgccgcgcggcgaactcgctgacgccatcgtgggcggaggcggaggaggaggagcggacggggacccccgggccgccctcctccgtctgtctgctctcggggaccgcatggccgccgtccggggccgtatctccgcttctatctcgggcgaagcccggcctctctcctacgccgacatccaatctgtctcctccgagatctccgccgctgcccagctcgtcgtcctcaacgccgccgagctcctcgcttcctccgtcccctttcccgccccacctccacctcctccttccgccgctccctctcccgctcccgtccgagagatcccagttgtggccgcttccgcccaagagcaacccctggaggccgccaaggacgacggcggctacgaggtcgtggagctcgacgccgccgagctgctagcggagcacgtccacttctgcgagatctgcggcaagggcttccgccgcgacgccaacctcaggatgcacatgcgcgcccacggcgaccgcttcaagaccctagacgcgctctcccgccctggtcacggccagccgaagccgcccgttggcagcaacgtgcgcttctcctgcccctttgcgggctgcaacaggaaccgcacacaccgccgcttccggccgctcaagtcggcggtgtgcgcgcggaaccacttccggcgcagccactgccccaagctctacgcctgcgagcgatgtggcggcaagaagcgcttcgctgtcctggcggacctccgcagccacctccgccactgcggcgaggaggcacagtggcgctgctcctgcggcaccaccttctcccgcaaggacaagctcttcggtcatctagcgctctttgaaggccacacgccagcagttaataagccaaacaaggatgtggtgacagggcctacagagtccaccattgatgctatggaggaagggggatttgaagaaggcattcctgaccgggaggaggatgaagagggcggttatgatccagagttcttcaaggagtggatggatgagctcagaggtggtgctggtggctccaattggcctggaccagcagcagatggacattagcaatgttgcgagggttaataggatggtttgacaagggacatctgcttacatcaagtgaccaggaggatcaataaagactgaataaaggtgatagtaaagaaaagaggtgctttgggatagtttgtaggatttctctttaccattgtgtttgtgcgttcgttctaaccagtagcttgtatggtatggtgtgcgtgtgttgtttagttgctgttcactgggcctctcccttgccattctcggttgctttcatgttatcctgtgaatttgtgatctaccaggtaatacagtggagaaatgtgtcatgctctgtaagcgttctccttggctgtgtgggtcatggagttgccggttacggaggaagaaggatagcttgcaggaaaacggtggcaccagttccctgtgcgctgctgaggatgcgaagtattcgggggagttttagaaaaatactttggttttgtgaaacaatttggttttagagtgtcttgatgtgtttggacgcaacaaactttgtagttttgaaaatcatagtattgctaaattgtaggcttccttctatg

SEQ ID NO: 4006 - DNA, 266 bp, Zea mays
  Clone ID: TF_700352188H1
cgggaagcactttagcgcctactcttccctgatttatcaccagagattccacaccggagagaaaccctataaatgtaatgactgcgggaaagccttcagtgatggctcaatccttatccgacatcgtcggactcacaccggagagaagccatttgagtgcaaggaatgtggcaaaggctttacacaaagttctaaccttatccaacatcagagaattcacactggagagaaaccctataaatgtaatgaatgtgagaaagctttca

SEQ ID NO: 4007 - DNA, 977 bp, Zea mays
  Clone ID: TF_ZmC205_27
ctagtatgttccaccatcagcaggagctcctacaggcagaagctgcggcggcagatcgggagagcagcatgtccaacaacctcacctcctccgcgcccggcggccccaacgcggcgccagctgctgctgcggccaccggcaataataacaagcgaaagcggagcctcccaggcaaccccgaccccgaggcggaggtcgtggctctgtctccggcgacgctgatggcgacgaaccgcttcttgtgcgagatctgcgggaaagggttccagcgggaccagaacctgcagctgcaccggcgcgggcacaacctgccgtggaagctgaagcagcggggcgcgggcaaggaggcgcagcggaagaaggtgtacgtgtgcccggaggcgtcgtgcgtgcaccacgacccggcccgcgcgctgggcgacctcacgggcatcaagaagcacttcttccgcaagcacggcgagaagaagtggaagtgcgacaagtgctccaagaggtacgccgtccactccgactggaaggcgcactccaagatctgcggcaccagggagtagcggtgccgtgggccgtgtgcactttccaggcgggacagcttcatcacccaccgcgccttctgtgacgcgcttgccgaagagagcgccaaggcgcgggcggaggcgccttccgcggaggatgggagctcggcagccgccgtggttccgccaccggcacccccgattgcgccagcgccggcgccactgcgacagcaaccgcccccgcctgcgccgcaacatgcggagccacgtaatgagcctgacacgaatgcgactgaggccgtccagttcgcgccgccgactccgccaccgccgtcgacgtcgcagttacagctgccggtgctttcgcaagcttcggtgagcgctgctgccaacgttagcgccagcagcagcagcagcagcgtcgcggggacgtcgcagagcctgctcggcggtatgttcgcg

SEQ ID NO: 4008 - DNA, 1779 bp, Zea mays
  Clone ID: TF_ZmC9242_1
aattcggcacgagggcatggtggaaccctagagcttcacccctttttagcaccagcattccgccgcacgacctcgagtccggccgggactcacacaggtgcggcggcgcacactgctgcacactgcactccctccgtcccgcgtccccgttcggcgctctcggcacgaccgccggtagcccgggacgcacgtcgcacggccccatccctccctagcggccggtgacggcaccggcggccctttgctcggctgtgcccaagctgcgagggcgagatctacccccgcgtccgtgcatcttcgtcaggcccttctccggacgagcactcacaggatgtgttctgaagttcatgttgagggagatgcaagtgtcggacagaagggttgcaaggatataaggcgttacaaatgtgaattttgcacagttgtcaggtcaaagaaatgcctaattcaagctcacatggttgcacatcataaggatgaactggataaatcagaaatatacaactcagatggggaaaagattgttcatgagcaggaacataggtgccaagagtgtggctgttgtttccagaaaccagctcatctgaagcagcacatgcaaagtcactcacatgagagactctttatttgcccacttgaagactgccccttcagctataaaagaaaagatcacttgaaccgacacatgcttaagcatgagggcaaattgtttagttgcaccctggatggttgtgatatgaggttcagtatgaaggcagatatgcaacggcatgttaaggaaatccatgatagtaagaacccccatcaatttgtttgtaaggaggacggctgtaacaaggttttcaggtattcatcaaagctgaagaaacatgaggaatctcatgttaaattggactatgtggaggtagtgtgctgtgagccaggttgcatgaagatgttcagaaatgttgaatatctgagggctcataaccaatcttgccatcagtatgttcagtgtgagatatgtggagaaaagcacctgaagaagaacatcaagcggcatctgcaatcacatgacaaggtgccctctgatggaaggatgaaatgcacttttgatggttgtgaacacttcttttccaacaaatcaaatctgaccaagcatgtcaaggcatgccatgaccagctgaaacctttcaagtgcggaatcgttgggtgtggcaaggcgttcacctacaagcatgtcagggataaccatgagacatctggtgctcatgtatacatggaaggagactttgaagagttggatgagcagttgcgtgcccggccaagaggtggtcggaagaggaaagcattgacggtggaaacactgacacgcaagagggtgaccatctccggcgaggcttcatccttggatgatggagtggagtatcttcgctggttgctatctggtggggatgattcaattgattgtcagtagccggcgtctttttgctatcaccgctgctttgtacatgggttagattatgtaatgtaagttgtttggtagactacgatggtgttcatgacgcgtttgatatattgtcagcagtatggtagtgcagggctctcatagtaaagcttgccatttttgttgtatctttaacccacgtgggtccagatgatgtgtttattcctatgtatttacttatctacatgtatccacatgtgcgactttggcgtttgtttgagattataatttaaaaaaaaaaaaaaaaaaaaaaaaaaaaaaaaaaaaaaaaaaaaaaaaaaaaaaactcgtga

SEQ ID NO: 4009 - DNA, 1636 bp, Zea mays
  Clone ID: TF_ZmC13146_1
acctcacctcacctcactcccaggcaagtagccaagaagagagaagcaaagtagaaagagtgcgccggagcaagaaaccacgccatccatggaagacccctacacgagcttcctcaagaacccccactactactactgcacttcctccttccccgcccctccccccacccctcacctccctcctcccttcccaccttacgccgccctctaccccgccgtggccgcggctgcgaccgcagctcctcaccaccagtacccctcgttcttccagcaccagccggcgcagcccgctcatcactacagcacggcgcctccctcccctccgctccgggaggcgctccccctcctctccctctcgcccacgcccgccgcccgccctcgtgccgcccagcagcacgacgtcgccgacaccgattccgacgacgatgacaacgactgctgctaccacctgcagcaggaggtggcggcgggctcgaggacgacctctgcgcgcacaccgctcttcgccgacctcaactgcgtgccgtcctgctgcgacgacggcgacggcgacccgatggacgtcgaggcctcctggtccacgtccacggacgacgccgccgttgctctgcgcatcggcctgccggccgcggaagctgaccttctgtccgggctttcgggcagggccgcggaagaggacgaggaggaggaagatgattgcaagccgggaggcgggcacgaggaggttccgctagggttctcttcgtcggcgccgatcgggaggctgaccaaagggcagtactggatccccaccccgtcacagatcctcattgggcccacccagttctcctgccccgtctgctacaagacattcaaccgatacaacaacatgcagatgcacatgtggggccacgggtcgcagtaccgcaagggcccggagtcgctgcgcggcacgcagccgacggcgatgctgcggctgccgtgctactgctgcgcggcggggtgccggaacaacatcgaccacccgcgggcgcgcccgctcaaggacttccgcacgctgcagacgcactaccgccgcaggcacggcatcaagcccttcatgtgccgcaagtgcggcaagcccttcgccgtgcgcggcgactggcgcacccacgagaagaactgcggcaggctctggtactgcgcctgcggctccgacttcaagcacaagcgctccctcaaggaccacatccgggcgttcggccgcggccacgccgcctgcggcgtcgacgactgcttcgacgacgacgacgaccgcgacgacccgtcgtcatccgaggtcgaccacgcagccaccaacactactagtaacagcaccactactaccgctgccgccgccaatgctcaccaccatcaccacaccagctggaagccgccgccgccgccactgtcgtcgtcgagcagaggctccggcgacgaccgactactatagatcgacaagggtgagtacgtacggtcctactacatacatcctacacagcaaccagtcgatctgtagccaaatgcaaacgtatgcttgtgtgcgtgtgtgtataaccatgcatatcatccatctgtccgtgtcttactcagtgtttaaaatagcgggctaaggcatttatcctcggccttttttaac

SEQ ID NO: 4010 - DNA, 462 bp, Zea mays
  Clone ID: TF_ZmC1325199_1
atgaagcggctcacgcaggatgaggaccaagagcaggagcaggagccgggcgtcgtcgtcagcgtggcccagggggtcacgctgctgctcgcgcgcagcggcggcggcggcggcggcggcgagccgcgggcctcgccgcgcgtgttcgagtgcaagacgtgcagccgccggttcccgtcgttccaggcgctgggcgggcaccgcgcgagccacaagcgcccgcgggcggcgccagccaaggcccgcccgcacggctgcggggtgtgcggcgtcgagttcgcgctcggccaggcgctgggaggccacatgaggcgccaccaccgcgccgtggccgaggagtgcgaggcgcgggacggcgcggcggctagcgcccacgggatggacgtggacgacgccgaggcgaagccggaggaggaagcgacaggcctgctgcgctttgacctcaacattgccccatcatga

SEQ ID NO: 4011 - DNA, 795 bp, Zea mays
  unsure (1)..(795): unsure at all n locations
  Clone ID: TF_LIB4172-011-Q1-L1-C8
ggtacgcctgcaggttccggtccggaattcccgggtcgacccacgcgtccggaaatatgcaggagaaaagtctttgcataatgtagagcgagccgtggggctccgggagcggcgccccaaggtctggggccatgaacgcgagcgtggaaggagacaccttttctggatcgatgcaaatcccaggaggcaccacggtgctggtggagctggcaccggacatccacatctgcggcctctgtaagcagcacttcagcaatctggatgcctttgtggcccacaaacagagcggctgccagctgactaccacgccggtgacagcccccagcacggtccagtttgtggcagaggagacagagcctgccacccagaccaccacaacgaccatcagttcagagactcagactatcacagtttcagctccagagttcgtctttgaacatggctaccaaacttacctgcccacggagagcactgacaaccagacagccaccgtgatctctctccccaccaagtcacgcaccaaaaagcccacagcaccccctgctcagaagagactcggctgctgctatccaggttgccagttcaagaccgcctatggcatgaaggacatggagcgacacctgaagatccacaccggtgacaaaccccacaagtgtgaggtgtgcggnaagtgcttcagccggaaggacaagctgaagacgcacatgcgctgccacacgggcgtcaagccctacaagtgcnagacgtgncgactacgcgcggcggacagcagcagcctttacaagcacctgcgca

SEQ ID NO: 4012 - DNA, 788 bp, Zea mays
  unsure (1)..(788): unsure at all n locations
  Clone ID: TF_ZmC669707_1
gattcacccgcttccgagaaagaattaatagcactcgatcgatcgggctcaccacgtccagctctcggtcctcgtctttgctgctagcagctagctagcttcgcgatcgtgctcaagatcaacgacgatccatggcgtatggcaagaggtcacgccagaaggccgaggagatggtctggctgcccgacggcgccgatgtcgcgcgcttcctgctgctcttctcgggccaccagcactaccacggcgacggcatggcggcctcggcgcccgagcgggtgttcgagtgcaagacctgcaaccggcagttcccgtccttccaggcgctgggtggccaccgggccagccacaagaagccccgtctctcggacggcgtcgatgccgcagcggccgagccgcccaagcccaaggtgcacggctgctccatttgcggcctcgagttcgccatcggccaggcgctcggcgggcacatgcgccgccaccgggctgccgatcagacagacggcggcagcctcggcaccgggctcaccccgaaatacgacagcggcaagacggccgcatcgccggccgagctggttctggaccttaacgccgtgccggagctggaggaagagcaggatcacgccaagctggagctctccatcgaatntcccgtagcagtagttgactttcacgcacgctaagaaataacgtggnaatagattgaatccttctcggtttcatttttccattattatttacataaattacaaaaatacacattaatcaaaaaaaaaaaaaaaaaggcccct

SEQ ID NO: 4013 - DNA, 746 bp, Zea mays
  Clone ID: TF_ZmC1140_3
cctcgaggccggccgggatctctctgtggttgtttttggcttgttctcccactaacgcttggcgactcacgagtcgagggtttctctcctgcgcggcggctacctctctccacggcggcggcgggcgatcctgcagatcccgcggctccctccgcgattcgagtcagactcagatgggggaaggcacagagagcggcggcggggcgaccacagcgccgcctctgaggtatataaggtgctacaagtgcgggttctgcgacgtggtccggtccaagaagtgcttgctccgcgcccacgtgcttgagcaccacaaggggtaacacttatggggtgtgtgtaggatgaggtggatgctttggggggttactgggaaggtggagatgctggtccgcgcaaagagctcagccgtgcgtgcgaacagtgcgggatgagcttcaagaagccggcgcatctgaaacaacatatgcagagccattcgctcgaggctatttgttgacatatgaatgcgtgaagcattggatcccaaagaactccaaaatgcgataaggccttgaatggactagtatcaggattgggagaccatcctgagaagctccatcaagcatgccttgttcacgcgtttcttaagaggcccttttcctgcactgttgatggttgcccctttagctatagcaggaaggatcatttgaacagacatttacttactcatgaaggggaaactattttgtgtgccctggtcgaaggat

SEQ ID NO: 4014 - DNA, 679 bp, Zea mays
  Clone ID: TF_ZmC66749_1
cccacgcgtccggacgacgaccacctcgccgccgcccatgtcgtcggtcccggactgggccgacgccatcgtccccaacagcaagcgacggcgccaccggtcgccgcccgccgcttcatcctcctcctcgcacagcagcagcaccacacagaaagaggaactggaagacgaggaggaggacatggccaaatgcctcatcctcctcgcccagggccccgccgccattgaggcagctagagtaatgccggcaccccgtagcaggccaaagagcacggggagccgcaggttcttggccgccgccgaggccagaggtggtgtgtgcgtgtcgtacgagtgcaagacgtgcaacaggtgcttcccctctttccaggccctcggcggccaccgcaccagccacaacaagcatccgcgacggccagcagaggaggtgctggcggcaatggccatcaccaccacgcttagcctagcggcgacgaggcccgcgcacgagtgctcgtcatgcggctccgtgttcacgtccggccaagcgctcggcgggcacatgaggcgccaccggccgctcaccaccaccagctcgtcgcccgccacggggaccgaggaccaacaagacagcagtagcaagctgctgcaggagagtagaatcaacctggagctggacctcaacctgctgccgtcgacg

SEQ ID NO: 4015 - DNA, 1874 bp, Zea mays
  Clone ID: TF_ZmC795_1
ggtaccctcgggccggccgttgttggctgaagaaatggaatttgagtatgattggaaggatatttttttcgaagaggccactattgtggatagggagacgatacaggaagttgtgcaggatgaggaagcaataccggctcgaggtgattgggctgtaaaactgggcattaatctgtactatagtgctaatcttgctaagtctcctttatacagtaagcaagttccatacaatagagttatctatgaggcatttggctgcggttctcccaatgactcaccagtgaagctgaagacttattccagaaggcaatgcagggcgaagaaaatagtcttggctggcaggtggtgtggaaaagtatggatgtcaaaccaggttcatccatacctggctgacagaatcaaaaatcatgagccgaaagaaatcgatgaaacatttccttctgatcagaaatcccatgctgaacctgttgaaaattcaagtagagaggcagcctccacaagaaagagtagcagcagaacaattgaaggaaaaacaagcaagagggagaaagaacagttggagaaagctaatgccaagaagccaaaatttactgaagaggacaactccaaatcattggagggtactgctgaagcctccacacagaagataaagggcagatcagttctagaaaaaacaagcaagaaggagaaagcgtataccaagaagctaaagcatactgaaaaggtctcggaagcactaaaaggtccttcagaagcctccttccctgcaccagctgggatggtagtccgcagcagctctaggatcgccaataggaaaatcatgttgaaatcaaagatggaagaagaggataatggctcagctgaccgtccaaagtcaaaggtcgaagacgacaaagataatcctgctggccgttcaagagcaaaaccactaaggcaaaagactaaagtagacgcgaagaagaaaacgaaggaaactagagtagaaaagcgaaaggctcccagtccagcttctcagaaggacgaagaggagcaatcagatgatgtcgagggacgttctaccactaaacaacggctgtctttacgtaagaagggggctaaaacagaaggaaaacagcgaatggagaaacccagattcgggggaagtgctcctcccccaagctctccgaagcgcaaggaagagtacgtgtgcgacatcgaaggctgctccatgagtttcggcacagagcaggcgctgtccctgcacaagaacgacatctgcccggagaagggctgctgcaggaagttcttctcgcacaagtacctgcagcagcaccgcaaggtccacgccgacgaccggccgctgaagtgcccgtgggagggctgcggcatggcgttcaagtggccgtgggccaggacggagcacgtgagggtccacacgggggacaggccctacgtctgcctcgagcccgggtgcggccagacgttcaggttcgtctccgatttcagccgccacaagcgcaggacgggccatggcgcgtccaagaaggcgaaagcgaagaagcaaggcaaagcagcagtaacttagtactagtagtttagcacccaaaaccaatggcgcccttctgaaatgagtagccttggaagggacaggaggaaaacttgtagattccattagcagtttagcacccaaaaccaatggtggtctctgctcacagttccattaattgctagttgaacgggttcgttggagcccacaattaggttggttccctgtgagtaatttgggtaatcattaagacattctcgtacagtttgccttttgcttatcgttcgtttatcttttgctggatgatgtcttgcttatggtaagcacctgtctagctccttttgccttc

SEQ ID NO: 4016 - DNA, 3247 bp, Zea mays
  Clone ID: TF_ZmC6856_1
caactttactacccgtctcgcgcgagacggaacacattccgcttgtcctctctcgccgctgctccgacgagctcgccggcgccgactcccctcccgtcggaccagcccgccgaaagcggccggacgaacgagaggcttccctcccctcgcacttgcctgcctcgtcgccttcctgagcctctttctgcgcccggccacgggctcgcggccccacgcccgagcacgtgcagcaggcgccgaacccgcctcctgtgccaccccatcggagctcgccggccacgtggagggattccttttcctggcagcattcctcgtcgccgacggcttcgtcgtgctccaggggttggattggcgtggagcggagagcagtgcaaacctgggattgaattctggtgtagatggattccacagctcttcaatatgaaaaccaaaaattggtgcaacaactggaggtacagaagtccgaaatgcatgcattggagcgcaagttcaaggagcttagtgatgatcaatgttcttatgacaagactctgatttctttgaataaactgtggaatcagctgattgatgatttggttctgcttggagtacgggctggtggggatttggataatttgcaagcacttgaccatgaagagttatcagaagaatctttggagtcgtgtccttccgaggagatatttctcttaaggctcttgaagacaaacaacatcagagataatagtgacactagcttgttgaaatttgttgaagaagctcttgcttttcggtcttcagcaactgttactttgatgaagtccctgcaagagactatttcttcgcagcaagctagaagtgagtctttgtctttagctttgaatggacaaaagtcaaatgaagatgttattgttgcccttcgaaatcataatgattgcttgaaagaggtggcagagaatgcgagtcaagccatctctattatcaacgagaagcacaaaaggtatcttgatgagattgaggcttttaaaagcaaccattcaagggagctacaggaaatcaagcgtatttcaggtgagctagaggaaagcattgcagagcttgaggaaagtcaaaggaagttggttgtgctccagttgcagaggcatggttctgtaatggatgcatctggggcaaatgctgtgaatggtggtatttctactcataaatcttcagataaaagtatgagctggcaagacctcaaagatgctgttgacgcagctaagaccctcgcaggaaaccgtctattagaactccatcagactcaagaggataatctgatactatccaaggagctgggagatcttgaggggcaattgaaagatgagaagtatgtcttggtatccaaaccgtacatgattcttaatgataaactacaacatttgaatgctgagatagagcgttatagagggttggttgaagttttacagaatgacaaggaccagctcatgcaaagggagaaagaaatttctgcaaaagcagaatcgctcgacagtgttaaacaaaccgagacgcctatatatcaaatatcgagacagttggtcaagcatatgaagacatgctaacgcaaaatcagcatcttcttcaacagcttactgatagagatgacttttaacataaagctagtatcagatagtgtgatgatggatcaagcttgtagtccccttctctctgagggtatgatggagaatcagttgagtcgatcaaaggatgcagcttctgaagcacttgcattgcgtgagcaagctgaatcattaagatcattggtagctaaaaagattgaggaacacaagaagatttcggataaatacaactcacaagtaattgagatcaagtccctcaaggcattggttgaggagttggagcaggaaaagcaggagctggagtttattgcagatatgtacgtgaaagaaagttctgagtctaggacaattgctgatattgaagaatcagaaacccgagctcgcaatcaggctgaatatttgaggagcaatctagaggagcatagtcttgagcttcgggttaaagcagcaaatgaagctgaagctgcatgccagcaaaggctttcctttgctgaagtggaactagaagagttaaggaccaaagtagatgcatctgaaagagatgttgtggaacttaaggaggcaataagaattaaagaggctgaaggagacgcctatatttctgatatcgagacagttggtcaagcatatgaagacatgcaaacgcaaaatcagcatcttcttcaacagcttactgatagagatgactttaacataaagctagtatcagatagtgtgaagatgaaacaagcttgtagttcccttctctctgacaagcttatgctagagaagcaactccagcaagttaacacttcactggagtcatctaaactgaaaattgcccgtggcgaagagcagatgaagacttgtgtagcgcaagctataaaaacttcagctgaaaacagacatcttactattagcctggaaaggattgcgctggagttatccaacacagataaggaactcaagtggcttcggtcctccgttggatcctctgagaaagaatacgagcaaactcagcaaaagatatctgagctgagagcgttactggagcacgagaggagtgagaggcggcggcttgaagaacaatatgaagaggtgaaaaatgaagttatggagctgacctctgagactgaagagactactgtccggaaacttgaggatgaaataaaagaatgcaagggtattctcaagtgtggtgtatgctttgaccggcctaaagaggttgtgatcaccaaatgtttccacctattctgctcgctatgcatccagagaaacctcgagattcgccaccgaaaatgtcctggctgtggaaccccattcggacaaaacgacgttagggaggtgaagatatgaacctcaccaaagtgacagtgacaaaaccgacttgcgtgtgaacagcagcaacaaactcccttgtgaatatcgtctgttatgttggcgaacatctagatctaacttgctttattactgggattaaaattaggataagaactggaagaagtgaagttcctaatttatttgctatcgtgtgtgctatgtatgattacccttggcagcgagtggtgtatctgctgggtgtcaatatgctcgaattctagctcctccctgctagcgggtgcatgccagttttattaaggctattccatgtacatggtgtcaccctctttaat

SEQ ID NO: 4017 - DNA, 2096 bp, Zea mays
  unsure (1)..(2096): unsure at all n locations
  Clone ID: TF_ZmC6856_2
actcaaanagctgttgacgcagctaagaccctcgcagtcggcacgtctattagaactccatcagactcaagaggataatctgatactatccaaggagctgggagatcttgaggggcaattgaaagatgagaagtatgtcttggtatccaaaccgtacatgattcttaatgataaactacaacatttgaatgctgagatagagcgttatagagggttggttgaagttttacagaatgacaaggaccagctcatgcaaagggagaaagaaatttctgcaaaagcagaatcgctcgacagtgttaaacaaaccattatcacatatgagaaaaaaattgaagaactggaaactcaaattcagatactcttttctgaaaagaatgatctcgaaaccaaggttgaggagactttgcaagattcaggtaagaaagacttcaagaatgagattcatgttatggctgcagcactctccaatgaactgggtatgatggagaatcagttgagtcgatcaaaggatgcagcttctgaagcacttgcattgcgtgagcaagctgaatcattaagatcattggtagctaaaaagattgaggaacacaagaagattttggataaatacaactcacaagtaattgagatcaagtccctcaaggcattggttgaggagttggagcaggaaaagcaggagctggagtttattgcagatatgtacgtgaaagaaagttctgagtctaggacaattgctgatattgaagaatcagaaacccgagctcgcaatcaggctgaatatttgaggagcaatctagaggagcatagtcttgagcttcgggttaaagcagcaaatgaagctgaagctgcatgccagcaaaggctttcctttgctgaagtggaactagaagagttaaggaccaaagtagatgcatctgaaagagatgttgtggaacttaaggaggcaataagaattaaagaggctgaaggagacgcctatatttctgatatcgagacagttggtcaagcatatgaagacatgcaaacgcaaaatcagcatcttcttcaacagcttactgatagagatgactttaacataaagctagtatcagatagtgtgaagatgaaacaagcttgtagttcccttctctctgacaagcttatgctagagaagcaactccagcaagttaacacttcactggagtcatctaaactgaaaattgcccgtggcgaagagcagatgaagacttgtgtagcgcaagctataaaaacttcagctgaaaacagacatcttactattagcctggaaaggattgcgctggaggtatccaacacagataaggaactcaagtggcttcggtcctccgttggatcctctgagaaagaatacgagcaaactcagcaaaagatatctgagctgagagcgttactggagcacgagaggagtgagaggcggcggcttgaagaacaatatgaagaggtgaaaaatgaagttatggagctgacctctgagactgaagagactactgtccggaaacttgaggatgaaataaaagaatgcaagggtattctcaagtgtggtgtatgctttgaccggcctaaagaggttgtgatcaccaaatgtttccacctattctgctcgctatgcatccagagaaacctcgagattcgccaccgaaaatgtcctggctgtggaaccccattcggacaaaacgacgttagggaggtgaagatatgaacctcaccaaagtgacagtgacaaccgacttgcgtgtgaacagcagcaacaaactcccttgtgaatatcgtctgttatgttggcgaacatctagatctaacttgctttattactgggattaaaattaggataagaactggaagaagtgaagttcctaatttatttgctatcgtgtgtgctatgtatgattaccctttgggtagagtacccttggcagcgagtggtgtatctgctgggtgtcaatatgctcgaattctagctcctccctgctagcgggtgcatgccagttttattaaggctattccatgtacatggtgtcacactctttaatacataccacataggatgaaaatctgatgtgacatgtgattgaaac

SEQ ID NO: 4018 - DNA, 1732 bp, Zea mays
  unsure (1)..(1732): unsure at all n locations
  Clone ID: TF_ZmC25442_1
tgaagtcaccaaggatgcggatgctggacttgaatatggaaaagtatcttccnctgaactggtacaagcggtccatgatatgctttcagctgcaggagtaaggatggatgctgagaaggaaacactctttgaggctactctttccttgcaagatcagcttaaagaatctcaagttgctctcttggtagagcaggagaaggcggaggcggctgtaaaagaggctgatgtcgccaaagcagcatgggcatgccgtatctgcctgaatgctgaggatgcattaaggattgtgatgatcagcgtaaccaatcatttcccttcatttgaagcccttgctttggttcagatagaacggacactagaggatatatcacagaaactgcaactggttcaacgtctccatactcgctttctcttacttcccaatctccaagatgttacaagaaccatccagcatccttctattcatgaatggtcaagcaatggaatgcaccgaagcatttgtttcgtcaacaaagctacgggttatattctaatcgcagagcccccaagttttttgacgatatatgatgttatcgcaattattgttagtcacaggttaggggcaccaatgatcttgccgattgcctcagtgtttgcatgcccagatggttcagagaaagaagtccttcaaattcttcacctgggttcagactttggagtttcaaaacgtgaagggagatacgacgcttcccttggagcagaattgttatctcaggatgctcggcaggtgcaattccttccattaagaccgttctatagtggtgaaattgtggcatggaagacaggcaaagagggggaaaagctcaggtatggtagggtccctgaagatgtaagaccctcagctggccaagcactttacagatttccagtagagacagctcctggcgaaattcgcatgatgctttccagtcatgtttactcatttaaaagtgtttcaatggctgatcttctatctgcaccttcccaagtgaatggtgatgtggcattaggtggccaagagaaactcttggccaccaacactggcactgaagtcaccaaggatgcggatgctggacttgaatatggaaaagtatcttccactgaactggtacaagcagtccatgatatgctttcagctgcaggagtaaggatggatgctgagaaggaaacactctttgaggctactctttccttgcaagatcagcttaaagaatctcaagttgctctcttggtggagcaggagaaggcggaggcggctgtaaaagaggctgacgtcgccaaagcagcatgggcatgccgtatctgcctgaatgctgaggtcaacatgaccatcataccatgcggtcatgtcctatgtaaccgatgctcaagttcggtttcgcggtgcccattttgccggacgcaggtggccagaatgatgaaaatattcaggccataaaaaacattgaaggacgtttggtctgactaaccgcttcagcttgtgaatgtgttacgatatcggggctcggctcccttctggttgtgcgctgcattcctttctggtctgatgcatctcattattctccatcggtgatgattggtaatccgatatggggggtgcaagtatagttacgttgtacaggaacgatgcattgcagtgtacagattccaaaatgaaatcattttacacacttcgaagggcataaatgtctgaagctggttttctcgtgctata

SEQ ID NO: 4019 - DNA, 878 bp, Zea mays
  Clone ID: TF_ZmC49155_1
cctcgaggccggccggggacgcgattaccgacggcaggtgagtgtgactatatattactttgccacggaaggaaaggactgtagtttttcttcagtatacccagaattacagacgccaacaaagatacccttcgagaaagggttggcccaaaggtttatccagccctctggatctggtgttgacttgggattcttttctcttgatgagctttcgagttcatcaggggaagtattcccacttgttgtttatgcagaagcatatccatctccagaggaaggtggcccgtcagtaaacgccactcgtgcacagattactcttgctgttttggagaagcacaacaacgaccttcaagtcaaagttatgaagcaaatcttgtggattgatggcgtgaggtatgagctacaggaaatttttggtcttgtcaactccactgaagcggatgttgctgatgctgatgccgatgacacggggaaggaatgtgttatctgcttgtcagaaccaagagacactgctgttatgccttgtagacatttgtgtttatgcagcgaatgtgcaaaaactctacggtttcaatcaaataaatgccccatatgcagacagcctgttgaaaaactaatggagatcaaagttagaagtcctgggccataaaggagagtttgctgatatcgttgctgctgcactatgttatgtaattgtccataatcctgtaacaacatcgatcttgaagtgtatagttctgttgatggttgtgaacttgtgatgatgcggtctagaaatgaactgtgaagacctttgtttggcatttgataaaaaaaaaaaaaaaaaaaaaaataaaaataaaaaaaaaaaaaaaaaaaaaaaaaaaaataaataaagg

SEQ ID NO: 4020 - DNA, 1660 bp, Zea mays
  Clone ID: TF_ZmC64108_4
cctcgaggccggccgggctcgtggaagctcacggtcccccacgcccacgagcgcctccgctgcgacgaagagatcatcaggcgcccggggacggcggcgggggcggggccgcggcctgctcaatctgcctggatgcggtgctcgcccgcagcgctggtcgctccgtcgccaagctacaatgcggacacgagttccacctagattgtattgggtctgcattcaatgcaaaaggagcgatgcaatgccctaactgtcggaagattgagaaaggtcgctggctttatgcaagcggacatcgcgcctctgttgatattgatatgggtggctgggtgaccagtgacaactatgatatcacctccgagcttccttttggatttcaatggtgcccctttagtggattcacccggctagcatccatgtttgaggagcgtgaagctgagcttacttatcacacaactggagatcgctcaagtgctgcaagcagttcacttgtttgcccatatcttgccctgcgtggttttctgcatcctgttcatgtgccttctacatctaatcctggtgctgaaagcacttcatttcgtcggcatgcaactggcttggaaggccatgccactcttgatttgaataatgctcaacttttccatgcgattgagtcaataaatcatgacagtgagcacagacatttgagtaatcttcctgtatcaggaattcctgagtattctatgactccatttggtataggactaccaagatatgacagtggcagccaacagagattcagatcatatgcacatcatcatcccctaatccataggccagctcctcgcagtgggagcaatttggtggcaccaccattggggtcgattccagctgtggtggcagcggcagagacagcaagaggcagccacatgtaccaacactcgtccgtgcacggaagcccgttccctcctaccaccactagaagggtgaggccgagagccttgacgatcacatcgttcatcgcagcgacgtcctcaggtgagatcggaggcccccatggattctccgctcctggagccaccatgaacaggagcgtctctgacgctgagggcatctctagacccattgaccggccgtacaatgcatggggccgggagggcttcgctccgttcccctggatccccgctgaaggcgagtctcactggtggggcaccttcaaccccgtgcagaaccatgcgcatggaggctttagcagaaggcctgctggggagcggatgccgccgcagagccaaagccacccggagaacagctatcaggctgtgccgccgtcacagaggatgccgccgttcttgtgattcgacaaggctgttcctacgtccgatcgctgtatataaaaagaagtattcggttcgggatctgagagagcacattgagcgaagatcgactgcactgcagtctccagcgttgggacctgtgtgatgtttatgccgctggtatttcagcgtttttctttttccctccggcccagcactctggtttcattgagcgctgtagactgtctgtcctaactgatgtgttgcgttgaggaggacgatttggaaacgtgagccgaagctgaactgcatctctggtcgccggggctaaaaaatgccgtttgctgctatgaaagttgtatcgattt

SEQ ID NO: 4021 - DNA, 3095 bp, Zea mays
  Clone ID: TF_ZmC106180_1
atctcccctttctctcttcgacattctcatcgcgctggcttcgcttggctgctaaggtcaaatagccatgctgctgcgcaatccgccacttggctttctctttcctctttaacccccctacgggctccggtctcagggcgcttcgcatggccatggcctccgcggtggctccggctcctccccttgccagcgacgaccaaaccgggcaaaagcgccgccaaatctgcatctgacctccccaccaccaaatacccaaccagcaccacccaccgccttctgctttctttctttctcgctccttacagcaacacatagcgctcagctcacacctcacagtcagctcaggctcatcttctcagcgagttagcagcagcagcttgaggcccagccgcggctgcctgcgcgcaagcataatggagagcagatggcggaaggccaagatgtcgctagggctcaacctctgcgtctacgtgccccggacgctggaaggcgacgacgcggccagctcgcccgacaccgcctcctccacggcggcgctcgtgtcgccggtggcctcctcctcgtccgccgcgacgagcaccaacaccacccccacggccgcttcggcggaccagagcagcgccagcggcaaggtgctcatgcccaccacaccgacgccgacctccgccggactccgcctctccaaatccggcagcaaatcattcaagaaaacatgtgccatatgcttgaccacaatgaagcctggtcagggccatgctctcttcacagcagagtgctcacacactttccacttccattgtatttcggcaaatgttaagcacggaagcagcagctgcccagtgtgtcgtatcaaatggaaggagctcccatttcgaggtcccttgcctgctgaattacctcaaggaaatgcgaggattaatccagttaatgggtaccaaaatggaggccatatgaacatattgcgtccacttcctcgtgcacgctcttctggccggcttcatcatctggccacgttgctgcctgacactgaccctagtactttcaacgatgatgaacccttggacttgtcgtctgaagaggctaatgacaatcatcagggctgtttgagaacagtagagataaaaacatatccagagttcactgaagtacctgaaaatacatcagaaagaaacttcactgttctgattcaccttaaggcaccggttgctcagcacctgcagccatccagcaatctcggagatggcaacgggctaagtacagcccgtgcccctgttgatctcatcacagttcttgatgtcagtggaagtatggctggtaccaaacttgcattgttgaagagggctatgggatttgtcattcagaatcttggatcctctgaccggctttccgtcatcgccttctcatcatccgcacgtaggctcttcccactccgtaggatgactgagtctggtcggcagcagagcttgctggctgttaattcactgacgtcaaatggagggaccaatattgcagaggccctcaggaagggctccaaggtgatcgaagagcgacaggccaagaatccagtctgcagcatcatcctcttgtcagatggtcaagatacctacacggtctcaccaactgctggcgtacacaaaggagcaccagagtattgcgcgctcttgccgtccactaacggcaaccagcaggtgcccgttcatgtcttcggattcggcgccgaccatgactcggtctcgctgcactccatctcgcaaacttctggcggcaccttctcattcatcgagacagaggccaccatccaagatgcgtttgctcagtgcattggcggacttttgagcgtggttgcacaaggtctgcatgtaaaggtggagagcctccaccccgacgtgcactttggctccatcaggtcaggcagctattctagcagggtttcagatgataagaggaatgggtccatagatgttggggacctgtatgctgaagaagagcgggattttcttgtgtctgtaaacgtcccaccaggctacggggaaacagcactcctcaacgcgggcggcgtctacaaagacccactgatgaaggagaccgtgaatatggctgatgtgcaagtgaagatctccaggccagcattcgtctcggtacaaagcgtgtcgatcgaggtggaccgccagaagaaccgcctccatgcagccgaggtgatggctgaagcaaggttttctgcagagcgcggtgacctgaccaccgctgtttctctactcgaggactgccggaggatgatcatggggtcggcgtcaggacagtctggtgaccgtctgtgccaggcactggatgccgagctgaaggagatgcaggatcggatggccaaccggcagaggtacgaggcgtccggtcgagcatatgtgctctcaggcttgagctcgcactcatggcagagggcaaccgcccgcggggactcgacggacagcgagagcctgatccaagcctaccagacttcgtccatggtggacatgctgcttcgctcgcagacaatgagccgctcatcgactcctcgaccaacgccacagatgaggcacgctaagtcattcccggcacgcccgcagccaaggtaactgctatttggtgtcaccaaggatttgcctgaagcctaatttgcttgccgatgggcgtagtagcgccctctaaattcttagttttgtggcgggaggacgggaccagggtatagtttgtgtgggtacaaggggatgtaatggtgtaaatttgatctggggtggtggaggtaaatggtgagaggggtaaggtattttataattgagggggtcggggatggtatacgtcctggggagaattgggcaggagggtggtgaactggtatactctagtattgtactagctcctttgtgtggtgatgtacataagggaagggtatacatttgtggactctttgaggagggatggatacctaatcctgatcccgatccttgcaatgtttgtttcctcagcctggaaaaggactaaggtttgttgcctctttctggaaatggaattgatgatgatcctgggtattttatcaaagtgcctagccggcccttttaaag

SEQ ID NO: 4022 - DNA, 812 bp, Zea mays
  unsure (1)..(812): unsure at all n locations
  Clone ID: TF_ZmC77550_2
ngttctcctcttatgcagatgtcgttcatatataggaagaaatagcacttacagtgttgccactagtatttaatgcagttatttgttttggtactagcatgaaggtgattctcaatgttcttgtttgcaaccacaaaccatttctcgttgccattggttgattgaggtgtggcttgtctacatttctgacttcgtcagttctcttgatttcagaagatatgtgcaatttgcctcaacgccatgaggtccggccgcggccgagcactgttcactgctgaatgctcccacaagttccacttcaactgcatctcctcaaacgtgcagcacggcaacaaaatctgcccaatctgccgtgcagtatggaagcagctgccttttcaggggcctctggctgcatctgctgcccatgggtcagcgagagtaaacccagcgatttggccccagatgagcatgctgtcggtgaatccgctggacgagctcccagtctttggcaatccggagccagttgttttcaatgacgatgagcagatacttcttcagcctgaaacagcagttggcggcgaggagggtgacgaggttccccctttgcttgagatcacgacatacaatgaattcccagccacccaggagtccgtggcgcaggaggaattcgccatcttgatccatctcaaggctccgcatgtgccgtcgtgggtgagcacccgagcgccgctggatctggtgactgtgctcgacgtgagcgggagcatgtcgggccacaagcttgcgctcctgaagcgcgccatgaggttcgtgatcgaaaacttgaccca

SEQ ID NO: 4023 - DNA, 2407 bp, Zea mays
  Clone ID: TF_ZmC25728_1
gagacagggcattccttatggctggagtggacattactcctagccggccgggtccgggtgtgtgacagcattcccaattcctcaccctcaccgccgccgccgcgccgccgccctcgcagccaccaactccaccgaatctgaagccatagctgccgactgcggccgcctcgaggagcggtgcccctatgcgccgaactccagcggtttctttagcctgttcgcgcgggccccgcgccggggcctgccatggtggggcggagctaggaaggcgtgagcttcgcgaccgcgccggcggaggaagaggcgtgagagcgcgctacaattaaggcgggcgtctcgcccgccggatggccgccgatgacgcggcgcggagcagcagacggatggatctgaacctctacctcggtctcccccgggccccgcgcgccccacgccccgatctcggctccgacctcgcgctcggcaccccgatgctgtcttcgtcgtctccctcgtcctcggccgcctccgcggacgcgccgccgctggagacggatccgctccacccgccctactcgccgtcccgtgccgacctgatgcgcccgccgaccccggcgcacgagccctacaacccgttcgcgcccgaggcgcacccgccctacgtgcctccgccaccactgccggttgcaggggctttacctgtgctcgctgatgagcttgagtttggtttttctgacgcgcaccttggtctggtcgagcgtttagaccggccttcgtcatcgacggcatcctcttctttccgcccggatcttgccgagcgctaccgccacttgatgtccttgggcgggtcacggttcttccggccaagacggttccggtccgaccttccacctctcagctcagagctccctagcctggagaatgaggctgcagcacaaccgcctgaaccggaagaacctgtccgtgatactgtgaggagaacaaggtggctgctgagggtgcagttgtgggtgtctcagaggatgatggaacagagcatggtaagagtaccgcaatgttcgagtgtaatatctgttttgaaatggctgatgaaccagtggttacctcctgtggccatctcttctgctggccttgtttatatcagtgacgcggggtccactccagccacaaggagtgccctgtccgcaaaggagaggttactgaagggaacattactcctatctatgggagagggaattcaggttcggaaatggagaaaaaggttgcagaggatggaaaggcatctggccccaagattccaccaaggccacatgggaatcggctagggagcttcaggcagcagttccaccatttgcgacccatatctagaaggcttggtgaggcacatggttttttgtctacgtggaggcgcattcttgatcggcatttagcgaatagcatgagtagatttgaagggcctcctgaaccatctgtttcagaaactgctcggcatgcaagcagtcttggtcgaatgactactaggttgagagcaaggaggtggcaaagggaagcagaaaaccctacatccattgattcatctacaccagatagtgggcagcctgtaaacaatacattcgatctgccaaggcgctcttcaaacccatttccctcagaagggatggatttattgcgacacattgccttcgctggtcttgaagactcagagaggtttgcgactgctgtcagtgaacttaggcgtattgctaggccaagcccttacggggcatcaacttcatcaaacccaccaaatcctgagcctattgatggaactcatattgccatggcactggctgcagatcaagcttctaattcgagcaccatggctgtcattcaggaagatgcagcttttgctgaaagtgctggagaacctagtaatgccgggtcttcaagatccctgagaagaagaagaggaagtggtgccttaggttctttggatgtggatggtggggacctacatcagaataagagaaggcgtctgaactaagctgaagacagctaaaatcaagccagcaggttgcagcgatattctaatttgctcggtgtgctcttctcagttaagcaatgttctaatgaagctagtaggtaatatctgctgtgtggtatgaagttgtttctctggtactagtttactaggcagctcctggttcgttgccttaattccttccggcctgttcaatttatgcgatcactcaagacatgtatactgcggaaacctggtggttgtcatcagatgtattttccttgatagtaaattgtatgtgcagatctgtaattttcttcatagtaaattgtatgtgcaaatctgtactcagtgaatttggtctctagctgggaaataacacatgagcggacaccagggcttatttgtggatagcttctgattccaccg

SEQ ID NO: 4024 - DNA, 1391 bp, Zea mays
  unsure (1)..(1391): unsure at all n locations
  Clone ID: TF_ZmC492_1
cccacgcgtccggttctagatcgcgagcggccgcccgcgatctagcggacgcgtggggctttctctctacttctgtctgagcccttctgtcaactttcactggttaaaaattattcaatgggagaaagttgctcatctgctcagcaatctggcacaagccaaagtgctgagttgatgccagattcagacaagacagtgcatctaagagaggaactttcagacttaatcgagttcccaacatctgaacttctcaaaactgnatctgacagctcgagatagggttgatgtattcattgcctggtcattgttgctgtcccacctgcaaacactaccagcatcttccagtatcaagggagatgtgcttcaatacatacaagaaaaggtcagtccgtgcatattggattgcattttccagcatatcccagtaaaggccgctgcgccgagtgggaagaaaaaggacaccgagctagcgcctgaagcagaagctgctgccaaagcttcgaagaatgccatagctacttgttctttgcttccgtacttggagtctctttggcccatcgggactttgcagatggcctcacttgcaggctcactgtacgggatgatgattaggctgctgccttcttttgtgcgcacatggtttactaccttgagagaccgttcattgtcatactcaatcgagtccttcaccaaacaatggtgcagccctcctcttcttctagatgagttttctcaggttaaggagtccgtatacggcgatgagaatttctcggttagcgtcaacaggtcggctttcgagatcgttgctacatacaaaaaggaggagacaggaatcgaccttgtcatacgcctcccgagctgttaccctctgcgccacgttgatgtcgaatgcacgagaagtttgggtatcagtgaagtcaagtgcagaaaatggctgctttccctcacgtcattcgtccgcagccagaatggcgcgatagcagaggcgatccgcacgtggaagagcaatttcgacaaggagtttgagggcgtggaggagtgcccaatctgttacagcattctccacaccagcaaccacaacctgccgcggctggcgtgcaagacgtgcaagcacaagttccacggcgcctgcctctacaagtggttctccacgtccaacaaatcgacttgcccgctgtgccagactccgttctagtcctagctctagacacatgcttgtttgttggcaccacaccgttcgatccttcgatgtaaatggcgtgtgtacgcagcgcagtgttcagcgttttggctgttaaatactctcgaaacaggacgggacctgcagagactgagttcagaggtcttataatctacagttaccgtgaattcaatagattatttttgcggcc

SEQ ID NO: 4025 - DNA, 1454 bp, Zea mays
  Clone ID: TF_ZmC2252_1
ggcagatgaatgaaggcgttgcctcgtatagacctatccaatgcaacgacggatatcaccgagtggcgaccgcctgacgcgcccgtgtcggcaagccgccgacgacttgacgtggggcgggggaaacaaaacaacgcgggcagcgccacggcaagcgcgtcccgggctccctgccacggcgcggacacagagagtggaaaccggaaggggggaagagagatggattcctccacctcggcggcggcggcaggggaggcggccgtgccgccggaggacgacgtctgctccgtctgccacgaccgcttccggatcccgtgccaggcgaactgctcccattggttctgtggagagtgcatcatccgcgtttggaattatggacctcctgtacaggcttgcaagtgtcccatttgtcgccgccttataaatctactggtgcctgctgcattatcagggcaggaggatggtccacaagctcaacgtattctaggagagattcagcactataactgtatatttggtggagcaccacgcagcctaactcagaggttgcaagacctacccttcttcatccgaagactgttcagagaactaatggacccccagcggaccctcccactcgtgttcagggcgcggatgctgatgatggtcgcactgagtgcaatttatgtgctgagccctgtcgacattcttcccgaaagcatgctgggcctctttggattcgtcgatgacctgctcatcctgctgatcgtgttcctccacctcgccgcggtgtaccggtcgttgctcctgtaccgccacgggggccagtagaagtcgctgtgcataaaccgtttgtttagctggtttccatgtggagttctctgagatcgcagcagcggatttggaagatcgccgactcgccgagtagatggcaacgtcacggacggcttagcctgtccctgctctgtaccattctactacgcctgtttttctgagactctgacacggtgaactgaactttggttggttgatgcaagtgaatttcccttcgttttactcgtcaggaaaagaaagggaaagagtttgcgttgcgtttgtctttgtttctgctctttggaagttggaattgaaactgcactgatgtttgcgtttcaggaactgcattgacgtggatcctgctcagttctcttagcatttacttatgggccaagtttgtagaagtttagtgggctgtagacccattggctgtcatgttgggccaccgcgacgaggaaagaagaggtaggggatcgccctggccgggtagttggctcttgcgggagggatgagatgggaatgggatggcgacgggcgggcgtgtgcggctgcaggcggctcggaaggggcacggtggagacgcagcggagccctcgcctcttctcctgctcctgctgcccggtactcgccgagggagacgctgctgacctgacgagctg

SEQ ID NO: 4026 - DNA, 1218 bp, Zea mays
  Clone ID: TF_ZmC13982_1
ctctgcttcgactctcttctccaactccgcctcggcgtcgtcgtgcgcttcgatctttcccatttccaaccggaggggaggcgtcggcgcaataataggaggcgcctttgtttcgcccatcgccggcatggggaactagcttcgtggctgggccccacgccatgcaaaccagtgagaccaccgggaccgcatcgccgccggctgttgagccggaggccgaggacaaggtggaagagggggcgcgggcgaatgaggaggcggcggcgaaggtgggcggcgacgacgaggatgactgggaatcggagcatgaggggaggagaggcaggcggcagcggtgccggcgaggcggtgcggcgggggacagcgccgtggccatggtgaagcgggagctgctcacgcgctgcttgacgtgcccgctctgcgaccacctgctccggcaggccaccaccatctccgagtgcctccatacattttgtagaaagtgtatctataaaaagctcaatgatgaggatctggaccactgtccagtatgtaaaattgatctgggctgcactccagtcgagaagcttagccgaggtcgaaataagctgctgcgggcagaccgtgaaccctgggcaacctgtgcgcaacttggtggagcggtggctgagggttggcccggcgcgcccgctgcacacggtgatcggctcctccgggggagattatgtgatggtgataagctatgggcggcccaagtccgcgtcctgttaaaaccatatcaccatcgacggcctggcgaggtcgattcctagttcgaacaagggttggtgccgccgccgctgccgccgccggggaagaggccgtcgacagataaactcaagcagcggtagcgggctgctctgccgcagcagctcgtcctctcaccggcgtgttctttaaggatctgttcgttcgttcgttgttgtcatacatgcacatgtgatggaagtcgctataatttggtagtacttggtaggctgtgagtgagaactgacgtttaggttggaggcgagatcgttaacctgagcttaagtgttgggggcgatgagtccgccgtgtatgggagaggcgctgctggttcagttctttttcctccgttttttttttcacttcttgaagggaaaaacacacacaaatacataatgtacctccgtttatttgtcctgaactaatatccagccgtgactgattcggatcgtt

SEQ ID NO: 4027 - DNA, 2036 bp, Zea mays
  Clone ID: TF_ZmC13982_2
gtctttccatttccaccggaggggaggcgtcggcgcaataataggaggcgcctttgtttcgcccatcgccggcatggggaactagcttcgtggctgggccccacgccatgcaaaccagtgagaccaccgggaccgcatcgccgccggctgttgagccggaggccgaggacaaggtggaagagggggcgcgggcgaatgaggaggcggcggcgaaggtgggcggcgacgacgaggatgactgggaatcggagcatgaggggaggagaggcaggcggcagcggtgccggcgaggcggtgcggcgggggacagcgccgtggccatggtgaagcgggagctgctcacgcgctgcttgacgtgcccgctctgcgaccacctgctccggcaggccaccaccatctccgagtgcctccatacattttgtagaaagtgtatctataaaaagctcaatgatgaggatctggaccactgtccagtatgtaaaattgatctgggctgcactccagtcgagaagcttagagctgatcataatatacaagatgtgaggtcaaaattttttccattcaaaagaaagaaggttaatgctgaagaagccgaatctcctattatgctgcctgttaaagttaaagagaggtctatctcatcgttggtggtcaatacacctagagtaaccccagcagctttgacagggaggcgaacaagagcggttaccaggaaggctgccgcattgcgtggccttggtcctatcattgtggatcctttaaaaaaggacaacgataacccaaataagcaaactgataattcaagcttgctagatagcttgaacaaaatacctcaaacaagaagacagttattgtcgaatggggacacaacaagtcatctctctgttaaagataaagcaggtgataataaggacctggataagtccgagttctggaaacctttgaattgtcttgtagaagctgcaagcaaaacaaagcccctgacaagtgcaccaaggccagctttgaagggagataagcccagaaaatctccgagtagtgatagcgaacattctagcagaacaaagactagggagcctcttcagaagtccaaagctgaagttgacaaaagcgatcccgggccaatagtgatgcttagaaagagagggcggcctggccggaagaggaaaaatcccctacctgaaacaaatgcagattccactgctacagctatccaggccaggaaggcattgagcccaatatggttttcattgattgcctcgtttgaccagaaaggtgtccctcctttgcctcagatacctgcgcactatttgagaataaaggatgggagcatacccgcgtcatctattcaaaagtacattgtgcagaagctcagtcttctaagcgaatccgaggtcgaaataagctgctgcgggcagaccgtgaaccctgggcaacctgtgcgcaacttggtggagcggtggctgagggttggcccggcgcgcccgctgcacacggtgatcggctcctccgggggagattatgtgatggtgataagctatgggcggcccaagtccgcgtcctgttaaaaccatatcaccatcgacggcctggcgaggtcgattcctagttcgaacaagggttggtgccgccgccgctgccgccgccggggaagaggccgtcgacagataaactcaagcagcggtagcgggctgctctgccgcagcagctcgtcctctcaccggcgtgttctttaaggatctgttcgttcgttcgttgttgtcatacatgcacatgtgatggaagtcgctataatttggtagtacttggtaggctgtgagtgagaactgacgtttaggttggaggcgagatcgttaacctgagcttaagtgttgggggcgatgagtccgccgtgtatgggagaggcgctgctggttcagttctttttcctccgttttttttttcacttcttgaagggaaaaatacacacaaatacataatgtacctccgtttatttgtcctgaactaatatccagccgtgactgattcggatcgtt

SEQ ID NO: 4028 - DNA, 476 bp, Zea mays
  Clone ID: TF_jC-zmXLIB3526025da05a1
actttataaaatagattagttaattgacgtcacggtagctatgacaaggtacattttggagtgaacaaagctacagctacagggacacattcacacatattgacaacaacgacacatttttcagtcaggcgattacttgctggatcatgtaaggactcgttggtccatgacataatctctttctctctctcactatataatttacaaggtgctcttctggaagccacacacacgcccaaggcaagttgctgtctcactatacatcatggaagccgttgtgattcaatgtcgtttcctaccctcctgtggctgtcgcggcgcccaaagccaatggctggaggagcggtcctcgggacgacgtcgatctcagctttgcagagtgggcacagcgcatttatcttgagccatttgtcgacacagtccttgtggaagaagtgcccgcaagggagcaaccggagatcatcgttatccacgta

SEQ ID NO: 4029 - DNA, 764 bp, Zea mays
  Clone ID: TF_LIB4704-006-R1-K1-F2
gaccctccgggttggccgggacttcacccaaaacccaaatccgttccacccgcaaggactctcttctgggaagagtgggacggatcgagctcgaccccacagaggtccgtccagaccctcctctccggcatagaaaggagacgaacgctctttggggtaatggcgccggcgtgggagcgtgccaggcgcgcgctcaccgccaggttctgcatgcgctttgcggcgaggcgcgtggtcgtcgaggacgcgccacgtgggatggtcgacatagaggcgccttttccggtggcggtggcggaggcggagcagcagcaagagcagccggaggacgagagggagatgttgctggccgcggtgtcctccgaaccggtgtccgagcagctggcgtcgtcgaggtctgggagccggagttcagcgatatgtgcaatttgcctcagcgccatgaggtccggccgcggccaagcactgttcactgctgaatgctcccacaagttccacttcaactgcatctcctcaaacgtgcagcacggcaacaaaatctgcccaatctgccgtgcagtatggaagcagctgccttttcaggggcctctggctgcatctgctgcccatgggtcagcgagagtaaacccagcgatttggccccagatgagcatgctgtcggtgaatccgctggacgagctcccagtctttggcaatccggagccagctgttttcaatgacgatgagcagatacttcttcagccctgaaacagcattggcggcga

SEQ ID NO: 4030 - DNA, 2462 bp, Zea mays
  Clone ID: TF_ZmC77550_1
ggccgcttttttttttttttttttggagaaaatagatgcctttataagttcacttgattgattgcataggacattctcctcttatgcagatgtcgttcatatacaggaagaaatggcacttacagtgttgccactagtacttaatgcagttatttgttttggtactagcatgaagatgattctcaatgttcttgtttgcaaccacaaaccacttgattgaggtgtggcttgtctacattcctgacttggtcagttctcttgatttcagaagatatgtgcaatttgcctcagcgccatgaggtccggccgcggccaagcactgttcactgctgaatgctcccacaagttccacttcaactgcatctcctcaaacgtgcagcacggcaacaaaatctgcccaatctgccgtgcagtatggaagcagctgccttttcaggggcctctggctgcatctgctgcccatgggtcagcgagagtaaacccagcgatttggccccagatgagcatgctgtcggtgaatccgctggacgagctcccagtctttggcaatccggagccagctgttttcaatgacgatgagcagatacttcttcagcctgaaacagcagttggcggcgaggagggtgacgaggttccccctttgcttgagatcacgacatacaatgaattcccagccacccaggagtccgtggcgcaggaggaattcgccatcttgatccatctcaaggctccgcatgtgccgtcgtgggtgagcacccgagcgcccctggatctggtgactgtgctcgacgtgagcgggagcatgtcgggccacaagcttgcgctcctgaagcgcgccatgaggttcgtgatcgaaaaccttgaccccagcgaccggctctccgtcgtcgccttctcctcgtcggcctggaggctgttcccgctccagaggatgaccgcctccggacagcagcagtcgctgcaggctgtcaactccctcgccgccgatggcggcaccaacatcgccgaggggctgcggaaggctgccagggtggtggaggacaggcaggccaggaacccggtgtgcagcatcatgctcctctccgacggcgtggactcccacaacctcccgccgcgggacggctcggcgccggactacgggccgctcgtcccgcgctccatccttcccgggagcgagcaccacgtgccgatccatgcctttggcttcggcatggaccacgactccagggcgatgcacgccgtggcccagatgtccggcggcaccttctccttcatcgacgtggtggggtcgatccaggacgccttcgcgcagtgcatcggcggcctcctcagcgtcgtggcgcaggagacgacgctcagcgtcgagtgcgccgaccagggcgtgctgctcacgtccatcaagtcgggcggctacgccagcggagcggacggcgacgggcgcggcgggttcgtcgacgtcggccgactctacgccgacgaggagagggacttcctcgtcaccgtgcgcgtcccgcagtcacgcgggaccatcgcgctcgtccggccgagctgcacctaccgcgacgcggccaccacggagatggtgcgggtggggggcgacccggtgacgctgctccgcgcggcgagcccggtgagcgcggggatgtccctgcaggtggagcgcgagtggcaccgcgtccacgccaccgaggacatagccgcggcgcaaaccgccgcggaggagtacgactacgcgcgcgcggcttcgatcctggaggcccgccgcctgctgctggagtcgtgcgcgtcgctgtcctcggaccagcaaacgcaggcgctggtggccgagctgcgggagatgcaggagcgcgtgctgaacgcggagctgtacgaggggtctggccgcgcctacctcctgtccgggctgagctcccactcgtggcagcgtgccacggctcgtggcgactcgactgagctcacgggcctcgtccacagctaccagacgccgttcatggtcgacatgctcaacaggtcgcaggcgctccagccggaggtagcggaggcgctgagccggtccccgacgatcgcgtcgtcgcgcagctcggccccaactcccgcccctgcctcctccggctcgccgtggacgcgacgcgggcttcggtcgttcaggccggcaaagtctttcaccgggctgtcattgtgagtgcaggactgcaggttcgctgattccattcacaatgcatgcaaactggcatcttgcagtagcagtagctaggaggagcgcggaagaaaactatcaccattgattcgtttcttcgatactctattgtcgtagagaggatttggtattactggtttgtactgctgtttgtccgtggattaatcctgagacatgttgtttgaccatcgattcgggtgtttttgttctataaacgtttgtgctgtttgtcgattgttttttccatatagtagctgtttggccc

SEQ ID NO: 4031 - DNA, 1801 bp, Zea mays
  Clone ID: TF_ZmC49468_1
ggaaaaccgattccccgcctcggtgccgggggaccacaaagctgacctgcggaagcgcgaggaggacgaaagggaccggacgaagctacgcgctgcaccgaccgaccaaaccctaggcgttcggcgggcgtcaccacggcggcgaagaaagggtgcctcgcgtcgccttggtgtccccgaagtcgtcgacggtgcagctcgatccgcctcgtcgagcatgtcgaggagggtcccttgcaaattcttcttgcatggagcttgcttcaaaggagattactgtgaattctcccatgactgcaatgatcaaccagataatgtttgcactttctaccagaaagggacgtgcacctttggtagccgttgcagaaatgaacatgttgaagttcattgtaactgcccccaaccagcaaccactgtagcgcgtgcatcctccaattcttctcagctagttgcttcttccagagatccccattgcagcgaatgccaaacggatttatgtgaccaaacacagcagatttgcaagtcaacagcagcactttctgcacatcaacctgcatgggttgttgattatcatgaccatgacactccagatgatactacaagctggccgttgcaccaagctgtgcaaaatcaaacatcacaatatcctgttcatctgccaatttgctcttctactgctgatggcacttgtccttatgggaaaggctgttctcagatgcatggagatctgtgtgcattctgtgaaagacagtgcatgaatccttatcaatctgatgaaaggggggtacatgtcaagctatgcaagaaaaacaatagagttcttgaggccatgagaagaagtgaagacatagaatgtggtgtgtgcttggaccgtgtgctttcaaaacctacggcagcagaaaggaggtttgggctgctatctgactgcgaccattccttctgtatctcatgcattaggaattggcgtagcacctctcctacgtctggcatggatgtcaactctacactcagggcttgtccaatttgccgcaaattgtcatactatgtagttcctagcattacttggtactcctcaaaggaagaaaagcaagaaattgttgaaggttacaaggccaagctcaggtctattgattgtaagcactttgacttcggaaagggcacttgtccatttggaagcagctgtttttacaagcatgcctacgatgatggccgtttggaagacgctttattgaatcatcatgatgccgacgatgcaagcgcagcgattgccaaacttatgaggttgtcgtacttactgactcggctgcatgtgtaaggaaactcaaacgtatctttgagcaaacattgctgagttcgattggagttcgttgaccgagcaggcaaccttggatttcgctttgtaatggatattataaaaaacatccaaaaaaaagagggcagtcatttctgaattttatcttttcgctgaatgttcaaatcatcagaaggaagcagtcccaatcgtgccacttccacttggaagctagcattttctatccgggttggtacctgattggtggttgtgaccaaacttaactatacccaatactggtgatcctcgtttgttgcagcatctctagcatttcgtttttccagccccgagaaatgctctattgctctgtaattgaagagtggagaaatgttaatctcgatctttagtgctgctcgcctgctatggcgcgtggaactaagttcagttaaccccagctatgggtattctttaccacgaaatattcatctcttttattgagattgagagaac

SEQ ID NO: 4032 - DNA, 528 bp, Zea mays
  Clone ID: TF_uC-zmroteosinte084d10b1
tctgattaacaatagagttcttgaggccatgagaagaagtgaagacatagaatgtggtgtgtgcttggaccgtgtgctttcaaaacctacggcagcagaaaggaggtttgggctgctatctgactgcgaccattccttctgtatctcatgcattaggaattggcgtagcacctctcctacgtctggcatggatgtcaactctacactcagggcttgtccaatttgccgcaaattgtcatactatgtagttcctagcattacttggtactcctcaaaggaagaaaagcaagaaattgttgaaggttacaaggccaagctcaggtaagtacttgatttgaaaatttgttttatccttaggcacatcgtttatgcgattttcaggctgcccagactaataacagcaactcatctgtagtgattaatttgcttattgttgaggcatagataaaacttctgttgtatttttctgcccaagcagaagttaattcactagtctgatatgttatgcaagtctattgattgtagcac

SEQ ID NO: 4033 - DNA, 402 bp, Zea mays
  Clone ID: TF_LIB3356-061-P1-K6-D8
gcacgggttccacgtcgcgtgcgtcgacacctggctgcgctccaactcctcctgcccgtcctgccgccgccccatcgtcctggacgacccggcgccgccgaagcggtgcctcaagtgcgaggccgtcgtcctggaggccgtcctcgcatcctcctcctcctcgtccgccgccggcggaggccgcggcggtgggggattcttgccgtagcatcagcagtagttggccggttgtttgtctgtgtctgacgggcggggccaggccaggcaggtcctgggtagttgagctgctcccatcagcccgtgaggccatgacccacatgtcattagcgcagcgagtagaagaagatctctctttttgaaaggtagtgaaaacgaagaataaaactagaaagaaactagaaa

SEQ ID NO: 4034 - DNA, 847 bp, Zea mays
  unsure (1)..(847): unsure at all n locations
  Clone ID: TF_ZmC285028_1
gtgtcattctgccgctctccatagtccatccggtcgcggcgaagctcggccagacggccaccccaatgccgtcacggtcgggctcccggggcaggcggccgcggccggccccagaggtggctgctcccacggctgtacaagtgagctcgtccggctcgagtgaggaagggagcgatgaggaggaggagaggagcccgggcggctctgccagcaagtataaggcggcggagagtgaagccgaggcggaggacccatgccttcccagctgccccatttgtatggtcgtgtggaccgctgatggtgcgcatcgcgtgagttgcatcccttgtggacatgtctacggcagacattgcttagagatgtggttactgcagtacggcaagaaaaaggcaccgtgtcctcaatgtggcaagagatatacacagaacaacatcatcaacctctatgtaccagagattgttgttcccaataatgatcttgaaaatcaagtattgtccttgagagagagaaatgaatatcttgagaagcaacaagcaaaattacttgaggagataaaagagcataaggtaccacacagatgaaatattgtctcagtaaccgaattgaccaatttctctgaggaaacatgggtgactccttctgataggcagattatgttgcaacaaaatgtaatatatgaatcaaacaaaaagagacagagagtggcagagcagtcatcagatggaatactangggctgagctaattgcctcacatacaaaggacattgacccacagcatctgtcaagttttgctcttcagaatgagtttttggtcgatggagctcgggtcatgggtatagatgcatc

SEQ ID NO: 4035 - DNA, 2091 bp, Zea mays
  Clone ID: TF_ZmC130770_1
ccattccaggatcggttcccccgcgggtcctcgagggggaaagggaaagcctcaaaaggcgacgcgcaagggccgaggagagaaaggaacctgaggaaggcacaccagtttcaagcaatccctaggccgtggcgacgtgctgggaaggattcaaatcaggggcgaagcctaggtgacggcgctgttagtcgcctctagtagctgcgcgacgcgggctggcttgtccgatcggtttgcctcggccatgtcgactaagaaagttctttgcaagttcttcatgcatggagcttgcttgaaaggagagtactgtgaattctcccacgactggagtgatcaagcaaataatgtttgcacattctaccaaaaaggtgcatgctcgtatggtagccgttgcagatatgaccatgtcaaagtttctcgtaaccccacagtgccaccaccacgcccaacgtcaagtacttcaagacgtgcatctacttctcttcaactttcaagttacaatcatccacctcatatggtgcaccaaacagattcaagcaaccaaagacatcagatatctgtggatgtgttggcacattctgccagtaagcctgcatggagaaatgattttcagcatgatattgtttcagatgatggaattgactggtcttctaatcaaaatttgataaaccagacatcattgaaacctgtggatctccctatttgttcttttgctgctgctggtaattgtccttatggggaagggtgccctcaaatgcatggagatctgtgtgcaacctgtggaaaactgtgcttgcatccttatcgtcctgatgagagggaggagcatatcaagttatgtgagaaaaatcacaaacgccttgtagctctgaaacgcagccaagaaatagaatgcagtgtatgtttggatcgtgtgctttcaaagcctactgctgctgaaaggaagtttggactcttatccgaatgtgatcatcctttctgtattgaatgcattagaaattggcgtagcaattctcctgcatctggtatggatgtgaactcagcattgagggcttgtccaatatgtcggaaactttcatactatgtcattccaagtgttctttggtacttctcaaaggaagagaaagaggagatcactgaaagctacaaatccaagctcaagtctattgattgcaagtacttcgactttgggactggctcatgccccttcggaacaagttgtttctataagcatgcctacagagatggccgcttggaagaggtaatactgcggcatcttgatgctgatgatggaagtacagtaattgcaaaaagtatcaggttatcagacttccttggtaggatggatctttagggaccagcagctgtattgatatcaaatgcattctgggatatcgttatccaccaattatttacaatattctgaagatcagtttagcttgaggcatcttcggaaagtacagctttgtctccattatctttagggaccagcagctgtattgatatcaaataaagtttgaagatctccatggtcctgtagatgctgggattaccttttcagagcactgttgacctgagggcgacggaaacaagtctgacaacaattgtgcttgaatatcaaaacagaagtaatactcgtatttatagacttcactaagtgtggctctatgtatcaattgctggtcttctaggccaccagataatagctgaacatttcctggccgacaagtgaaaggggcagccgtataaatttgcttccattccacctgaatgttctcttcatattgtggaagggtactgcaccaataggtccaataaggccatttgtttgctttacttaatatacaaaaaaagtatagcagatgaaatgcaatgacaactgtaatgcagcattgttgaatgtgagcgtgagcggtggttttttatcgatgacctgctgaggaaggtcctcttagtaggcaggtaaactgagaacatttttttgttatatatatacagcataattgtacgagaaaaatagcaaatgaaccgagaatgatcattaaatgcagtcgtcggttgtatggttgtaccatctcaaaaccatcagtt

SEQ ID NO: 4036 - DNA, 995 bp, Zea mays
  unsure (1)..(995): unsure at all n locations
  Clone ID: TF_ZmC13088_3
gttcttcggccctgttggtgttaccctgcacacaccacatgaaaaaaaaacccatctcgtctgtcgacaggtgcagcaagactgtgcgaactgcggagcatgtctcggcaaatacttctgcgcgaaatgcaacttcttcgacgacgataagtgttccctcttctgttttctccggttttgttgtcgcgttccctggcatttcaggtgtcgaagaaccaatttcactgcgatgggtgcggcatatgcaggactggtggcgcagagaatttctatcactgtggcagatgtggatgctgctacaccactacgctgaaggattctcaccgctacgtggacggagctatgcatcacaactgccctgtctgcatggagtatctattcgactcgatgaaagctatcagcgtgctccactgcggacacaccatccacctggaatgcctttacgagatgagagcgccncagcagttttatgccccggtgtgcctgaggtctgcctgcaacatgtccgacatctggcaaaagctggatcagcaggttgcagcgtccccgatgcccagcgatcntatcagaagaagatggtnttggatcctttgcaacgactgtggcggtgacgtccaacgtgcagttccacatcttggcgcacaagtgccctggatgcagctcttacaacacccggcagacgagggggcgatccagccgcatgctttagagtttgagagcaaataaaactgcagtactgcactgcacataaactcgtggggttgtgcggtcgatcgataggtagcttgcatggaggaaattaaagactaccattgcgcatggacacgattggtgccggcagttgagtacgtgtattaggcctgtcatatgtagatgtatcatatgctatgccttcgcaaagaagaatttggcgcagcggacagggtatatatttttttgttgctatatatacacacatatttttgttgcgcggtgcttgtgccaatgagtggaga

SEQ ID NO: 4037 - DNA, 2427 bp, Zea mays
  Clone ID: TF_ZmC3546_2
ctcccggccggcaagcaggatcaggggcccgggcgtcccggatccttgcaaccgttccgtttcccgcggccgggctggcttacttctgcggcgctcgttgccatttcgggccaaatttgttgcgtgaagcggggggatttggattgaatggcgcgcgttgcttccaatctacgccctcttgggaattcgttgagaataggaaatcgccgtatgagaaagtttgttgggtgggtcgccagatcggggcaactccgtcgttcgttgtcaacagcatgccagcgagatcgaggagttgctagcgtgtgccgcctcgaggtacaacatctaatgctacaatatataatattttgctcagtgaattgatcaagtttggcgcacgagtgtcatgctcctaggttttgtactaattgaagaagtagcaaatgtagttcgtggtggtggtttaagtcatgtctgatgaaattgatgcttatataagaggggttctttgtgctttcgaaagaattctgcaggaaaatcgactggcatttgttgttcttgggtacacaatgaaagatgggaaggcatattttcccccacatgacagtatctatacatattgcagttgaaatggaaataattgaaatacaaggtatgtgcaggtgcagtctattatattggagttaagagagcgctagcttgcagtcacactcgatgaagttcaaggggaggcgggggagatacggccggccggggaattgtttaatcccccgtcaccggctcctatcgccatcaccccacccgtcccccttggtccaggcgcaggcgcgagcgcgacgtccggcgtccggcttcggcggcggagtggagcgattccgatccacacagggaattccatcgctgtcatggcgtttggtggcgctcctcccggccgtcaagctggatcaggaaatcgcacggaggtgagaagaaacgggtgtggaactagagctaggcgagcctgtctggtacctcgcggaggagatggacgagaacgccacgatggagagcaagctgggtcccgcaggtgtgttgggatatcaagggcgtgcaggtggcctgtgccgatggccgcagcatctgcctcgacgccttctgcgacagcaacccctccacgatgaccaagtgcaagcatgactaccatcttcagtgcattcttgtatggtgccagagaagctcccagtgccccatgtgttggcagcatatcagcatgaaagttcctatgagccaagagctactagaggttgttgaacaagacgaggaacatccgagctaatccttcacgtaatactcgctgttttcaaccatcaaatgactggggaattttgagatccctataggttcagatgatgcagcaacttgaagaacgcattattcagcacttggctgccgcagctggcagtgcgtaggtcacaccgtcatcataatagaagagatgggcaccagagcagatcagaagcaagtagccacccacagtttctggtgctctcagcagacgagcgcacaatctcaggtcaagaaggggactacgaacaagcatctgctgtagcttctggccgccctttacgtacacttgttgaacaagaacgcactcgagggttagcggatgcttccagtccatctctccgttgttctactcctgctgatagtactggtagatcaaacaataggatttctgggatcgaatctacacctgtggatcaagacggaactggaccatccgctgtacaatcaatggtacagggatttcataatcaaagtgcaagtggatggagggagaggtggttttctcggagcaactctttactggatcttggttctgaggtgaggagggaggtcaacgcggggattgctgcggtgtctcgcatgatggaatggcacgatgcaagggacgggacgggagcggggccttctcctacctctgcatcaagatctggttctcagtgaaacactctgcacttgaaaggaccgatgcaaatgtaaagattaaggtatgtgctcatgctgtgctaatgaaagccttaaattcagtgttttgttttttttctggtggcgtactgtcactgttgactggcctacggatctgagtttttgtgtaattgtttggaagcaattccattgtcgccgaaatggcgcggtagtttctctgactgctgctgctaaatactaggaactttagttttcttcaagtccaaagggtcagagttgagagcacctgagatccggcgatgcttcatggccacggtcccccagaggctattcgcaatagttgactctaaatttctctctatatatcagttttttgtgtcacattatcaacatttcataccttactttttttaggagcagctattgtttgaggagcactttaggaagacaatcacctgcaacttctctagcatatatgaa

SEQ ID NO: 4038 - DNA, 842 bp, Zea mays
  Clone ID: TF_ZmC11832_4
cgtcggtgctccgctgcggccacaccatgcacctgcagtgcttccacgagatgttgaagcacgacaagttctcgtgccccatatgcgccacgcccatcttcgacatggacaagttcttcaaggccctcgacgcagagatggaggcaagctacttgtacacgggaaaggtcagtgcgccttactgccagcctgatgctgtcctgtatgacccaatgcaaccaaccttcccagttctggtctattcttcccttcttctgtagaacaaagtagccctctcgtcttctcgtataaatggcacagatccagagagaggagacttggaagcggccggcgccggccccggcccccagacgccaagacgctcggcaacaagatccgccgtgtcagtggctcagtgcccgtgctgatcgatgctcgtgtgtgtgtgtgtgctggtgcagggatgggtcgtgtgcaacgactgcagggacacgacgcaggtcttctccggcatggcgggccacaagtgctgccactgccagtcccacaacacctgccgggtggcaccccccgtcctcccgtagccaccaccaccaccacatcattgttgttggaattggatgcagccagccaagatacccccggccccagcagctacgctattattaccagtagcgcctgcgcttttacgcaccgctccgttccagtccatgatgaactgcataatttcgtgccatgcaggtatgtacgtacactgttattggagatcggaagatttatccgactcgggacgcattatttgtaccacaacaaaacacgtgttacactattgtaataccagatctggatacgaaacttttttt

SEQ ID NO: 4039 - DNA, 1595 bp, Zea mays
  Clone ID: TF_ZmC17724_1
aatactacttccgtgaagctgtttcaaattcggcacgagggagctttggagggaaccccgaacccccgtcgtcgtctcgtgctcggtctctccggctggcggcatggagagtgccgtgctcgcctgcgaggcgccaaccgccgccgccgctgcggcgcctggagcgggaggggacagaggagccgagggcgtggtgatgctgaggcggtcgggcctcgcggcgtgcctcacgtgtccgctctgcggccgtctcctccgcgacgccgccaccatcaccgagtgtctccacaccttttgcaggaagtgcatatcagaggagtttgtaaataaggaagtgtgctgctgccctgtttgtagcattgacttgggctgtgctccactggagaaactcagaattgatcatagcctacagtatgtaaggtcaaaggtatttccttctaaaaaacgaaaggttgaggatccagaagtcacatcgccaattacatcacctataaagacgaaagtacggtctttatcttctttgacaaaacatgctcctcaaatgtctatgcaaaaatgcttgagaaagaggagaacaaaagcttcatgcttacaaaacctccctttgcactcaaccttgcggggcagtagtaatatcacaaaaaaatctggggggtggagacctttagggtgtcactttcgagcagctaaaaagaaaaggtctcttagacctaaatcagacgatataaagacagctggaaaaaggactgatgatccagttgatgtaactcttgccagtcaagcaaagactaggaagcaggttacaagacgtggaaatctggagaagagaactggaaccaagaaagtattgattttaaagggaaaacagaaaaataggaagacaaagaatacgcctaataagaggagattgccagcattatggttctaccttcttgctgcttttgaccagaaaggacatcctcctctgccgcagataccatcaaaatttctgaggatcaaggatgtaaatttgcctgcttccttcatacagaaatacctcgcgcagaaacttaatctttcaagtgaaactgaggtggagatattctgcggtggcagaccagtgagcccagggatcaccctgcacgacctagcagaccactggattggcaaacgatcgaagggccgagtgcggtcatctgtgggcacgcccgccgctgaattcgtgctgaaggtattttacgccaggtcaggagcgccccttccaaaaactgaaagcaaccaagactgatggagagcttcgagcttcccttcgtttcagaaccagcagtgtatcgtttgactcgtaggaccaattgattaatggtatcttagtaacatgtacatagatgttagtgtcacggattagaagctcccatgggcttactgttatatatatccccctagttcagtgcatttttaccgcttatatttttactgacaaagtgtgtagtatctaggctgtgtaattaaaactggatgagatgtcgagatagagtcaaatttcaagttgcactggttcagctggtatgaatcctggctgaaccggttttaaacctgctccaaaaaaaaaaaaaaaa

SEQ ID NO: 4040 - DNA, 4448 bp, Zea mays
  unsure (1)..(4448): unsure at all n locations
  Clone ID: TF_ZmC6175_1
ctctngaactgcattggttactcttctctctggctgggcatgcaaaggtcgtctggaggacacgtccaaccctggaaagttcgtatgcttggcatcaggagcggtcagttgtgcgtcagatggaaatggtttcaaaacatgccagtcactctgtccatgttatgtaagtagcaatggagctttttcaaaaccagttaagagagcaagtcaaggagaatctagcacaaatactgacagaaatcatagctcacacgatgctgctactgaagcatcgccatgtaacaacagagcctgttacattcccaggttaagagtagaaagtagctaccttggtgttcattcatctacccctacaaaatcctttcgccctctgtctttcaattatgttgcaccttcattatattcaagccttttctcatgggacacagatacactagtatctggcccagataacatttctaagccaattgataccatattcaaattccacaaggcaattcgcaaggatttagagtttttggatttggaatctggaaagcttattgacggggatgagtcttgccttagccaattcattggaaggtttcgtttactgtggggtctatatagagcacacagcaatgctgaagatgagattgtatttcctgctcttgaatcgaaggaggcattgcacaatgttagtcattcatacactcttgatcacaagcaggaagaaaaattgttccaagatatatccactgtactatctgaactttctcaactacatgatggtttgagctatcctcttgatgttgaagctggaacaaatgatatttcaagtagtgagattgattgggctagaaagcgtaatgaacttttgacaaagcttcaaggattatgcaaatctatccgggtcacgttgtcaaatcatgttcatagagaagaacttgagttgtggccattgttcgataaacatttttctgtagacgagcaggataagattatcggtcatataattggaactactggtgctgaggttctgcagtcaatgttaccttgggttacatcagcacttagtttagaggaacagaacatgatgctggatacatggaagcaagcaaccaaaaacaccatgtttgatgaatggctaaatgaattgatgagattctgtattggcacaatgctgttctgagagaactgagtgatatagcggaggagaatttcggcacgcggcagtctggagatttttctgacatagcaggatttaatatgaggctgcaatttattgcagatgtgtgcattttccacagtattgccgaggatcaagttatattccctgcagtggatggtgaattgtcctttgtgcaggagcatgctgaagaagaacggcaattgaataaatttaggagtttaattgaacaaattcaactagcaggagccaagtcaactgtagttgattttcattcagagttatgctcacaagctgatcaaataatgcagaaaatcgagggtcacttcaatgatgaggaaataaaggtacttcctaaagctaggataaagttctcacaggagaaacagagggaacttttatatcagagtctatgtgtcatgccactaaagctgttggagcgtgttctaccatggtttatagtgaaactgaatgatgcaggcagtgtcttttcttcaaaatatgccagcaccttcctctgaaactgcattggactcttctctcatgcgtctcctggagacaagtgtaaacctgccaggtgtttaggcttggttggaagatcagttttttctgttgacggagtgagctcgatgctgagctcacgcgctcgccgcctaggagcattcacgttggcggcgggcggcggctcggttcctctcctccaccgcacctccaagaatccacctccacgactgagctgacggctcggcggcgccatggcagttcaccggctccaaccttccccatccggcctacagtgctccaccgcccggtcgccagtgctcctccatgggccacggctgacgggtgcacgcaccgaccgatggttgcagtaggagaggtggatttggtggacctagattcgatgtgcagagagcgacttggaggtggctgacatcttcaagcactgcatcatgcagttacaactactgttggccatacagggaaatgctgggcctattataccaattgttcaaagcatggaccttgtatagttacatgtttttatcatagatagattaatttctgaaatgcccatagattggtatatttgtggaaatttatttgccaactgtaagcccgtcgtgatgcacagaacatttgtggtataagatttttctgttgatgtttgcaggttatttttccagcacttgacattcgagtgaaaaatgtcgcagggacatattctcttgaacataaaggagaaaatgatctcttcgcacatcagacaaggcttctactctttcagaagaaagtcattttcaggagaatcttgaacaaaatgaccagatgtttaggcctggttggaaggacatttttcgaatgaatcagagtgagctcgaggctgagattcgaaaaggtctctcgagattctactcttgatccaaggaggaaggcctatctgatccaaaatctcatgaccagccgttggatagctgctcagcagaaatcaccacaaccaagcgtcgaaggacataatggatgtacacgacgacctggatgtgttccttcgtaccgagacccagggaaacaaatatttggctgtgagcattacaaaagaaactgcaagcttgttgctgcatgctgcaataagctattcacttgcagattctgtcacgataaagttagtgaccatacaatggacaagtatcttcactccaaccattcattttatcgtaacacatttcctgctgagggatgctttcaaggatttcattttaacatcgaaccaatatcaattaagcatggcatttaatttggaaatagaagtttgctggggtgtcatggatgtgtgaagccattcacttgcagaatctgtccgataaagtaactaaggggccacttttgactctatgaccatgtaattggtgtttatacaactacattaacatgtaaaggttgtagatctggaaggtcttgatggtctaatacctatctatgagtacggaagaaagaagtcggtctctgcagcatcgaaaaatcagccaattcccgaggaaatcagtgatggagatgatgtgcatgcaatgtctgaatgttcaacctgttggtccaaattgtcaatccccttcttgcaatggactgtccatggccaagtattattgtagcatatgcaagttcttcgatgatgaaaggagtgtctaccattgtcctttttgcaacttgtgtcgccttgggagcggattgggcactgatttttttcattgcatgaagtgcaattgttgccttggcataaagatgatagaacataaatgccgggaaaagatgctagagatgaactgtccaatctgctgcgactttttgtttacatcgagtgcaccagttaaaggccttccttgtggccacttcatgcattcggcttgttttcaggcatatacttgtacccactacacttgtccaatctgctgcaaatccttgggagatatgacggtgtattttggcatgcttgatggtttgctggctgcagaacagcttcctgaggaataccaggaccggtgccaggatatactgtgtaacgactgcgagagaaaaggcaggtcacggtttcattggctctaccacaagtgtggtttctgtggttcttacaacaccagagttatcaagactgatacggcagagtgttctcgccctctataatttcttttatgcaatccatttgtatatatatcgacggggtagaaaccttgtgaccgtaggtgtgatagtttttttatagagtgaactgggggaggaaccccacctggatgtattatgaggaaaaagtgactgcacatgaggagtctgagaattactcgctcccgtcccaaactaactgtatttctacgatttgaaatatattcgctcatatattcaaaatatagttgtaatttatattttggcatgcacgaaacaggtgtatttattcatttttgaacgaaattttatgtcaaaacggtcatataattggaactactggtgctgaggttctgcagtcaatgttaccttgggttacatcatcacttgggggggggggagcagnacatnatnctnnatacatggaagcaagcaaccaaaaacaccatgtttgatgaatggctaaatgaatggtggaagggaccttnaactttatttgacccataagacaaggcttgtactctttnagaagaaagtcatttttaggagaattttgaacaaaatgaccagatgtttaggtctttttggaaggacatttttcgaatgatttatagtgagctaaaggctg

SEQ ID NO: 4041 - DNA, 1916 bp, Zea mays
  Clone ID: TF_ZmC24792_1
cccgggtcctaggccagcaaaccccctctgtaccctccgggcaatcgggcatgaatccacccatccgcgatgctacatggagctcagcaagcctcggcgtcgtcgaccgcaggcccgcgccccaagagcactgctatcctgcagtctgatcagccacctcgcgccgccgccgcgcgggaggggggccgcggcggcacgggtccggagtcgcttgtgcgcggctcggtcgtcgcgccgtgcgtcagctgcggcatctgcggcggactcctccgtgacgccaccgccttcaccgagtgcctacacgccttttgcaggaaatgcatatatgacaaggttgcgaaagacaacataaagtgttgcccgaagtgtggcatttttatgggaaatccgttggagaagctcagacctgatcatagcctggaacacatcaggccactgatatttcctgctaagaggcgcaaggttgtcaccatgaagaagaggaaggaaagggtgtcctctgaatcaacccttccttcagtggtgggtaccactgcagaagaaagcactgcactgatacctgctgcttcagaaagtaaggcacaaaaggatcttactcctgtcggaagagatgctttgtcacgaattaggggtcgagactttgactcagcatgtggtcttactgaggatactggagccttgattgtatggcaagcaccacctattctagaggagacggctgcccacaatcagttagactccaagcaggacccagatagtttcaggcctccggcgacctctgatattgagtaccagcgacaaggaccaactgcacaaatgaccaatatttcgtttatggttgggaactcatcccatgcaaggccgactgaccaggatgatgaaaacatgagaggagatattctcacattgatcaatgagagcaatgcaagaatcatggaaatgtatgatgcccacatcagcaaactgaaggcagggaacataaaactaatagagcaactggaaaatgaaagagcagctgcacttgagaggacaagaatccttgaagagaggctccagcaagagttggaaaacgaaaggacagttgctgctgagaggacaagacttcttgaaaagaagctccaaagagaactggaacatgaacgagaagctgctattgagagaacaagagttcttgacgagagactccaaagagaatctgaaatcgcacgtactgctgcaagccggaatgaagctttaaaagaggagattttcaaacttcaggaggaattggaacatggaagagcatacaaccaggctctgatgtcagatattttggagaaaagcgaggaactcgctacgctcacatattattctaacctgcttgagtcagagaagacatatctagaaaaccaagtcgaccatcttaacgaggagttgaagtgtactaggaaagagcatgcagcatatgtccgtaaggtcttggacgcagcaagagccatccctaacgacttggagccgatcaactcggcaactccgatgctctgccgagatcgcggtgcacgtcggggatctgttagccagccacaggctggccatggctaacggccagcccccacaggcagctgatccttaagagtttggacctaatcttatttctgatagccctttaggacttctttgactgaacctgtgggcggtgttgagcgacttcccagctcgctgtccaggtggtgataattggcgttttattttgtctagcttcaggtgatgttttggactgtttcttcctcaggttgcagcagtacagtatagtgtcgcttccttctgttcagttgtagcttgcttcttagaaggtggtcggttcgtccgttctgttgtgtactctgctccgttgggcgtatcaagataaatgtaaattccattctgcttgcccaccc

SEQ ID NO: 4042 - DNA, 839 bp, Zea mays
  Clone ID: TF_LIB4738-122-A1-K1-H3
attgggacctcgagccggcccggccgccgtccctggagcaacgatctggacgacccgcaattcatgtgctgcgtatgtctggatcttctgtacaaaccagttgttatatcatgtggtcatatgtcatgtttctggtgtgtccacaaagctatgcatattttccgggaatcgcattgtgctgtgtgtaggcagccctatatacacttcccgagtatttgtcagctcttgcatcatttgcttctaaagcttgaaactaatgattacaaaagaagggaaaaagaagtactagaggaagagaagcgcatgcaaacatactctccccaaatcattgagttcttaaactacaagactaacgttggaagctataaggagaacagaaatgaagacagtaaagctagacctccacaagaagttccattgaatgacagcgttccagatgagcatttgaagaaaattaaattggaggatgtttcatgccctctctgtatggagatgctgtatcaacctgctgttcttaattgtggtcatggtacttcaggcagaaaaggaagcactagggcactgcatgctgaagacccgtcaaatattcacattggagtaggatgcgactcatgtggggtatatccgatacgtggtaagagatacaaatgccaggactgcactgagttaataggctttgacctttgcgaagcctgctacaactccagttcaaagctcccaggacgctttaaccagcggcacacccctaatcacagaatggaagttgacaattcagcactcgtgcataggatactgagacaccatggcataccccgaggaaggccctgaggactgatgat

SEQ ID NO: 4043 - DNA, 796 bp, Zea mays
  unsure (1)..(796): unsure at all n locations
  Clone ID: TF_LIB5117-058-A1-PF1-C8
acttgtgcaacaaacgaattcaagcaaccaacggttacagatatctatggataagctggcagtttctgaaagtaagcctgcatggaggaatgaggtccaacttgacagtgtatcagaggatgggattggctggtcatccattcaaactgcgcaaaaccaaacttccatgaaacttgctggtatgccaatttgttcttttgctgctggtggtaactgcccgtatggggaagagtgccctcacatgcatggggatttgtgtgcgttctgtgggaaaatgtgcttgcatccttatcgtcctgatgagaggcaggagcatatcaagctatgtgaaaagaaccacaagcgtctcgaggctttgaaacgtagccaagaaatagaatgcagtgtctgcttggaccgtgtgctctcaaagcctactgctgctgaaaggaaatttggactattatctgaatgtgatcatcccttctgtatttcatgcataagaaattggcgtggcaactctcctacatctggtatggatgtgaactcagcactgagagcttgcccaatatgccgcaagctttcgtactatgtcattccaagtgttctttggtacttctcgaaagaggaaaagttggagatcactgaaaactacaaagcaaagcccaagtcaatagattgcaagtacttcgatttcggaacgggcacttgccccttcgggacaagctgtttctacaagcatgcttacagagnatggccgcttggaagaagtcgtactgcgacatcttgattgtgatgatggaagtacacttattgc

SEQ ID NO: 4044 - DNA, 1515 bp, Zea mays
  Clone ID: TF_ZmC21544_3
cgaccgaacaaacaacatgtatgatttcacaagccgcccgctgaaaccaaagccttttgccctgtcgtcaggggcgaggtttcatcaacctcagtacctcaccctcctctcccggagagcctctcgcctccgctccgctcctctgccctgcccttccccgccacaccaaccaaggcgccaaaaataaacgccgcctgtcacattgcttgccgcgcctcgtcttcgcggaggcctcgtcgcgcgacgatatggagctcgccgaggcgccggcgcccgtgcccgacgaggacgggctggacgaacgcggcgtcgcgctgcacctcccgaggctgctggccggcgtcgtctccggcgccctcactggcctcttcgctctcgctggagctctgaccggggcagtcaccggcgcggtggcgggcagggcttccgacagcggcggcgtcctgcggggagctggactgggggcggtcgccggagctgtcctctccattgaggtccttgaggcttctcgcgcttactggtgctcgtcggaccggctgggctcgcacggcggagcatcgtccatggctgatttcattgagcagcttcttcgtgcccggtttgtgcaagagcaatttactgcttcaggatatgcatcatatcgctggcagctcagcatatcatattttggtcaggatgacctatacgacatctttggggacatttcatctgaagggctctcgcaagagtcactgaagaaactaccacatcatgtggtcagtgaccagacgcgggacttactcggcgaaatcctgtgttgtcctatctgtctacaggtacggtctgagcaagcgcgatcctaccactacagagtaactgtcaaagaaaccttctgccacaattaatacagtatgcactttgttttggttaaaaagtgttacgtacgttcaaataagagagagaaaactatatgctaaaaagtaagtaatcagcaattttctaggctacaactggtttcttcaaaaatggtttccgagcgagatagtagatgagaccatgaatgcaagtccaggcgcacgcaatggttggacaacgagacaatgaatgcatggttggagtgcaatcagagatttccaggacatcgtagccggcgacacagcaaggaggctgcccagttgctcccacactttccaccacccttgcgtggacagatggctcgtggatcgcggatcgtgccccgtctgcaggcaggacgtgtgagatagccagataggtgatcgctgagtttagatggagcaatagctgggtgatgcgaaatgtttgctcctacactaagttcatatatatatatagctactagagagaagatacgtactgtggtgtaaattagcagagaatctgcctgttctgttccactaccagccagcgtaaacggccgtgcgcatcggacttcgtttcttgcacccggttccaacgtgtaatgaaataataacactgctgttgggaagcagtactaaaaatttctaaacaaaaacc

SEQ ID NO: 4045 - DNA, 712 bp, Zea mays
  Clone ID: TF_ZmC60532_2
acctgtagccatgctatgtgcattaaatgctatcgtgaatggaggtcaaggtcccagtcctgtccgttctgccgcgacagcctcaagagggtaaactctgctgacctgtggatatacacggacagcaatgacatcgtggatatggcgacagtccgaagagagaacctgaggcgactctttatgtacatagacaagctgcccaccgtcatcccagaatctgtatttgacgtctacgactcccatgtaaagtgacgcagttgagcacgtctgccagttgttttatgtatttgctacgtctactggtgctgattcctgggcctctggtgctgttgtgcctttttttaagagtttcgaagcaactgggagccgaggaggctaatttgtatacactgaatgtacgtagaacttgttctatcatcttgtgccatgcgatttcggcctgtatggtggtttagggtcctagcatttgacgctgtatatgtcagtggttatggcaagaaaggtataggcgttctcctgatgcatattctgatccatgattttttgctcatggatggatggatggactttgtttgaaggtcaggctatgcaaatgtgaaatgtacccatcttcatacttatattcaaacttacattgcaaaacagtataaaaacagtgttatgtgacgttacttgctaaaaaaaaaaaaaaaaaaaaaaaaaaaaagcggcc

SEQ ID NO: 4046 - DNA, 1703 bp, Zea mays
  Clone ID: TF_ZmC9088_1
tgctgacatttgcaaccttcttgagagcaaaaaggtctcaaagtctcttgagagtgactttagcaataaaatgaaccagctgttgctaatagttctgcaaaaacaaaggcaacaacagatgatggatggttttggaggatactatgatgaatgcatgtactggagacaaaatgatgaaattcatgatgctcataaggaggcatctgctccatgttcatcagctcctgtctcacatcttggtgctcatcagcaagagtgttggcagcactcttcatatggaagtcaacatcacgataaccaaaatttacttgaaatggaagtcagggtaaggggtgaaatgtcccagattcaacatgaaatatatgaactgcagaagttggtggaaagttgtattgcatcccaagtaaagatgcagcactccattaaagaagaggtgtgcagtgcacttcgtgaggcaggcttgatgccaaaccaacccgacacaacagcagcaaaagggggtaattgctgcattccggaaacaatgggtgatattgagaatcataataatccaattcaattcaatgaccgcccctggatagagtcccctaactcgtggagatcactatgtgttgtcacgcaatcagactgtcatgctctgtcacacaatgctgacatttgcaaccttcttgagagaaaaaaggtctcaaagtctcttgagagtgacttcagcaataaaatgaaccagctgttgctaacagctctgcaaaaacaaaggcaacaacggatgatggatgactttggaggatactatgatgaacgcatgtactggagacaaaatgatgaaattcgtgatgctgataaggaggcatctgctccatgttcattagcccctgtcgcacatcttggagctcatcagcaagagagttggcagcattcttcatttggaagtcaacatcaacaccacgataaccaaaatttacttgaaatggaagtcagggtaaggggtgaaatgtcccagattcatcaggaaatatatcaactgcggaagttggtggaaagttgcattgcatcccaagtaaagatgcagcactccattaaagaagaggtgtgcagtgcacttcgtgaggcaggcttgatgcgaagccaacccgacacagcagcagcaaaaaggggtaactgctgcatctgccatcgaatgcaagttgactctctactttacaggtgtgggcatgtgtgcacctgttttgactgcgccgatcagctgaaatcgagcggcatgagctgcccaatctgtcaatctcctattgatgatgttgttctggcgcggttgaatttttgagcttagaatttaggaaaggccaagagaaaaagagccggcactcccagatttagacgtggagtttgcgaagccctggttttgaggcggcttcttacctttttgcttaaccaccactaaagaaatacgagctagttcttggagaaaatgtaaatatgtttttttggcgcaagagcggtgtgcttgtatcgcactaaaggaaaacagagttctaattaaaatgctggttgtattccccgtatgtaccacatcacttgttcacggagagaatgtaatggttctggttctatttgcgcgataggtttgaactcacagcattgatactcttcactcaggcctatttgaacaaattcaacgccaactaataatatgtttggtttgagga

SEQ ID NO: 4047 - DNA, 237 bp, Zea mays
  Clone ID: TF_jC-zmX148004Q1E1F9b1
ttggttacaacaacctcgaccccagcccgggggccgcggaacaaaagcggggcgagaacaaaacagcacggcacggaacgccgaccggcaaaaaggaggccaaggaagcaatgccgacccaagaaatccccagcagcaacgatggggacgacgcggccagctgcccggtctgcctagaggactacgccgccgcagagcacccccgccagaagccctgcacgcacacgatccacagca

SEQ ID NO: 4048 - DNA, 554 bp, Zea mays
  unsure (1)..(554): unsure at all n locations
  Clone ID: TF_LIB3957-008-Q1-N6-G3
gcccaagtaaatcaaatgtcattngaataaattttaaatcccaaatctaagattgaaaaaaacaaaggataaaactccatggtctacagccattggcttcaggcaagtgccatgtaccacctatagtatagattcccacatgtatgttgatgatgggaaaggtgtaacatactttgctagtcatgggagggtgtggttagatggcaaccacttgccctgccgctaccggctttttcctaaggaaaaaggcagccatgtttttaggtgtccagtgctgttttcttgcagattgggcacaggttttttataaccagccattgtttgatacatgcggtgtggaagtcatgaccacaatccagcctgcccaggtcctcgccttccacatagtcttcctgcaatgttcaaggtcaacaatgttcagtaatgccaatgagctacagctgatctctggaagtaaatgagtaataatgctgagccagaacaataagcccgttctaagcaagagcagtaaataaaacaagagatgctccccaaaacaattattatattaacgc

SEQ ID NO: 4049 - DNA, 1791 bp, Zea mays
  Clone ID: TF_ZmC64108_1
ctgtgactctcgagggtggaggggccgggattccgttcgggtaccttgctcgaggccgggtggccgggcaccgtctcgtttctctctcctcccctcgcccgtcttccctcttgtgcgagctcagctcacggtcctcccacccccatgagcgcctccgcggcgaggaaaagataatcagcaggcggagcggggggcgcgccgatggatctggagaggtcgccgccgccgtcgccggcggaggcggccggggccgcggcgtgctccatctgcctggatccggtgctcgcctgcgtcgcgggccggtccgtcgccaagctgcaatgcggacacgagttccacctagattgtattgggtctgcattcaatgcaaaaggagcgatgcaatgccctaactgtcggaagattgagaaaggtcgctggctttatgcaagtggacgtcacccccctgctgatattgatatgggtggctgggtgactagcgacaactatgatatcacctccgagcttccttttggatttcaatggtgtccctttagtggattcacccagctagcatcaatgtttggggtgcgtgaagctgagccaacttaccacacaactggagatcactcaagtgctgcaagcagttcacttgtttgcccatatcttgccctgcgtggttttctccatcctgttcatgtgccttctacttctaattctggtgctgaaagcacttcatttcatcggcactcaactggcttggaaggacatgtcactcctgatttgaacaatgctccagttttccatgctaccgagtcaagaaatcatgacagtgagcacagacatttgagtaatcttcctgtatcaggaactcctgaatattctatgactccatttgggataggagtaccaagatatgacagtggcagccaacagggattccgatcatatgcgcatcatcatcccctaatccataggctgacccctcgcagcggaagcaatctggtggcaccattagggtcagttccagccgtcgtggcagagactagaggccatggccatggtgcaccgggccatatgtaccagcactcatctgtgcagggcagcccgttccctcctaccaccagaagggttaggcccagagccttgacgattacgtctttcatcgcagcgacttcctcagctgagattgcagggccccttggccacgggtttcccgctcctggagccgtgaacaggagcgtttctgatgccgagggcatcgaccgagcgtacacatggggccgggagggatatgatctgttcccttggacccctgctgaatggggcaccttcaatcccatgcagaaccatgcgcatggaagctttaccagaaggcctgctggggagcggatgccgcagagtcgccccgagaacggataccagccgcctgtgcccacttcacagaggatgccaccgttcttgtgatcagacgaggctgcctctccaattgctgtgtataaaattatttgattcggggtttggcagagaacaacgagcgaatatcgaccgcacggcagcatcgaaactggtcggctatgggacctgtgtgtgtgtgatgtttatgatgatgccgctcgtatttttagcgctttcggtccagcggcgctcaggtttcgtcgagcgctgtcgtttgtcctgactgatatggtgttgcgttgaaaaggactgttaaaacagcggccgtttctgaactgcatctctggtcgccggggctaaaaaatgccgtttgctgctatgaaagaaagttgtatcgatttgcggccgctctag

SEQ ID NO: 4050 - DNA, 1329 bp, Zea mays
  unsure (1)..(1329): unsure at all n locations
  Clone ID: TF_ZmC64108_3
cactactatcatttgccgtcttccccctccttccattccgttcggatacaccgtctcgtttctctctcctcccctcgcccgtcttccctcctgtgcgagctcagctcacggtcctcccacccccacgagcgcctccgcggcgaggaagagataatcagcaggcggagcggggggcgcgccgatggatctggagaggccgccgccggcgtcggcggcggaggcggccggggccgcggcgtgctccatatgcctggatccggtgctcgcctgcgtcgcgggccggtccgtcgccaagctgcaatgcggacacgagttccacctagattgtattgggtctgcattcaatgcaaaaggagcgatgcaatgccctaactgtcggaagattgagaaaggtcgctggctttatgcaagtggacgtcacccccctgctgatattgatatgggtggctgggtgactagcgacaactatgatatcacctccgagcttccttttggatttcaatggtgtccctttagtggattcacccagctagcatcaatgtttggggtgcgtgaagctgagccaacttaccacacaactggagatcactcaagtgctgcaagcagttcacttgtttgcccatatcttgccctgcgtggttttctccatcctgttaatgtgccttctacttctaattctggtgctgaaagcacttcatttcatcggcactcaactggcttggaaggacatgtcactcctgatttgaacaatgctccagttttccatgctaccgagtcaagaaatcatgacagtgagcacaggcatttgagtaatcttcctgtatcaggaactcctgaatattctatgactccatttgggataggagtaccaagatatgacagtggcagccaacagggattccgatcatatgcacatcatcatcccctaatccatagttcatcccgagctgctgcattggccccaaggggcgtccatcaaacaaaccgtcctcaacatctatgacagcatccaatgggaagccctcaacatctatgagatcctcncccatggcctttggagtcttcgatggacaagaggcagccgtagactcgatcgactatatcgacgggtcttcatggtagcccttgtgaccttcggcgaaccgtgcatccccaacagctgtgttggcctcaagatggcagtaactgatttgttttgttagggactaggtgcatctgcacccatatgggacgatagactgtggcgctgccttaaatatgaaaaaactgatctgcttgatggtttcattggttagtccatgcgtactgaaatattgtctgttacgaatc

SEQ ID NO: 4051 - DNA, 627 bp, Zea mays
  Clone ID: TF_LIB4979-013-A1-K1-F5
atgtcaacgccatccgtaccattctcatgataaggacccggacctactcatcacccaggggggcgtacctagctccatccggcggaagcgcatcagctcagagacgacgacggagcagcagcatctcgtcgatcgcagctgcagcgccgccgccggcggcatggccgctgctttcgagcccacaccgaatatctcagaacaaccggagcaccgcccggcgaccaacaaaggcacgctggtcttcagctacacctgcgtcggcctcacgggcacagcgctcgtcgccgacctcctcttctactgctaccaccagctgctccgcagacgggcgccagtcaccgccgccgccgccgccggagcagcagccgagaccaataatccaccagggtcggaaggacaccatgtcgggggcgtggacatcagcaagcttcctggcttcgcgtacgccgcgacgtcgtcaaggcgcaggagaaacggcggcgacggggcgcactgctccgtgtgcctcggcgcggtgacaagacgcgagatgctgcggcggctgcccctgtgcaagcacctgtaccacgtggagtgcatcgacatgagtctggagtcgcacgcgacgtgaccgctctgccgatctga

SEQ ID NO: 4052 - DNA, 649 bp, Zea mays
  unsure (1)..(649): unsure at all n locations
  Clone ID: TF_LIB4765-009-Q1-K1-D9
ccggccggggacaaaaacgactctcggcaacggatatctcggctctcgcatcgatgaagaacgtagcaaaatgcgatacctggtgtgaattgcagaatcccgcgaaccatcgagtttttgaacgcaagttgcgcccgaagccttctggcggagggcacgtctgcctgggcgtcacgccttccccggcagacggcagtcgcatcgcatcccctccgcctcgttccttgctcggctcgccccatacttcgctgccggccgccngccgccgcattcccctcggctactcgctcctcgtcgctccccggtgatgtctggcggtaacgcatggtcgccactgccttcgcacggatttggatccgagtctagcggcatggcgaatcgcgccggcgagcctgtggcgaggaccaacagcgatggcggcggcggcggcagcaaggactcgggcagcttcgagtgcaacatctgcctggacctggcgcaggnaccccgtggtcaccctatgcggccacctcttctgctggccctgcctctacgagtggctccacgttcacgcgcactctcaggagtgccccgtctgcaagccgtcgtcgaggaggggaaactcgtccccctctacggccgtgngtggcagctccgccgtaccccgtgc

SEQ ID NO: 4053 - DNA, 822 bp, Zea mays
  unsure (1)..(822): unsure at all n locations
  Clone ID: TF_ZmC163039_1
gtgcatcggcgcgagccgggacgccggcgacgccatcacgtcgacgctttggaaaccgtcgccgtcccaccctcgctttccatctccatggctccaggtcctccacggttcgctcaccttcccctccaaacccaaccaagccaagccaagtctcgtccttcgcgatcccgcgccgtcctcgtatataaagtagccgcgctactaatccattcgaattcccaacaccggcacgagcgccaaaacatttattgccttcaagtggagaggcttagcggcgcgaacgtcgaggagctttagcctccagggtaggctcctgctgatcggccaagcgcaatctcgttcttccaagcagacgtacagagagagagggtcgcgggggcggttgagggctcgtcgtcgacccatggccgtgaccgcgacgacggtcgcggcggcgatcacgatgctggcggccgtggcggcggttttcctcaccgtgctgctctgcttctacatcgtcctgtgcgccaagcaataccggggcgaggcgccccgcgcgggcggcggcggcggcgccagggcgtggctgctgcgcgccgtgttcggcggcgggggtgcggacggcggcggcggcgccaccgagtggtgccacgagggcgggctcgacgacaaggccatggcgaggctgccccggcgggaggtgggcgcgggcgaggcgctggactgcgccgtgtgcatcgcggaggtggcggccggggaggcggcgcgcgtgctgccgcggtgcggtcaccccttccacgtcggctgcgtgnacgcgtggctccgctcccactccacctgccc

SEQ ID NO: 4054 - DNA, 1570 bp, Zea mays
  Clone ID: TF_ZmC33545_1
cattgggtacctcgaggccggccgggagcactctccgctccatttcgaactcctgatcggccgaccgttgcttccaaccagccccgcctcaggcccccaacggctaccaaatcgccatcgccactttagagagagggagcgagggagctaggatggcgtccagagatgcgggcgccagccccagatccgcgccgcatcgccctggagcggtggcgcccaaggacggcgccgacctgctcagcccgcggttccgttcagccgccgcgctggccgggtgggacgaggagtccgtccttctcgccgcgatggtcgtcgaggacactcccgtccgcgagtcccgtcgcaagaggcgggcctccacctcctccgccggcggcagcgccggatccagcaccaggaagatgaggccgcgtaggcagtctccggccaagatcccgccggtggttctcgcgctcgacgatgacgacgacgacgacgcggcagatggcaaatcgatagtgaatgctgccaccaaggaggaagagaaagttgtcgttgtgggcgacaaggaggcgtccggatctggcgacaaggcggcgtccggatctggcgacaaggcggtggccacgggaaacctgccgtgcatggatcgcctccgggaggagctctcttgcgctatttgcctggagatctgctttgagccgaccaccacgtcttgtgggcacagcttctgcatgaaatgcttaatacatgctgcatccaagtgtggaaaacggtgtccaaaatgcaggcaattcatcagcaactcaagatcgtgcaccatcaacacagtgctctggaacaccattcagctgttgtttcccggtgaagttgaggcaagaaagaattcgacctcaccatgcgataaggacgcgagccgcagcccactcagagctaataggctatcacaaggtggcaatggtatgagaactagaactaggagcaggagcagcagcaccgaagctagaacaagaagcagctacaggagcttcatggaacccggcagtacaacaagcaccaacactggtgcgaacttcatcagcgcacaagtcaacacaagaagcaggaggggcttcgtccaggcctcgcagctgctgttgcctaagaggagcgccagtaaggttggaccaatccgaagatgctgcgttggcttacaggttgcaacaggaggagttcatgaatgcctttgaggagcctgagcaggagaggcagcagccacggaacgccgtgtccacagcacgagacactctgagagccatcgcctcccgagccgtccgcctccgtgctcgaggctggcatgtttaatattattctttcgtcaactactttacacaaacctcttgtttgttattctactgtgtaattttttttaaagtaggctgacccaaatttggatggccatgatcataatcctttggcgcatggaacatttgctgttgtacacagtactgttcaacacatagccatttgtcccatttttttgtatttttgccctttttctagaaaaaaatctgacatttagactccaaaagaaaaaatcagatgaagtgca

SEQ ID NO: 4055 - DNA, 907 bp, Zea mays
  Clone ID: TF_ZmC285028_2
tagcgagcggccgtggtcgtttttttaggtggctgctcccacggctgtacaagtgagctcgtccggctcgagtgaggaagggagcgatgaggaggaggaggacgggaacaagggatccggtgacggtgcgaggagcccgggcggctctgccagcaagtataaggcggcggagagtgaagccgaggcggaggacccatgccttcccagctgccccatttgtatggtcgcgtggaccgctgatggttcgcatcgcgtgagttgcatcccttgtggacacgtctacggcagacattgcttagagatgtggttactgcagtacggcaagaaaaaggcaccgtgtcctcaatgtggcaagagatatacacagaacaacatcatcaacctctatgtaccagagattgttgttcccaataatgatcttgaaaagcaagtattgtccttgagagagagaaatgaatatcttgagaagcaacaagcaaaattacttgaggagataaaagagcataaggtaccacacaaatgaaatattgtctcagtaaccgaattgaccaatttctctgaggaaacatgggtgactccttctgatgtactctattacaaattaaattgagcaatactttctgtgcataaacccttacacgctcagtagagggtcatgttcagtcctttatgtttcctaatatcacctgcaaaggcagattatgttgcaacaaaatataatatatgaatcaaacaaaaagagacaggtaagcactagtatcacttgattttaacgattgatcgttgtaatagatgctttattgttaacatttttacaatcaactgtgaagagagtgacagagcagtcatcagatggaatactaggggcagagctaattgcctcgcatacaaaggacattgaccacaa

SEQ ID NO: 4056 - DNA, 652 bp, Zea mays
  Clone ID: TF_ZmC2252_2
ccctgccacggcgcggacacagagagtggaaaccggaagggaggaagagagatggattcctccacctcggcggcggcggcaggggaggcggccttgccgccggaggacgacgtctgctccgtctgccacgaccgcttccggatcccgtgccaggcgaactgctcccattggttctgtgaggttgcaagacctacccttcttcatccgaagactgttcagagaactaatggacccccagcggaccctcccactcgtgttcagggcgcggatgctgatgatggcatgctgggcctctttggattcgtcgatgacctgctcatcctgctgatcgtgttcctccacctcgccgcggtgtaccggtcgttgctcctgtaccgccacgggggccagtagaagtcgctgtgcataaaccgtttgttaagctggtttccatgtggagttctctgagatcgcagcagcggatttggaagatcgccgactcgccgagtagatggcaatgtcacggacggcttagcctgtccctgctctgtaccattctactacgcctgtttttctgagactctgacacggtgaactgaactttggttggttgatgcaagtgaatttcccttcgttttactcgtcaggaaaaaaaagggaaagagtttgcgtt

SEQ ID NO: 4057 - DNA, 588 bp, Zea mays
  unsure (1)..(588): unsure at all n locations
  Clone ID: TF_LIB4172-012-Q1-L1-A3
gacgcccgcggatccggtccggaattcccgggtcgacccacgcgtccgctcagccaggatccagccacaggacactcctcctgaagcagaagaggaggtcatcagagctgcaccagctagaggccgagagcaactcaacgaggacgagcctgccgctgggcaggacccatggaagctgttgaaggagcaagaagagcggaagaagtgtgttatctgccaggaccagagcaaaacggtgctgcttctgccctgccggcacctgtgcctgtgccaggcttgcactgagatcctcatgcgccaccctgtttaccatcgcaactgcccgctctgccgccgcagcatcctgcaaaccctcaatgtctacctctgaggactccctccctgcctgcccgtcctctgcgctccacacactgggacagcatgaacactttgcctctgggttctggcctgagtcttctttgcccccgaaggcggcgactctgccaagcctcaagccatatatccaggacgtgtanctcggaatactgcggaagactccagtctgggtgggacagacgaacgctttctctacgccctgcgcgncgccct

SEQ ID NO: 4058 - DNA, 580 bp, Zea mays
  Clone ID: TF_ZmC3359_2
agaaaggccaggggcatgagtgccctgtgtgcaaggtcggggttgcggtcggccagcgcgtcaagcggctaccgtgctcgcaccgctaccacgacggctgcatccccacgcgtccgcaggtgcgcaactcgtgcccgctctgccgcttcgagctgcccaccgacgacccggagtacgagtcctggaaagccggccggaccgacgccgcgtgaaccggccaaccaggcagtggctgcatgctcttatggtatggttttattgatagtgttgtatgtatgggttgggtttgaatcgggtgctttggttacaaggttgctactcagccgtatcaaaggcaaagtatagaggcactagatgcagagatggtttttgatcggtttcctttttctccttaaagagggactcatgaagtttttccaaatgaccgaggttggcatatacttgttagttgttactacgtattcctgctgtatttattctaaaaatccagagaggttagctggatatcttggtgcagggtagctgtatatcctgatgcaatgggacgatctacttgctagatattatgatgttacatttt

SEQ ID NO: 4059 - DNA, 2683 bp, Zea mays
  Clone ID: TF_ZmC2094_1
cggacgcgtgggcggacgcgtggggctgccgcccgcgcgcgggacgctcaaacagccggactcccaaccaaaaggcgcaagaaaactcgtccccgccgctcaaaaatctcccgcctcccgcggatgggatggcatccagtttcacagaccacacgcccacccgctccgccgctcgcgcccaaaaattttcgttcagccggctgcctgccccccaccaccacttccctcccgttccgaaaccccgattagccgccgacccgccgtctccccacgtatttgactggtgctagagccagcgcccagatcaaccttcctgagtccatcggcaccgcatctgcctcgcgatccgtctctctctctgtcccctcacggccgtagaccttttcgagggcgatatcggagggaggagagggggaggcgaaggcgggagtagtagaaactaggaagggccgttcgtgtcttgcggagaagatggagaacctgaggaggttcctgaacccgctggtgctcaacctgcagaagatggagctggagctcacctgccccgtctgcctgaagttgctcacctcgcccacaacgctgccgtgttaccacacatcctgcagcaagtgtgcccttacaccgacttcaaaaggctacagctgtgccatttgcaaatcaggctattgttctcaagatttaaggccagcttctcaccttgagtcgatagtgagcattcataggagcctcagctctaccgtcagcaccatgattgaacaacaggattctcaaattaacattcatgttgcaaaggcagcatctcatggaacaccagaatcaggaaacagaagtggggtggaggagaaatctgaccagatgaaatcttacaaccctgttgcttcaaagctagtatataaccaaccaactggacctgcatttgggaacattgatagtgttcaagcaaaagatcctgcatttgagaacaatgctggtgccgcagctgttgcaccaatggcttttgtacgaaagggtcattctgggtcacaatcttctgatggccctggagatttggactgtgacagcaatgacctcgaaggagaactgatgacaagcctatcacctcttcaaactgcattgaaacgagaggcaaatgcaatggatgatcataccagagaattgaagaagcaaaaatcaaatgatcaagttcaaagacaaacaaacatggccagtgcttggaaatgtgagttctgtcattcttcccaagttactgagtgtactggccctttgtcacattatttgaatggggagccagtagaagctgatcaagcttggaaatcaagtgttcagcatgtccatgagaaatgcattgaatgggctcctcaagcattctttactggtgacaccgcaaacaacttggggcctgagttggcccgtgcttctaagatcaaatgcagtgtttgtggcttaaaaggcgcagcacttggctgccttgtgaagagctgccgcaaaagttttcatgtcccatgtgcctacaacgtcaaaggctgcaaatgggatcaagagaactttgttatgctgtgtcctacacattcgtcaaaaaagttgccttgtgagagattaaagccaaaaaagaaggccaagctgcagcaaccatcttctgacattgatggtccgatttcaccctctccgatgcaaagggctgaactttggactgcctcaccttttctgactagtgaatgggtgatatgtggatctgcgctcattggccatgagaaggaaatcttggatcagtttgagtgtcacactggcatcacagtaaccaacacctggagttcagatgtgactcatgtgattgctaatacggatgaacgtggggcatgtgcacggacactcaaggtcctcatggctattttagctgggaagtgggttctcaatgtgaattggctgaaagcctgtatggaggctagggaaccagtcccagaagagccctacgagataaggtgtgatgttcatggctctgtcgacggccctcgctcaggaaggctccgagcgatgcagcaggcaccaggtctgtttgctgggttgaccttctacttcagtggccatttcatgccgggatacagggccaacctcgaagatttgatcgccgcagcaggggggtccgttctggagaaggccgagctctctagcacgtccttgatcctctacagcatggaggcgccgccgccccacaacaacctagacgccctcgagaccatcaacaagagattagccgaggcccaggaactggcgaccacggctggctgcaaagccattcctcatacatggcttctggactgtatcgcgtcgtgcgcggttgagttgaacgtgtcgtgttctactgcctaggttcaaacataggaatgtgacatctgctgctgtttttttttgaaaaaggagattaagagacgattggcttgttgtcttgatccaaagtatctttagacgttgtagcatgaaagcggaatttagtcggaataagcctgtgtatcttagtcaacgttactgtcggtgatgtcatccacatgtttcacctactgacaggtgcagtttgtctgatttttttcttcttgatttgtatctaaaaaaacataaaaggatgcactcaggtcaggtttactccatttttcttgaattgacgttggaaaaaaaaaagagatttacc

SEQ ID NO: 4060 - DNA, 737 bp, Zea mays
  Clone ID: TF_LIB5117-040-A1-PF1-A1
gataaccccttcttcctcgtcgttgccctaggcttcttatcctctccagccatggcgaacgccggcgatcccgcctccctccccccctccgcctctcccttctcatccacccgcgcgctcgagtcggtccccttctcctctgggaacccccgcatcgaggagacccgcggcgtcgtcctcctccaccccgacccacccaccgctgccgcggccgcctcctcctcgtcatctcatcttccggcagagaggaagccgcaggtgttcgtacctgcggtgcccaaccacatgacctacgcggacttctgccgcttctgcggctccttcgtcccccacatgctcgagatgcgcatcgtcaggattgatggagcggaggaccagtatagcgttctcataaagtttggcactctgagctccaccgatagcttctacaagcacttcaatggaaagcagttctcatcactggagggtgatgtttctcgtatacgttttgtggaagacgtgcactacactcaattgatcgagcatgcccatagctcgattacgagctcagctgagcagcctacttgcccagtgtgtctagagcgacttgaccaagatcctggaggcattcttactacaatatgcaaccattctttccactgttcatgcatatcaaaatggacagactcttcctggccagtttgtaggtattggtcagcagcaacctgagaaatcaatgggttccgtttggggaactt

SEQ ID NO: 4061 - DNA, 378 bp, Zea mays
  Clone ID: TF_LIB3060-112-Q6-K6-F6
cctctcctctcactttctgaattccccgttgctctcccgtcttccctcctcccctccccaaacccccaccccaacgcccagatctaccctccccatttacagctttctctccggccctgcgccccagggcaccgcgccgcccgaaaccgtcggcgccggcgcgatgcgcgtgcgcggcggctcgttatgcaacgtcagatatgacgaggaggagcggacgccgctgctcctccactgcggccatggattctgccgcgcgtgcctctcccgcatgctagcggcagcccccggagccacgctgccgtgcccgcgatgtcgccatccgaccggcggaggggggtcagtctctgcgctgcggttgtacttccccattctatc

SEQ ID NO: 4062 - DNA, 615 bp, Zea mays
  Clone ID: TF_21210563
gcacgagagacggccgaggtggatccagcaacagcaacgacgatggcttgctggaagagtatgatgtcctgggggctgggctgagcctactgcttcagcatctggccgagaacgacccgaaccggtacggcacccctccggcgaagagagaggcggtcgaagctctgcccactgtccagatagcggaggccgtcagctgttcggtctgcctcgacgatcttgagctggggtccccggcgaacaaatgccctgtgggcataggttccactcttcttgcatcctgccatggcttgagctccacagctcttgccccgtgtgccggttcgagctgccgtctgaagagacgaaagatctgaacgagcctagcgatgtgcacagaagaacagaaagcgcccgagaggaagtcagggccgatgaccctgagaacgacagcgagagcggtaacagcgcgtggccccttgtcccttggttcttcagcgggctgttctcggtacctgaaccgcacactgacagaggcactctcaccaccgatcaacagagcccttccaccaacccaaatgctggaggaaattgatttcgtcatcctttgtgaataatgctcatacatctgagaat

SEQ ID NO: 4063 - DNA, 533 bp, Zea mays
  Clone ID: TF_LIB3900-009-Q1-N6-C9
acagaaacaggaactgctccgacagcaatcttattccattgccattacatgttggaaccggggtgcaagaaacgaagtgagattgccagatgcgcacggtcgtttctcttcactccacgtctatctacgtacacagacacaggtcgcctatatatcttttacacgcgttgcctgcagacggggcacgagccatggccgacgagccatctgtccacgcaaggctggtggaaggcgtgagagcagccgggcagcctcctcgctgtctcaccggccacaatgtcctgcggcaagacgaaggacgctagccattaggtcggccgtcggcgttgataataataataagaagaagaagaagaaaaaaggtgccagccaaggccagacgctgcatttagtagcaaacaaatttcggtatgaaatctctgattgcactccaaccatgcattcattgtctcgttgtccaaccattgcgtgcgcctggacttgcattcatggtctcatctactatctcgctcggaaaccatttttgaagaaac

SEQ ID NO: 4064 - DNA, 608 bp, Zea mays
  unsure (1)..(608): unsure at all n locations
  Clone ID: TF_LIB3592-049-Q1-K6-H11
gnagnagaagtggaggctagtacacaaaaggaggatccaatcagatcacagcagcgtttgcttgtccaaatgcagattttgatctcagtgctccaaatcaatgatcctactgctgcttttagcgcgcaaaaagccgatctttttttttactcgtgctcttttcttcctttctttggggagcactccatcttgttttgtttgttcatcattctcctgtctttgcagaatggcgtccgtgctgatgagttggtttggtttctctctcttttccgtacgtgcagccccggtgcggtgtgtgttcgcgtggcgtcaagagtggcggcagctcggcggtgttcacggccgagtgctcccacgccttccacttcccctgcatcgccgcccacgcgcgctcctcctccgccaacggcgtcctgtcctgccccgtctgcgcctcgccgtggcgccaggcgcccttcctcgcctccctccgcctccactgctccttccacgacgacaagcaccgaggaggcggagacggccgcaagacgtcgccgctcgccaagctgtacgacgacgacgagccgctgctggcgcccaaggccacggccaacggcggcggcttcaac

SEQ ID NO: 4065 - DNA, 1084 bp, Zea mays
  Clone ID: TF_ZmC73469_1
cccacgcgtccgcccacgcgtccgggttgcgtcgactcgccgcctgcactgcgcagccaccacccatgactacaacgtgttcagcttccacccggacaactcgccgtgccacggcttcgaggaggtcctcgcctgctaccgcaagatcgtgccgcacctcaagctttccgggccgacgtcgttcgcgcccatcgtggaggcggccgtcgacatcgtggaccggagcggggggcagtaccacgtgctcgtcgtggtcgcggacgggcaggtgaccaggagcgtcgacaccggtgacggcgacctcagcccgcaggagaagagaacggtggactccattgtcatggcaagctcctacccgctgtccatcgttctggttggggtcggggacggcccctgggacgacatgcgcagattcgacgacaagctccccgcgcgcgacttcgacaacttccagttcgtcaacttcaccgccatcatggcccgcgccgcgacggcacagcagaaggagtcggcgttcgcgctcgccgcgctcatggaggtccccatccagtacaaggccaccatggagctcggcatcctgggacggtccacggggaacgccaagcgagtcgcccccgcgccgccgccactgccgcacgcgcagcggcaggcgtcgtcgctgaggaggggcgccagcaacgtcggcggcgccgccgcggcgccgagagatgaccaggtgtgcccgatctgcctgaccaatgccaaggatctggcgttcggctgtgggcatatgtgctgcagggagtgcggggaaagcctcaccagatgcccgatatgccggcagccgatacggtcgaagctgaggctatattcaggatgaagtggctatgctacaacagaggccacgaagaggaaaaaggatatatagcttactcgccgttaaaatgtacatgtgaatctgtcaaaacgtgtaagaaggaaccaccggtcgaggtcagtcctgttcgtctccaaatttggatgaaccgatgttccattttgtcacttctaaaggatgccaagctttacagtacgacggtgcgatgacgtacgtgcatcagctcct

SEQ ID NO: 4066 - DNA, 828 bp, Zea mays
  unsure (1)..(828): unsure at all n locations
  Clone ID: TF_LIB4969-018-Q1-XP1-A1
ctgtgcggcgctcaggcggcgggtgcgccgtctaacctcatcataatcacagattcacagggcgctagggaggagagagggctagggtttcgtgctccctcacgcaacgaatccgagccggatcggggggtgcgcggagtcaccggcggcccggcgttgcctgggctgtgatacagttgcaatggcatctgtaactgatgagacagctaagattgagggtttgacatctgctgcagcctttgtggagggtggcattcaggacgcatgtgatgatgcatgcagcatttgccttgaggctttctgtgagagtgacccttctgcattgactggctgcaaacatgagttccatctccaatgcattcttgaatggtatgtttctagctctaatatatccatcctacatgttacaatttttacaattttttatattattcccacctttcgcatgaacagtacctagttccatcagcaattcatctgggtgcatgagttatggttatcactaagcacacattttagaacatcgaataccttaggtatttgtgttgtttagttaaccatatctgtcaccttagactgtaacatctgattgtgactggaaaggcttcagtatgggttttgcacatgaaaattttgtccctgaattgatgtttgacttctctatcgtgtgcagctttctggacatgggatggtatattattgaactgtactgtcttggtactgagtactgacaaaatttagtgataacatcatatgctncaacagcattttccttgctggcgttatgaacagttgtagtcaaaatgcttggacttttattatcatatc

SEQ ID NO: 4067 - DNA, 637 bp, Zea mays
  Clone ID: TF_ZmC1202668_1
tttttttttttttttttttttttccgggttctttctgagttcaataattatcggttgtgtgaagtaatcttatcttatatacatcctatatacatgtggaatacatctgctacaccggaggctgtgggtcgttcgaaggcacttccttcgtaggcggaaccgtggccctacacagaggacacgtggagtgagagtgcagccacatgtcgatgcagcagacatggaacaggtgagtgcacgccggcagccgcctgacaacctctgccttcctgcacaaggctcaggcacaccgcacactgcgcccacccgcgcccgctgccgctgccgctgccctcgccacggccggagccgccgccaaccggcaggcccctacggaacacgaacgacggcagcgtggacaccgcggaggggctcagcccaccgtcgccgtcgtcggtggtgctcggcaggaagaacggccgggccgccacgtacacgacggttccccccgggccacggcggcggcggcggcagcacaggcattcgcagaggacgatgatgaggacggagacggcggtggcgcagaagccgatggcgaggagcacaagcgtgtcgtgcgtgctgtatccgcccttgtccgtggagtatggcatcgagt

SEQ ID NO: 4068 - DNA, 1541 bp, Zea mays
  Clone ID: TF_ZmC25188_1
gcgcgggccgcccagacccgcggtcctccccttaacgcacctcatcgagtaggggtcctatcatcgagtcatcgttcagagacagaggctggtcgatcgtcggtgactgatggcgatggcggcggcgcaattggaggcggaggaggagctgcggctggaactggaggcggtggcggcggtgtacggagacgacgtccgcgtgctccgcgacctcccaccgcacctcttcgtccacgtgcggccccgcaccgccgacgacacctcgcagcagttcgtggagctctttcttggcattaaagcatcttcacagtatccgaaggaaccaccacatatttatgctgtggaaagtaagggccttgatgagaaccgacagatatatcttatcaccagcatccagaacaaggcaaacgaactttcaaactgtccaatgcttgtgacgttatgtgaggaagctggagagatcctctcgaacatgaatcatccagcaggggattgtccattgtgtctatatcctttaatgggagaggataaggttggctcggagttgccatttatgaagttgatgtcatgctaccattgcttccacagtgactgcattatgagatggtgggaatggctccaacatggtgacacaaacccaaaggagcccaatactggagacaagcattataatgtgaatcagccaagaggattttgtcctgtttgccgcaaagtgttcgatgagaaggatattgagcatgttcgtgatttgttgggtgacaatacttccaggctggcatcactaacagttgaccttggtgaagatgaaaaggaattgctccattccgaggctgagcaaaacaggagaaaaagaatcgagtcacttgttaatctgcagcaagaactaaacggcctgattgaaccaaagaaagaccttgccatacaaccaggaatgtacgtttccgttcctcccagcacgccagacacagctgaagaagagaatgctgatcccagccaaggcacggctacttcgacctcagaaactgagcaacgtggccaggcaagcaacgccagcagcaacaagccgaagaatccaggccatcgaaggagaaacagagctaatgcatcaagacgacagcctcatggccagggccagccagctaggcagcagtggcagaggaaagaagcaggcacttcacaccaataaaagaacatcgaagcaacgaggaggatgtgacctgtgagttgtttttgtcggctatgtacatcaatgtcgtgccttgctttcgtctcataataattgcgagccatggtatgacaatgttttggcgtatgacaatgttttggcgctgctatggaagttccatgcaagtgatactctggaaagaaccctgcaccggattctatgggagtagtaagtatcaagcacatgcatgcttggctagtacatacaatatctgatttttttttttgtgtgtcattgccaggtactatgttcaaactgattgtccgtagtcagaaaagcaactgattacactgtttgttaaaaaaaaaaaaaaaaa

SEQ ID NO: 4069 - DNA, 2128 bp, Zea mays
  Clone ID: TF_ZmC1254_3
gtaccctccgagtctgccgggatccttgctcctcctttccttctcttccttattccattctcctcctcaactccatcgcattgctattccagtcctcacagagaagaatcccgcgagcgagcgagcgagcgcgcgaggcggcaaggacgaacccaagacgtacgatggcgaggaggctggcgtacacgacggcgctgaccacgctcttcagctacgggctgctcttcgccttcggccagctcagggatctcttccgccacctgctcggctgcttcagacccaacaaggacgacgacgtcaagcaggggtacgcgccgatctgcgtcggcctggaggatttcttcgtgcgacgcctctacctgcgggttcaggattgcttcggcaggccaatcgctagcgcaccggactcatggttcgatgtggtggagcgtacctcagacgacaacaacaagacattgcagcgcacctcaaagaccactagatgcctgaacctgacgtcctacaactacctcgggttcgccgcggccgatgagtactgcgtcccacgcgttgtcgactccctcaagaaatactcggcgagcacctgcagtgctcgagttgatggcggcacgaccaagcttcacaccgagctggaggagctggttgcgcgttttgtcgggaagcctgctgctgtcgtcttcggcatgggttacgttacaaactctgccaccattccctgcctaatcggaaagggtgggctgattatcagtgactcactgaatcacaactcgatcgtcaatggcgcaagaggatccgatgcgactgtcagggttttccagcataactgccctgctcatttggaagaggtcctgagagagcagatagctggtggtcaaccactacaacacatgtgaccttctatgacatttagattacgtcaccaacaatggggctggacgagaatcaaactacgaagagaggctaggcaggcatgacagatgtttgaggaggctgaagatgctattcacagggatgactctagtgatgatgatgaaataggagacgggcaactatgtgttgtgtgcttaaggaagagaaggagagcagcttttattccatgtgggcatcttgtctgctgttccgaatgcgcattaacaatagagcgtacacctcatccattgtgcccactgtgtggtcaagacatcagatacatgatgagggtttatgactcttaagtatgacaaaatggagatgtgaagcgtggacaatcagttggcactgcagccattggtggtccattcaagcctctgaatcatgatggaaaattagaaactaatttgatggtacaaaatggcattctagagaaggcaaatttgaccacgaccttgatgttgtaaatgatggtgacaaacagttgtttgatgggagtaaaggatgcagagatgacagtgcatagcagccaggatgttgcagcggtagtgaagagcagacacagcagaccacgatgaggcctgctactcagagccaggatgaccgtgaggcctgctactcagatgacagacacagatggcagacacagcagatcacgatgaggagatgttggtcccgcatcaggatgacattaaggctgcagccgatgaaacaccttgccgcggtgatagcgccagaacagccgtcgacggcttcaagctcctgcgtgtgtttatttgggcaacagaactagacgtggatcacaagcagccgcattgtttatttgggcaacagaactagacggcattgggccatgttgcctgggttcccaggttcgacggcttcaagctcctgcgggctacctgacgtttgggcaacagctagccgcattgtttatggacctggacgtccatgcacctggacacgtcttgccattgggccatgttgggtcgcttctaaaggcagtaaaatcattcaccaaggagtcgacgacacagctagctgatttgtctgctctgacgtgtatgtaagcaaatgttgtatcaggtcatgtttgtaaggtgtgggaaatgaagtctaggcttatgtagtgccacaagtgttacaacaaaaaacgtagcatgcgctcctctgattcgtcgacattatattatatattatatttattcatcgtcgttat

SEQ ID NO: 4070 - DNA, 2766 bp, Zea mays
  Clone ID: TF_ZmC2195_2
gggacgctcgcctccggcccggccggggtttccgctcgcaggcaggcacagcgccaagcggcgaccgagagtccgagacccattcccatccacgcgaccacgctgccgttctctccccttcctccccgtcgcttccattcccgtccctcacaatctcacccccgccagccgagccccaaccctaacgaaatttacacctgcttcgttggcgtgagcggtcttaggcgtcgggcgtcgctgctgtccagcggtgtcggatccgggtcccgcgccgttaggtcgaggtttcttcggcgacggtgcagccgctggatgttagtctggcagatcggggccgagctaggcagtgttgggttgtaacatttgtatcgcatgaatgaactcagagcatctcaatgttaaaactgttaaggggcagacctggtgccagaggctcccacatgagtgggttctagggaagggataatccgaagcaagccttccccctgcaaatgcagagatgcggctttgaacccgtgacctggtgactcagtgagacacctctcaccactgcaacaggcctgtccttcctcatcgttaaaactgagcatattaattcttcttcttaagcaatatgggagctaattgctgcattgctgcaaaggagaggacacagccgtgcatcactcctatagaagtatcggcatataggaatgtgaggcgctcgccatcatggaacattcgatgggacaatcgcacacatatagaagacataatggacattcctactctgttctccaatcatagtagtggaagcattcatcctcatacaaagagtggttccgttgctccaactgaagggttctctaatgggaatagccttggaactagcccttccaatgtgttccatggagcaaagtggcacaaatctgataaaaaaatggaagcacgcaaggttacaaagtctgattctcgagctaaccgctccacagcaagtaactcttctcctgagacaaagctttccaggaaatcactgcattggtcacctcgaggccggccgggaaggacttcattcgtcttccatgctatcagtctgcagcaatgacttgtcagcagcaggatcctatgctgagtcatctgatggttggtcaatgcgcacattttctgaaatggtcgcaacatcccaaagagagaggtggtcacttgatagcgaactcttgggatccatttctagtaaagtgacaagaactagtgcttcaaattctactacacttccccctgagcaagaggtgtgcaagctgtgcttgaagctgttgaaggagagatcaacatggaatgctcaggagctggccgttgttgctgttctgttgtgtggacatgtgtaccatgctgactgtctggacagcataactacagaagctgacaaatacgatccgccatgccctgtatgcacgcatggtgagaaatgtacagtgaagctatttgggaagctggaatccaaggttaagaacaagataccaaaaaatgtggcagctgatatcaatccagatgggaacagtaataagcaccagaagaaaggtagaagagagcccaggttaggtacaagctcaagcatgaaggtcccattcagtcgcccgtttttgaggagacatttctccattgggtctcgaccgcctcggtcagtctcagaaaccgattcgacgagaaagaagggattctgggcaagacattggagggagtagaatagcctccaattgccattaggtgggctggtttccattagtgtgttttggaagggtcttcgagaggaggtgaactccccagcatgcaagctcacggagttcagactggcacaagggctgccgtcctggcgggcaaccaacatatttggaagtttctcccagccataatattcggatactggtgcagagcgcacgctagcgccggtcccagcagatccattatagtagaataacaaggttttttataccatgcgagatacggttgttgtaggccctggttgcagcttagtaatagtagcaatctaacagaaacggtgtggccttcatggatgtaaggcccaatgctgggttacacaaccagcttgctagattatttattgtactcgatgttttttaatgatgattgactaaggtacttcgtattgttggatggaatgcgtttaatccgaagtcttcagtggtagccgagcaaccaacaaatttggaagtttttctcaaccatcgtattctgaaacatggtgcagagcgcacaacaaggtttcttataccatgcgaggcagggtcgttgtaggccccgcttgcatctaagtaatagtagaatcgatctaacagaaacggtgtggccttcctggatttaaggcccaatgatgggttataagattacacaaccagcatgctagattatttactggacccgcagtttttttaattattggctaaggaatttgttggtggttgatggaatgcgtttaatttaaaggctttagtggacctgaagaacttttcacccagattggctgcacttttcatccttgcgttcacatatactaaatctagacgcacgaaaaatctctctagttgatcacatatgacaagacgggtctcgggcacggctcccccaccgaggacggtatcatccactggtccctcagggaggctagaattcgggccaatgctcgcgaagagggtcgattcggaccatatggtcgcgaagtgctgctctattcagcatatctgaaaacaaagctcatcagtgacagcaaca

SEQ ID NO: 4071 - DNA, 529 bp, Zea mays
  Clone ID: TF_LIB3637-254-Q6-N6-D1
agttctgaaatagcgaagtcatgttcctcgccctccataacaactgaaattcagacatcagaacattatcatgagtaatacaggatcatttgcgtgatccctctctacaatctacatacacacaaaagggtgctttctaagctatactgctaccagcctccactcgcacacaacaccataaacctctctgagcgacacaacacaaaatattcaggatattagaaattacatgtcgccataggagcaccggattaactggcatgcccacaacagcgaattttacaacagtgaaactccatggtggttataagcttattctgaactaagggtttgtcgtcaggatcgtgaccgtatgttcgttcgacagtatgggcagtctgcacatttccgcgcccatggctccaagcatgtcgagtggaacctgtacccacagcgcaaccttatcagctcatctccatcgtaaaatccatcaaggcaaatagaacattcaggcgatgcctctctgctatcatctttgctagcctcaaaa

SEQ ID NO: 4072 - DNA, 743 bp, Zea mays
  Clone ID: TF_ZmC6487_3
ccaccccgcagcccgcctccgactcgcacctgcccctatgtcgcggcacgcgcctcctggtgctcgccgttccgacgcgcgtttcgccggaggactttgttcgcttctgcggcccccacctcgagtgtgcagccgacattcgtttcatcagggatgatggagtggaggaccggtacagcgttctagtggagtttgaggaccagagtagcgctgaatggttctacgccgatctcaatggctggaggttctcaacctctgagagtgaggtgtgccatgttctgtttatagctgctgtgcagtatacaccttcctcagaggttgccacaactccaccggctggatccactgaacttccaatgtgtcctgtttgcattgaaagattggatcaggacatcagtgggattttggcaactacttgtgatcactctttccgttgctcatgtgtttcagtgtggaccaattcatcctgtccggtatgccagttttgtcagaagcagtctgaaaattctacatgttctgtttgccaaaccactggaaacctctggatatgtgtgatatgtggttttgttggatgcggacggtatcaagaaggacatgcgaaacagcactggaaagatactcagcattgctattcgctagatttggaaacacaacgtgtttgggactttgttggtgacaggtttgtacatcggctgaatcaatccaagagtgacgcaaagcatgctaagttcaaatcaaaaagt

SEQ ID NO: 4073 - DNA, 2478 bp, Zea mays
  Clone ID: TF_ZmC2195_4
tattcggcacgaggaacgaagatgtcttataatttggaacctagggaatagattcctaaaggctacaagattatcatgtgcatttctattcgacaaataataataattccaatcatactggttcttttgatgatcttgttgtggatgccccttagcttcctctttgggggtgttttcttctgtctatgtggtacccctagctccctctgtaggcttagagtgcacatgtctatactacatactatcgtgtttaactttatactaagtttttgctcatttctttattgaagacgaccttattattgttattgtatccctgtacagctaggcagtgttgggttgtaaaatttgtatcgcgtgaatgaactcagagcatctcaatgttaaaactgtaaaaggggcagacctggtgccagaggctcccacatgagtgggttctagggaagggataatccgaagcaagcctcccccctgcaaatgcagagatgtggctttgaacccgtgacctggtgactcagtgagacacctctcaccactgcaacgggcgtgtccttcctcagcgttaaaactgagcatattaattcccctgcttaagcaatatgggagctaattgctgcgttgctgcaaaggagaggacacagccgtgcatcactcctatagaagtatcgacatacaggaatgtgaggcgctcgccatcatggaacattcgatgggacaatcgcacacatatagaagacataatggatattcctactctgttctccaaccatagtagtggaagcattcatcctgatacaaagagtggttccattgctccaactgaagggttctctaatggaaatagccttggaactagcccttccaatgtgttccatggagcaaagtggcacaaatctgataaaaaaatggaagcacgcaaggttacaaagtctgattctcgagctgatcgctccacagcaagtaactcttctcctgagacaaagctttccaggaaatcactggacatatcaagtgttgcttcagatttgaagacttcagtgtctgttccttcaacgccacccttagtatccagagcagatccgtcatcctccaaggggcattctcaacctacagattcagatttgatgaagaaagcatggcggtcaccagggtatcaattatacagacaggtttcggacagtaaaattccatctctcagatctctcaatgagataaggtctcctgaaggaaggcctccctcttccatgttatcagcctgcagcaacgacttgtcagcagcaggatcctatggtgagtcatccgatggttggtcaatgcgcacattttctgaaatggtctcaacatcccaaagagagaggtggtcacttgacagtgagctcttgggatccatttctagtaaaatgacaagatcaagtgcttcgagttctactacacgcccccctgaccaagacgtgtgcaagctgtgtttaaagctgctaaaggagagatcgacatggaacgcgcaggagctggctgttgttgctgttttgttgtgtggacatgcataccatgctgactgtctggacagcataactacagaagctgacaaatatgatcctccatgccctgtgtgcacgcacggtgagaaattttcagtgaagctatttgggaagctggaatcaaagatcaagaacaagataccaaaaaatgtgtcagttgatattaatctagatgggaatagtagtaataagcaccagaagaaaggtagaagagagcccaggttaggtacaagttcaagcatgaaggtcccatttagtcgtccatttttgaggagacatttctccattggatctcgaccacctcggtcggtctcagaaactgattccacaagaaagaagggattctgggcaagacactgggagagagtagaatagaatccaattgtcgttaggtgggttggtctcaattattatgttttggtaagttcaatttcatatagcagattactagtcctattccttttgtcatcatggaacagtttaaagcaggttactaaaattcaaactagtgtcgaatttggaatgtcatgtcatctctgaacagtttaaagccgacaatagcatgattaattgaatttgtgttctttccacaggaaggatctttaagaagaggtgaactcctcagcatgcaagctagtggaggtgaactccccagtatacaagggctgccgagcaaccaacatatttggaagtttctctcagccatcgtattctgatactggtgcagagcgcacaacaaggtttcttataccatgcgaggcagggtcgttgtaggccccgcttgcatctaagtaatagtagtatcgatctaacagaaacggtgtggccttcctggatttaaggcccaatgctgggttataagattacacaaccagcatgctagattatttactgtacccgcagtttttttaattattggctaaggtatttgttggtggtt

SEQ ID NO: 4074 - DNA, 2418 bp, Zea mays
  Clone ID: TF_ZmC2195_5
ttggccctcgccggccggggcccttctctccccttcctctctcctctgcgtcgcttccacctctcaatctcaccccacgcctgccccgagctccaaccctaaaggaacacacccctgcttgcggcggcggggagcggtcttgggcgtccgccgttgctgtggcccagccgtgacagatccgggccccgcgccgttaggtcggtgtttcttcggcgacggtgcagccgctggatgttagtctggcggatcggggctcgttgttcgcgtgattcgaggcggtgttgagttgtgacatttgtatcacatgaatgaactcagagcatctcattgttaaaactgtgagcatatcaattcccctcctttaagcaatatgggagctaattgctgcattgctgcaaaggagaggacacaaccatgcattactccattagaagtatcagcgtacaggaatgtgagacattcaccatcatggagctttcggtgggacaatcgcacacatatagaagacataatggaaatccctactctgttttccaaccatagtagtggaagcattcggcctgatacaaagagtggttccattgccagccgtgcatcactcctatagaagtatcggcatataggaatgtgaggcgctcgccatcatggaacattcgatgggacaatcgcacacatatagaagacataatggacattcctactctgttctccaatcatagtagtggaagcattcatcctcatacaaagagtggttccgttgctccaactgaagggttctctaatgggaatagccttggaactagcccttccaatgtgttccatggagcaaagtggcacaaatctgataaaaaaatggaagcacgcaaggttacaaagtctgattctcgagctaaccgctccacagcaagtaactcttctcctgagacaaagctttccaggaaatcactggacatatcaagtgttgcttcagatttgaagacttcagtgtctgttccttcaacgccacccttagtatccagagcagatccatcatcctccaaggggcattctcaacctacagattcagattcgatgaagaaagcatggcggtcaccagggtatcaattatacagacaggtttcggacagtaaaattccatctctcagatctcttaatgagataaggtctcctgaaggaaggcctccctcttccatgttatcagcctgcagcaatgacttgtcagcagcaggatcctatggtgagtcatccgatggttggtcaatgcgcacattttctgaaatggtctcaacatcccaaagagagaggtggtcacttgacagtgagctcgcgggatccatttctagtaaaatgacaagatcaagtgcttggagttctactacatgcccccctgaccaagacgggtgcaagctgtgtttaaagctgctaaaggagagatcgacatggaacgctcaggagctggctgttgttgctgttttgttgtgtggacatgcataccatgctgactgtctggacagcataactacagaagctgacaaatatgatcctccatgccctgtgtgcacgcatggtgagaaatgtacagtgaagctatttgggaagctggaatcaaagatcaagaacaagataccaaaaaatgtggcagttgatattaatctagatgggaatagtagtaataagcaccagaagaaaggtagaagagagcccaggttaggtacaagttcaagcatgaaggtgccatttagtcgtccatttttgaggagacatttctccattggatctcgaccacctcggtcggtctcagaaactgattccacgagaaagaagggattctgggcaaggcactgggagagagtagaatagaatccaattgtcgttaggtgggttggtctcaattattatgttttggaaggatctttaagaagagttgaactccccagcatacaagggctgccgagcaaccaacatatttggaagtttctctcagccatcgtattctgatactggtgcagagcgcacaacaaggtttcttataccatgcgaggcagggtcgttgtaggccccgcttgcatctaagtaatagtagtatcgatctaacagaaacggtgtggccttcctggatttaaggcacaatgctgggttataagattacacaaccagcatgctagattattcgccttcctggatttaaggcccaatgctgggttataagattacacaaccagcatgctagattatttactgtacctgcagtttttttaatgattggctaaggtatttgttgttgattgatggaatgcgtttaagttgaaggcttcagtggtactgtagaacttttcgatcagattggctgaactgatcatccttccgttcacatatactaaatatagacacatttacagggtgtttggtttgaggagt

SEQ ID NO: 4075 - DNA, 470 bp, Zea mays
  Clone ID: TF_LIB3059-040-Q1-K1-D9
ggaattcccgggtcgacgcacgcgtccgcccacgcgtccgggatcaattagtgttggacatatgtgtcatatgccttgagcaagaggacaatgctgtttttgtgccgtgtggtcacatgtgttgctgtatggcatgctcttcacatttgacgaactgcccactttgccggagaagaattgaccaagctgtcagaaccttccgccattgatggtgatatatgatgcaaaaaactggcatggtaccaccacatgtactgcttctgaaaccaatttgttcttggaacttggaagtgctggctgctatcaaccaacgacatgaactgcaatactgggacgaagcagcttcaatgagtttgctttttgaacagaacagtgagtgatgcaagttgcaagctcataattggcagttgagatactctcactccctagatagtgccaatgggtgctcttgcctgtaatgtactacaact

SEQ ID NO: 4076 - DNA, 1166 bp, Zea mays
  Clone ID: TF_ZmC71625_2
aaaaaaaaaaaacaaaaaaaaaaaaaaaaaaaaaaaaaaaaaaaaaactcgtcatgcgcatggccgccgaccgccaagccgagctccaccgcctctcgcagcaccgcgccgtctctgactttccgcatcgcaacagaatccatgcgctgctccggggtcggtttctgcgcaacagcggtttaccagaggagaggaggcccccatctgtggccgcaagggagcttggccagctgcggcaaaggcatcctgtctctgtttgaggaatgggaggctatcaatgatttaagagctgatatggctagacttcagcaaggcatgagccatatgcaaaggatgttggaagcttgcatggatatgcagctagagttgcagcgttctgtaaggcaagaagtatcagcagccttgaatcgtttcattggggagcaaggtggtgaaagtaaagaaataatcgatgatggatcgaaatggataaatgtgagaaaagggacctgctgcatatgctgtgagactccgattgactcccttctgtacagatgtgggcacatgtgcacttgctcgaaatgcgcaaacgaattggttcgaggtggagggaaatgcccgttgtgccgcgcacccataatcgaggtcatccgagcatacttcatcatgtagatacaaaaggaagacagcaagaagatagaagaggcccaaattgtttttggtctgtgtggagtcgttagcgggttgtgtattcaattttgttcattctctctaatgcgtttggttaagtttttttccggcttcatttcgttttggtctgcttgccctattgtaagtaatgtacggttttgggtgtggcggcaggacgggaaggtggtcttctctcattaggacttgggtcactgctaattatgttccacaacgactaatggggttggaggttgtcgaaacacgagatgaggaaacttttggtatctttttgttcgtgtagcaccagcaaagtgcggcttggtcgcttcagtgtttcgtgtgattttgttgttggtcttggctatgtggtcatgatattttaggcttctagtttgcagatggatgtaaaagtggtactttgttgtcatgggcgatgctatttcctggatgtttgctttttctttccgccatagtacaccagatcactctcccgccta

SEQ ID NO: 4077 - DNA, 1056 bp, Zea mays
  Clone ID: TF_ZmC93126_1
gttttgaatggaattacttagcgtgtcaagtcttcttagtaatggctttggtgaaagtttggagcgattggagcgattaataaggtcatatcgtgaacagcgtggccatggtcccctcaactggaatcttgatccccccatgcacccttcaaatggaccaaatgcaaatcaggaacaagatgggaaacctgaatctcagcaatcgcaggctcctgtcaatcttgttatccctcctccacctttgccaccgcgtccaccattatggcacagtgagctgcgtcataacaactggagcagcagacacagggaatgggatgctattaatgatttaagagctgacatgggtagacttcagcaagggatgagcagcatgcagaggatgctggaagcgtgcatggacatgcagctggaattgcagcgttctgtgagacaagaagtgtcagctgccttgaatcgatttgcaggacctgaaggattctcgatggatctgtctgacgatggatcaaaatgcaatcaagtgaggaaaggaacctgctgcatatgctgcgatacgcaaatcgattctctactgtacaggtgtggacacatgtgtacttgctcgaaatgtgcaaatgagctggtgcgcagcggtggcaagtgcccgctctgccgggctcccatcgtggaggtggtccgcgcatactcagtattgtaaggtggtggaagatacagtcagtaggaaagggaataagttgacggcaagcgaagttttgctgcaagtgaagaaaagcttgtttaggaaatggaccccctcccaatcccccaaaaaagaactctgtttttcctcctttgtgaatctataggggaggctacttacgttgcctgcatattcgttgccttgctgctcgtgtcgccgagacgcaggcggcaaagggcgtgccattaatttttggaagagcttgcgttgggaagtggtgtccccagtgcaagctgtttcactgtatatttatacactgactgatcctcaactgaagcagacaccagcaatgcattggtatataccaggttccttgagcc

SEQ ID NO: 4078 - DNA, 523 bp, Zea mays
  unsure (1)..(523): unsure at all n locations
  Clone ID: TF_LIB4301-007-Q1-K1-E2
cggtccggacctccgggtcgcccccgcgtccgcgccacgcagaccgggcccgcctcgccggaggcggcgaaggaggaggaggaggtggtggaggaggaggacgacgaggagggggggaggaggatggggganagcagccgcggcgggagcgggagcgggagcggcggaggcggaggcggaggaagcgggaggcggcggcggcggcgagcgaggtggngatggngaagcgggagctcctcgcccgctgcatgacgngcccgctctgccgccgcatcctccgcgacgccaccaccgtctccgagtgcctccacaccttttgtagaaagtgtatctataagaagattaatgatgaagagctagagcactgtccagtctgtaaaattgatcttggctgtgctcccctcgagaagcttaaagctgatcacaatatacaagatgtgagggcaaaaatattttccttgaaaagaaagaagggtaatgctgaaaaaggtgaatctcctattgcgccgcctgcttaaaggaa

SEQ ID NO: 4079 - DNA, 2065 bp, Zea mays
  Clone ID: TF_ZmC30542_1
ccctttctccggttctagatcgcgagcggccgctcgcgatctagcattgggacctcgagccggccgggaagcgttgcgcccgtcgagaaataaaaagaaaaaaaaaaaaaaaaaagagaggaaaaggggacaaaccaccaacaacaaccagaatatcgcatcgccgtcgcgtcgtcgtcgatctccccgccccgcccgcgccgcggaatctgacacatctctctaatctctcctaggaccgggtgcccttacatccacgccgcaacgcaaatcgccgtccgagccctcgcggtctctcgtctccccgtgcgagaggacgccggcagcagcggcgtgccagtgcggtggcttggtgggggaagaccggaggcggcggcagagctcgcgcccagaggtgcacggcaggcctgttctcggcgtcggctgggggaaggcgagtagccgcgggaaggacgagtgaataatcatgagctcgatctgccctttcgcgggagccaccactggtggtggtgtatgccctgtgaaatctgataagagcaacactggggtgtgccctgcaaaatctgacaagagcatcagtggtgtatgccctgtcactggcaaggatcatggtagcaagctcaaggaaagtggtgatcatggtgaagaaaagggcaccgatcctcgtgtcgtaccagcaaaatgcccattcggctatgactccaacactttcaagctgggtccgcttagctgcattgtctgccaggcactactccatgaaagtagcaaatgcaagccgtgtgcccataaattttgcaaggcatgtatatcacgctttaaagactgcccactatgtggtgctgatatagagggtattgagcctgatgcggaacttcaagctcttgttgaccgcttcattgatggtcatgccagaatcaagcgatcacatgctgcaggggatgtggaagcagcagatggcaagaacaaagtcatatatgaggatgtttccatggagagaggggcttttctggtgcagcaagctatgagggcttttcgtgcccgaaacattgaaagtgcaaagtcaaggctcactatgtgtgcagacgacatcagggaggagttaaaatcttcagaagataacttagacctatgttcacagcttggagctgtgttaggaatgcttggggactgctgtcggaccttgggagatgttcctgcagcaatcacctactatgaagaaagtgctgagttcctctcaaagccccctgcaaaagatcttgagctggttcatactctctctgtttcactaaataaaatcggtgaccttcgctactatgatggcgacctccaatctgcaagaaactattatgcccgttcattggatgttcgcagaaatgcagtaaaagaacactctgctgtggcttcccaggtcattgatctagcaacttctcttgcaaaagttgcggatgtggatagaaatcttggtaacgaaagtaccgcagttgagggttttgaggaagcaattcgatgccttgagaagttgaagctggattctgaacaaactagcctcgaacagcggcgcctctcggttctcgacttcctgcacaaccagttggccgataagtaagacatagtcttctcctaagaatgcacaaccagcagatgtctcctcatggtaatgttcaactctactacataagttccctttggaaggagttggtctagaagcagcgatgagtgtgtgtttaccatcgtttgaaactttgtcacggcacaaaataagagctcctgcactgtaaatgtaatcatatatatgctcatcgagtattcttgatgattgccgatatggtttagtagtctaagcactctggtttgtcaatgtcatagcctggagcagcgcataagatgttagttaacttgtggcaagtaccatctcgctttgaagtgtcatgtgtgaagacctatcctgttgtatatttgacaataagacagggaggtagtaatcaaaaccgtggccgtcgtttctcatacgaaaaaaaaaaaaaaaaaaaaaaaaaaaaaaaagcgctctagtctctcctcgtgc

SEQ ID NO: 4080 - DNA, 898 bp, Zea mays
  unsure (1)..(898): unsure at all n locations
  Clone ID: TF_ZmC30542_2
aaaaaaagagaggaaaaggggacaaaccaccaacaacaaccagaatatcgcatcgccgtcgcgtcgtcgtcgatctccccgccccgccccgcccgcgccgcggaatctgacacatctccctaatctctcctaggaccgggtgcccttacatccacgccgcaacgcaaatcgccgtccgagccctcgcggtctctcgtctccccgtgcgagaggacgccggcagcagcggcgtgccagtgcggtggcttggtgggggaagaccggaggcggcggcagagctcgcgcccagagggaaggacgagtgaataatcatgagctcgatctgccctttcgcgggagccaccactggtggtggtgtatgccctgtgaaatctgataagagcaacactggggtgtgccctgcaaaatctgacaagagcatcagtggtgtatgccctgtcactggcaaggatcatggtagcaagctcaaggaaagtggtgatcatggtgaagaaaagggcaccgatcctcgtgtcgtaccagcaaaatgcccattcggctatgactccaacactttcaagctgggtccgcttagctgcattgtctgccaggcactactccatgaaagtagcaaatgcaagccgtgtgcccataaattttgcaaggcatgtatatcacgctttaaagactgcccactatgtggtgctgatatagagggtattgagcctgatgcggaacttcaagctcttgttgaccgcttcattgatggtcatgccagaatcaagcgatcacatgctgcaggggatgtggaagcagcagatggcaagaacaaagtcatatatgaggatgtttcatgggagagaggggtttttctggtgcagcaagctatngagggcttttcgtgcccgaaacattgaaa

SEQ ID NO: 4081 - DNA, 836 bp, Zea mays
  unsure (1)..(836): unsure at all n locations
  Clone ID: TF_ZmC30542_3
ggtaccctccgggtcgggcgggatatcgcatcgccgtcgcgtcgccgtcgacgggcccgccccgcccgcgccgcggaatctgacacatctccctaatctctcctaggaccgggtgcccttacatccacgccgcaacgcaaatcgccgtccgagccctcgcggtctctcgtctccccgtgcgagaggacgccggcagcagcggcgtgccagtgcggtggcttggtgggggaagaccggaggcggcggcagagctcgcgcccagaggtgcacggcaggcctgttctcggcgtcggctgggggaaggcgagtagccccggtgggtgattctcgccctctcccacctggtttggaatcgaattgaaggaaggacgagtgaataatcatgagctcgatctgccctttcgcgggagccaccactggtggtggtgtatgccctgtgaaatctgataagagcaacactggggtgtgccctgcaaaatctgacaagagcatcagtggtgtatgccctgtcactggcaaggatcatggtagcaagctcaaggaaagtggtgatcatggtgaagaaaagggcaccgatcctcgtgtcgtaccagcaaaatgcccattcggctatgactccaacactttcaagctgggtccgcttagctgcattgtctgccaggcactactccatgaaagtagcaaatgcaagccgtgtgcccataaattctgcaaggcatgtatatcacgctttaaagactgcccactatgtggtgctgatatagagggtattgagcctgatgcggaactcaagctcttgntgaccgctcattgatggtcatgccagaatcagcgat

SEQ ID NO: 4082 - DNA, 1626 bp, Zea mays
  Clone ID: TF_ZmC28824_1
caagggttcctgggtttctcagtctttgactgagagcttctttgtgcaataccatggtgcggtttttcctcaccggccgagtatctgtttttgaaggtagggtttgtacttttcttcttttttaacaaagagataaattgctcgcctttgtgttccagaagaaaaatctcagcaattgtcaaacttcagtttttagttaaggttaatagataccaaacaaaggatactatactattgtttaatacatcgtatattatttggctagtgccagcctttgggctatagaatcctctaccaaataagtagcagatttatttggatggaaggagtgtatctcttattaaatacatacgacaaacatttaaggaacgaacgtcacaaggttatcaatagtaagcttgactgaccttgagttgaacaaaaactttcatgaagacgtatctttggcaatgaattggacaggtaaggttcaagaacacttcagctaaataaatgagtagagttaacatatatctttctcaagggatgggggactaggggagtcactagcattgattgtgcaccttgaatccctttcttttcttatataaggaggtatcctctacactaaactacgaacaagtatcagagacactctctgtcaggtgtctgcaatggacaacctcaaaacccattctgaatatgccgatcaacctcaggggccacaagcaaatgccgtttctttcgctttaccaacaggtcaggtcttagacttagatagtcatatgattggccaacagcacacgaatctgtcatcattctggttctcccttgagcagcacaggctgcagttggatcaggcccttcaactccataaccaacagttgcaggtgtcactgcagcagcaaatatctatgcagaactcaactctactgaaccttgtggaatctatgacaagagatgtgctgatgcaaaagaatgatgagatagccagcctgcgagtagagttgcagaggaaccaagaggatctagaaacaacactgcatgacagagatgagtggatgaaggtcgctatggccgcttatgaaattaatcagacacttatccgcatgcttcgtaccgtgcagctggaagcgaattctcatgtttcatctaatgatctagatgctccaagttatagtgaagcatcgagcatggcgaggacagcattggagacagcacagcccaatctgatctgcaaggtctgcaactctggtaatgccggcgtacttatgttgccatgccaacacctctgtgcatgtaagccgtgcgtagcctggcttgcgacatgtcctatctgtggtgctgtgaagactgatgctatcgaggctcgatttgtttataagaagtaaaaacgccaaagcagcaatccgaattcgtttataagagcatgtcagctttcctttttttcgtgttaggtgttataggctgtagccttgttctgttatgcattctggtataatgttctggtagtcttcatgccgatgccatgtttttggattctcaaaatgttttgatatagttgccacgttgtcttcggttaaaaaaaaaaaaaaaaaaaaaaaaaaaaaaaaaaaaaaaaaaaaaaaaaaaaaactcgagagaggg

SEQ ID NO: 4083 - DNA, 2064 bp, Zea mays
  Clone ID: TF_ZmC3545_1
ttttaaaaaaaaaaaaaaaaaaaaaaaataaaaaagataggactctggctctccttttcccctttctcccgttcacctttctctcttcctttttctttcccctccctccccctttctttcctcctggcgacgactgggcgagtgccgccgaacttcgccaggtcttcgccggcgacgagcacctacaaggtgacactattccttttcttcactcggtgtataatctctctttgctccgatcaagcttttcaaacataataagcaaatagtctctgcacgtgattgccaaaattagtcaagacgggtgctctttgctgcgtggccgctaggccacatgggacaaagtctgaccctgctagcagagatcgttctatggatcctactgagcctcgttggcgcataaattcgagcttttctcccccaacatcaaggagatgggattgccgctattcatcagatggattgccccacagagttcatgatgctcctcatgatcacccgccatatgtttcatcactatcatcccatagcaaaggaagcagaagtgcatttggcagtgatcagtacctcaatcatcatcattctgcatctgatggagcactttcttactttgggagtccagctgacagccttcaggccccacgctggacaccctctcttcaaagatttgatctcggtgaattctctacccctgcaggaggatcaagaccagaaacttctgattatcctcagtcaagtgagaggccactgactgccacaagcagtttcagttctgcatccccattttcggaatcaagccagctagcttcgtctagtaaacaagcggccccatatctacctcgcaaccatatgggcaggcggtctttcatgtctaaaccagtctacccacttgtcttccggaatcctgtgtccgaatcagaagcgtgcaggatgcttgaggttagtaatgccgggcgagcgacaccaagtgatgacagccaggcttctcctctgtggcgtcgcagcttggcgagcccagagctcaagttccataatgcactgaacgaacttgggaagatggaggtttcacctgaacggaacacgagctcaagaagggaagggttcagatggagcaacgccagcagttatgactttggatacgatggagatgccattgacatttcagatcatatcagcatcgagtcccagagatctcccacgagctcagcgaggttcctgaagtgtgggctgtgcgagagattcctgcaccagaaatcaccctggacctcgaacaggattgttcgaaacgccgacatgccagtggcagcagttctgccttgccgacatgtcttccacgcggattgcttggaggaaagcactgccaagacagaagtccatgaaccaccttgccccctgtgcgcgcgagccactgacgatgaagggcacgtgtcgttctcagaacctctgcatgttgccctccgatctgctcgcaggaaccttttgttgggcactggtgctggtgggaacagcggcatttctgaccctcctcgcactgatcgtggcttgaagaggaacaactctgcagtcatgcctaggcgcagcggcggcgcattgttccgcaatcgcttcaagaaacagttccccttcaaagcgaggatcgggaaggagctctttggcggtagggttctcaacaaggttggattgtctttgtcttcaggtcagcatgatgatcatcgacagcaagcgccaaagcatgaccggcccatgaagtagctagatcttagtggcacagagtataatatgttgtgtgccctcctgatattttatctatggcatctgttatcgaaacttggcatccatgcgcagcagtcgtccaagatgggggccctgtatggattatggaaggctgcttgcattgcgtgtaacagtagcaccttgccattgcatgtattttgcatgtagcacagtaagaatctatgccctgtgattgatatgttctgaatgttccgcttgatctgttcacaatggctgcttgcatagcgtgttacccccagcaattggaggaatagccttgatgaccattcc

SEQ ID NO: 4084 - DNA, 729 bp, Zea mays
  Clone ID: TF_ZmC223_6
cccacgcgtccggggttctaagggacctgtaaatgcttgtgccctatattgtgtgcctccacatattggggagcttgaagcatcgacaagttactagtcattgcttacttatataagaacatatttttgatttgcggttgtcaagttggccttgccccacagactttcgtatgctgcatatgcaactgttcactttctaaagaaggtgctatttcagccgtacgtttgttcagttgcgggcatgcaacacatcttcagtgtgagtctgagcagaccaggtcatccaatcaggaatccaaagagggatgccctgtttgtctctcaatgagtgatacgcaagctcgaagcaaatcacctatgtttgagaatgggctaatgaagtattctggggctgaacatgaagtgtcacatggcatgtatcagattcatgaagttgatcatgctgagagatctcgtgggcttcaacagatgtcacggtatgaaatactgaataatcttcagaaagcgcagaagtcctttcatatagaaaccgtacctccattgaaacttgcaccgccagctatataccatgagaagatacagaagaggaccacttcggttggtgaaactagcaaacattctgttagaagtcagaaaccccagaaaatttggcaaatgaaggagaaaaaatcaaaagaggctgggagtcatcatccacaaaagtcaagttttctacgttaatagaagaaa

SEQ ID NO: 4085 - DNA, 785 bp, Zea mays
  Clone ID: TF_ZmC35583_2
aagaaaaagtttgacgaggcaaagaaaaaaggaactgtctttggaaaacgttctagcaggcatgtgggttcttgttgctaagttaaaaagaggggctttaggcatatccgattttaatgttgatgatcgaactgttaacctagctgatataactaatggcacaaaggaaaacaaaggtgaaaagaattttgctctagttgagaagcaagtttcagaagattctgtgaagtcgctgagcacagaagaacatagaagtccagagtttgaaccacttcttgttcgtctgaaggctaaaattcaggagatgaaggaaaaggacactgatcccctgagcgataaagatgggaactcacatgtctgcaaagtttgcttcgaatctgcaaccgctgcagtattgcttccttgccggcatttttgcttgtgcaagccttgctcgcttgcctgttcagagtgccctctgtgccgcacaagaatagcagacaggataatcacattcacatgaacggcgtgctagcttcaggctattctgaagcatggcgcactcttgtaaaatggtcggtggtatatgtttctcttttttccttagcaaagaaggtgccttttatgttccttctgtgttgtatcgccattctttgggttcccctatatggctatatagcttcaccttacgttctttatcaaggagttgcaaacgatgagaccccattggaatgcaggaattgtacaggaatttcacaaaagttcattttcatagaaaaaacacaacaaacaggcacaccccaaaa

SEQ ID NO: 4086 - DNA, 585 bp, Zea mays
  Clone ID: TF_ZmC35583_3
agtcgctgagcccagaagaacatagaagtccagagtttgaaccacttcttgtttgtttgaaggcaaaaattcaggagatgaaggaaaaggcccctgatcccctgagcgataaagatgggaactcacatgtttgcaaagtttgcttcgaatctgcaaccgctgcagtattgcttccttgccggcatttttgcttgtgcaagccttgctcgcttgcctgttcagagtgccctctgtgccgcacaagaatagcagacaggataatcacgttcacatgaacggcgtgctagcttcaggtgccaaacacttagatgcttgcatgttggtgctcatgccaacgctatccctctgaaatgtacctaatgatgtgctgtgtatctctgacaggccattttgaagcatggcgcactcttgtaaaatgggcggtggtatatgtttctcttttttccttagcaaagaaggtgccttttatgttccttctgtgttgtatcgccattctttgggttcccctatatggctatatagcttcaccttacgttctttatcaaggagctgcaaacgatgagaccccaaaaacccccccccaaa

SEQ ID NO: 4087 - DNA, 875 bp, Zea mays
  Clone ID: TF_ZmC552193_1
ggtacattgcgagcctcgaggccggccgggaaaacgtccacgcactcacgttaaggcgcacgcttctccgcaaccttcccagcactttcccctccgtctccagcgcctggtctccgcctcccgcgcgcgcccgatgcagatgccgccgtcgcggccgatctgacgccatcggtcgccggccatgaggcctcgccgccgggccctcttcccgttgcacagcgcaggcgctggggcctgcggtgacccgtgggccgactgccagacaccaccgccggttcccagcactcctgattccggccctggcccttccccatcgctgcctccctatggcgatctaccgtgccctcccgttttgtcgccgtcgccgtctccgtcgcctgctcccgcgcataacggtaggaggaaccagggagggacgcagggatacgggcccccacccggtgcaggcgaccacgaccgacggcacctcgtcaaatacgcgctcatcgccgccggggtgttcgccttcgtatgcctgatcctgctcggcgtctcggtggccgtgcggcgccggcaggtccggcggaggcggcaggcgctcctcgcaccgcctatcccattccccgagggcgcggcgaacgtcggcggcggcggcgggcacgaccacgggtgggacggcgcagccggggtggtgcaccacgtctggaacatccggaccgtggggctcgacgaggcgtccatcagttccatcgccgccacgcggtaccgcgccggggcggggctcctgggcgcggctgactgctccgtctgcctcggcgagttccaggacggcgagctcgtgcgcctgctgcccaagtgcgcgcacgcgttccacgtcccctgcatcgacacctggc

SEQ ID NO: 4088 - DNA, 785 bp, Zea mays
  Clone ID: TF_LIB4738-102-Q1-K1-D9
agtcgccacgcgcactcaccgctatcttgatgattgtgtctgtctcgctctcgctgctccgttcctgttcttccgctccttctccccacctcgttttggctgatcaaagttcttgttcgcgaacactttcctctgcctgacactctgagttcttggttaatgagcctgtatagacccatcggccatcaccagttcactactcgccaatcgacatgtcaggacagagctcaagctcctatggtgacactgatcctggcacagacagggcatacagcaccacctccagcagcatccggtggggtccgcacggccgcggcatgacggcctgcctcgtcgtcgtcaatgtcgtgctcgtcgccctcgtctacctctacttctggagggtgttctcccgcagaagcgccgcgtccccctcagcagctaaccccacggaccacgacgacgatgcgtcttccacatcgacgccgccgtcgccgctatcgtcccaggaccagcacggtcgcatcgtggcgtcgctgccgacgttcgtcgtgcgctccgggtccggcgccggcgccgagtgtgcggtgtgcatcgcggagctgcgggacggcgacgaagggcgcgcgctgccgcggtgcgggcaccggttccacgcggcgtgcgtcgacgcttggctgcggctatagatggccaaacgggcccgtgctaaatgggccggcactaagcacggcacggcccatagtgcttcggcacgacacgggcacgattcatatagtgccagtggcggcacgacacgagtctag

SEQ ID NO: 4089 - DNA, 1298 bp, Zea mays
  Clone ID: TF_ZmC35583_1
ggagcctttttgtagaggacatgaaaatagagcttcaggtcagaagacatagggaggctgctttggaagctgctttggcagagaaggagcttctgcgaggaagaggacattgatccctgaccgataaagatgggaactcacatgtctgcaaagtttgtttcgaatcggcaaacgaaaaagaactgcctctggaaaaggatttatcaggcatgtgggttcttgttgctacgtggaaaagaggggctttaggcatatctgatttgaatgttgatgatcgaactgttaacctagctgatataactaatagcacaaaggaaaacaaaggtggaaagaattttgctctagttgagaagcaagcatcagaagattctgtgaagtcactgagttcagaagaacatacaagtccggagtttgaaccacttcttgttcgtctgaaggctaaaattcaggagatgaaggaaaaggacattgatcccctgaccgataaagatgggaactcacatgtctgcaaagtttgtttcgaatctgcagccgctgcagtattgcttccttgccggcatttctgcttgtgcaagccttgctcgcttgcctgctcggagtgccctctgtgccgcacaagaatcgcagacaggataatcaccttcacgtgagctgcgttctagcttcaggtcattctgaagcacacatcctcttgtaaaatcttcaatggtatatgtttctctttttccttagcaaagaaggtgccttttatgttccttctgtgttgtatcgccattctttgggttccccttcccctatagcttcacgccttcaccttacgttctttgttgtatcgaggagttacaaatgatgacttctcgctctgcaaatatgtatagatacgcaactcgacgctgtaacacattttgattctctactcctgaagaaaagcagcgaacgacatgatgacgtgtgtaaaaaaaaaaaaaaaaaaaaaaaaaaaaaaaaaaaaaaaaaaaaaaaaaaaaaaaaaaaaaaaaaaaaaaaaaaaaaaaaaaaacaaaaaagaaaaaaaaaaaaaataaagacaaaacatattaagaaaacctatctcaagaaaaaaaaaaaggtggggccgggtttataagggtccaaagtttactgccatgctccttgacaataaaatttttttttttggggacgcaaaataaaaatagaggggcggatatttaaaaaatgcgaagggggaaaaaccccgggtccccaaaaattaatcacctggacaaaaatcccttttttcaccgggtgttttaactaaa

SEQ ID NO: 4090 - DNA, 1367 bp, Zea mays
  Clone ID: TF_ZmC9878_2
aattcattgtcattaattttttgaaaacattcttttagaaataaacaaaaatatttgaatgttggactatagctgatataacgctatgcacattgatgtataaccatgagttactttcagatacaatggttcgccaagctgcaatggctgtcaagtgcatgctgcttctgtactacaagaactgcagaggtcgtaactaccgtagacagggccaaatgttaacccttgtggagtaccttctgcttctttatcgtgctttgttgccaacttctgtttggtatcgtttctttctgaacaaggaatatgggagtctcttctcatctttaaccactggactgtatctgactttcaagttgacttcggtagttgaaaaggttcagtcattcttggccgcggtgaaagcactgtcacgtaaagatgtgcattatgggtcttatgcgactgcagaacagagttttagagctcatgctcgtctttcaactcaagagctagatttaggactaccactaggaccggtgctgggaggaagacatggagctcccaacatcggtgtaggcgagcgcgaagaggaatattctgaagcaggtatagagaggtcatacgtggagaatgggcccagagccggagttgtcgagggccgtgatggtgttggaacggagccgagttcccttagtgagctcctcaagaaggtcattgcgaaccttgtcaatgccatcacattttggatatcttggagcacgctggcatgctggactcttaagccatgtgcgacatcggtggacacacatgccaaggtctttggtgacggtgccactctcagcgacaccactgcctatcatagtcttgacaacgctcttaagtatctcaccttcacttcacttgacctgacatcacatatggtgttcaataggtctctctacatgaacgatcctcgggagtcgcacctgagcatggtcaagcggattcttcggtacttgctgctggtgatatgtgtgccatttgccaggagaagatgcatgtgcctgttctccttcgctgtaaacatattttctgtgaagactgtgtttccgaatgaggtacaatgctcacgtgcatattttaaatctgggatattcatctcacattcaaaggcagcatccattttttacgaagaaccccttccaccaaaattttacgaggaaccccttatgggtgttgtcattgaatggccttatcattttgtgaagaagcatttggatcgcgattcattaccacccctacgtgtgagttatcttaggacaaggtgcttcatgggggagcgaggggtgcttgacaggagtgaggtcaagccttgctaccctggagctgagagtgaaagagataaataa

SEQ ID NO: 4091 - DNA, 1279 bp, Zea mays
  unsure (1)..(1279): unsure at all n locations
  Clone ID: TF_ZmC11832_1
cctcgnagccggacgcgtgggtcctgccccgccaccacgccgcggcagcacaactgcacaagccctcctcagatctcaatcccggcgctccctccctccctccctcctcgcctcgggacagcgagcgccgccgtccgccgtccatggagcacgacgccgaggcgcgccgcgggttcgccaggatgggcttcgggtgcaagcactaccggaggcgatgccggatccgcgcgccctgctgcggcgacgtcttccactgccgccattgccacaacgagtccacgaaagacgggcacgagctggatcggcacgacgtccaatcggttatctgcctcgtctgtgacaccgagcagccgatcgcgcaggtgtgctgcaactgcggcgtctgcatgggggagtacttctgcgcagcctgcaacttcttggacgatgacgttgacaaggagcagttccattgccacgattgcggcatctgcagagtaggaggaaaggagaacttcttccactgccaaaagtgtggatcctgctactcgacgacccttcgcgacaggcactgctgcatcgagaactcgatgaagaacaactgccccatctgctacgaggcagtacctgttcgattcgctgagggagacgtcggtgctccgctgcggccacaccatgcacctgcagtgcttccacgagatgttgaagcacgacaagttctcgtgccccatatgcgccacgcccatcttcgacatggacaagttcttcaaggccctcgacgcagagatggaggcaagctacttgtacacgggaaagggatgggtcgtgtgcaacgactgcagggacacgacgcaggtcttctccggcgtggcgggccacaagtgctgccactgccagtcccacaacacctgccgggtggcaccccccgtccttccgtagccaccaccaacaccacatcattgttgttggaattggatgcagccagccaagatacccccccagcagctacgctattattaccagtagcgcctgcgcttttacacaccgctccgttccagtccatgatgaactgcataatttcgtgccatgcaggtatgtacgtacactgttattggagatcggaagatttatccgactcgggacgtattatttgtaccacaacaaaacacgtgttactattgtaataccagatccggatatatacgaaactatttttaggatgcttgaacgagtggtatttccttggagtgtgtataacatttatttattagccccaaaaaaaaaaaaaaaatttgcggcc

SEQ ID NO: 4092 - DNA, 1818 bp, Zea mays
  Clone ID: TF_ZmC4401_1
gtagttgcccggccgggtcctcgttcttcgtctcccccactccccacgctacctgagaggctgagactaggaaggggaaggaaaataatagtttggcgcgcaaatatccgcctccattcgtacgccgctattctcgtgtgcgcgatgatgatcccgtggggcggcgtggggtgctgtctcagcgccgctgcgctgtatctcctcgggaggagcagcggaagtgatgcggaggtgctgaggtcggtggcaagggctggcagcatgaaggatttagctgctatcttggacactgcaagtaaggtcctaccacttgtagttgccatctctgggagagttggttcagacacaccacttatatgccaacaaagcggcatgagaggtgtaattgttgaagaaacggcagagcaacacttcctgaagcacaatgatgccggatcctggattcaagattcggcagtgatgctttctgttagcaaagaggttccatggtatctggatgatggaactggacgtgtttatgtggtcggtgctcgttctgcagctggtttgattttaactgttgccagtgaggtttttgaggaatcagggaggacacttgtacgtggaactctagattatttacaagggttgaagatgctgggagtaagcgaactgaagggttcttccaactggaacctcattgacagttttggtgacgcgtgggttctattatccattggccattaaagatgatgttggaactattcgaattcagcgaccgcacaaaggacccttttatgcatcatcaaagagcattgatcaacttattgtgaatcttgggaaatgggccaagttataccgaattgcttccatgggttttgcaacatttggtgtcttccttcttgcaaagcgtgcactacagcattttctagaaagaagacggcggcatgaactgcaaaaaagggttcttaatgcagcagcacaaaggcaagctagagaagctgaagggagcaaaggtacatcagacgcagagcctaacagtaaaaaagatcaattagtgttggacatatgtgtcatatgccttgagcaagagtacaatgctgtttttgtgccgtgtggtcacatgtgttgctgtatggcatgctcttcacatttgacgaactgcccactttgccggagaagaattgaccaagctgtcagaaccttccgccattgatggtgatatatgatgcaaaaaactggcatggtaccaccacatgtactgcttctgaaaccaatttgttcttggaacttggaagtgctggctgctatcaaccaacgacatgaactgcaatactgggacgaagcagcttcaatgagtttgctttttgaacagaacagtgagtgatgcaagttgcaagctcataattggcagttgagatactctcactccctagatagtgccaatgggtgctcttgcctgtaatgtactacaactctgtacaggacgctcttgtgtaagtgcacatagattagcagcttgcttattgacaacatcgatgccggtaatatgtactgttgcccatcgggcatttgtgcaaaggaataacaaaatcagctcgtttagttgtgataatcaatttttctggtgggtgagaatgagacgcgtctcttagggttttttttttcgtgtccagtttatttgtcaggatcataggaaatagatgatttgaaatatgttgtatgttttaagactgtccgtagcataattctgttatttgggattcaaataatccctccgttctagtatataaagtgtaaccatatctggtttaaagaccaaaaaaaaaaaaaaaaaaa

SEQ ID NO: 4093 - DNA, 1723 bp, Zea mays
  unsure (1)..(1723): unsure at all n locations
  Clone ID: TF_ZmC4401_2
cattgggtacctcgaggccggccgggaacctaaaaaactgccggtctttgctttgcccttcctccgcccccttcctccccccgcgctgcctgccgtaggtacgggaagggaaaaaagtcggcgccaaatctccgcatccattcgcacgccgcgattcttgtgcgcgatccgccgcgcgatgatgatcccgtggggcggcgtggggtgttgcctcagcgctgcggcgctgtatctcctcgggaggagcagcggaagggatgcggaggtgctgcggtcggtggcgagggctggcagcatgaaggatttagctgctatcttggacactgcaagtaaagtcctaccacttgtagttgccgtctctgggagagttggttcagacacaccacttatatgccaacaaagcggcatgagaggtgtgatcgttgaggaaacggcagaacaacacttcttgaagcacaacgatgctggatcctggattcaagattctgcagttatgctttctgttagcaaagaggttccatggtatctggatgatggaactggacgtgtatatatggttggtgctcgttctgcagctggtttaattttaactgttgccagtgaggtttttgaggagtcagggaggacacttgtacgtggaactctagattatttacaagggttgaagatgctgggagtaaaacgaactgaaagggttcttccaactggaatctcattgacagttgttggtgaggctattaaagatgatgttggaactattagaattcagcgaccgcataaaggacccttctatgtatcaccaaaaagcatcgatcaacttattatgaatcttggaaaatgggccaagttataccgccttgcttcaatgggctttgcaacatttggtgccttccttcttgcaaagcgtgcaatacaacattttctagaaagaaagcgccggcatgaactgcaaaaaagggttcttaatgcagcagcacaaaggcaagctagagaagctgaagggagcattggttcatcggacacagagcctaacagtaaaaaagaccaattagtgttggacatatgtgtcatatgccttgagcaagagtacaatgctgtttttgtgccgtgcggtcacatgtgttgctgtatggcatgctcttcacatttgacaaactgcccgctttgccggagaagaattgaccaagctgtcagaacattccgccattgacggtgataccacgtgcactgcttttgaaaccagttggctattggaagtgctggctcctgtcaaccaacgatatgaactgcaaaactgggtcgtagcagcttcttcatggagtttgcttttcgaacagaacagcgagtgatgcaagttgcaagctcatgattggcagttaagaaagataccctactgagatagtgccaatgggtgctcttgcatgtaatgtactactactacaactgtgtacaggacacttgtgtaaatgcacataggttagcagcttgcttcttgactaacacctaatgggcatttatgttgtgctaaccgaatgacaaaattagctcgtttagttgtgataatcgttttttctagtgagtggggaatgatacggatatctccgttcttttgtgctcacaggatcataagaaacagaaaagatttgtaacatgttctatattttactgctcattttgtaacctgaatgtgaggacaacatgttggcgccttnaaaaaaaaaaa

SEQ ID NO: 4094 - DNA, 914 bp, Zea mays
  Clone ID: TF_ZmC4401_4
tgcacaaaggacccttttatgcatcatcaaagagcattgatcaacttattgtgaatcttgggaaatgggccaagtaggaaattttgttagaacatatttttggttgttacttcttagttagggcatcttatgctagtagcatgtttgtggcaggttataccgaattgcttccatgggttttgcaacatttggtgtcttccttcttgcaaagcgtgcactacagcattttctagaaaaaagacggcggcatgaactgcaaaaaagggttcttaatgcagcagcacaaaggcaagctagagaagctgaagggagcaaaggtacatcagacgcagagcctaacagtaaaaaagatcaattagtgttggacatatgtgtcatatgccttgagcaagagtacaatgctgtttttgtgccgtgtggtcacatgtgttgctgtatggcatgctcttcacatttgacgaactgcccactttgccggagaagaattgaccaagctgtcagaaccttccgccattgatggtgatatatgatgcaaaaaactggcatggtaccaccacatgtactgcttctgaaaccaatttgttcttggaacttggaagtgctggctgctatcaaccaacgacatgaactgcaatactgggacgaagcagcttcaatgagtttgctttttgaacagaacagtgagtgatgcaagttgcaagctcataattggcagttgagatactctcactccctagatagtgccaatgggtgctcttgcctgtaatgtactacaactctgtacaggacgctcttgtgtaagtgcacatagattagcagcttgcttattgacaacatcgatgccggtaatatgtactgttgcccatcgggcatttgtgcaaaggaataacaaaatcagctcgtttagttgtgat

SEQ ID NO: 4095 - DNA, 813 bp, Zea mays
  unsure (1)..(813): unsure at all n locations
  Clone ID: TF_ZmC64108_5
aattcggcaccggcggcgttctcgtgcatgctcacggtcccccacgcccacgagcgcctccgcggcgacgaagagaatcatcaggcagagcgggggtggggcggggcgcagatggatctagagaggtcaccgccagcgtcgtcggcggaggcgcccggggacggcggcgggggcggggccgcggcctgctcaatctgcctggatgcggtgctcgcccgcggcgctggtcgctccgtcgccaagctacaatgcggacacgagttccacctagattgtattgggtctgcattcaatgcaaaaggagcgatgcaatgccctgtcggaagattgagaaaggtcgctggctttatgcaagcggacatcgcgcctctgttgatattgatatgggtggctgggtgaccagtgacaactatgatatcacctccgagcttccttttggatttcaatggtgcccctttagtggattcacccggctagcatccatgtttgaggagcgtgaagctgagcttacttatcacacaactggagatcgctcaagtgctgcaagcagttcacttgtttgcccatatcttgccctgcgtggttttctgcatcctgttcatgtgccttctacatctaatcctggtgctgaaagcacttcatttcgtcggcatgcaactggcttggaaggccatgccactcttgatttgaataatgctcaacttttccatgcgaatgagtcaataaatcatgacagtgagcacagacatttgagtaatcttnctgtatcaggaattcctgagtattctatgactncatttggtataggactac

SEQ ID NO: 4096 - DNA, 782 bp, Zea mays
  Clone ID: TF_21210971
ccacgcgtccgatttttttctcttaagtgtattggaaagatgctctgatattttacaaaacgctacagtaaaatttccattacataagactttggtacatgcgaattgaacgaaaggtgttcaaaactatgagcattacattttttctgtagatactttataatcacattctcctattgttatatattaatgtaactaaattgcagattatgattctgagaatcctaggatagtaatgcagtgctcacaccatttccaccttggctgtatttatgagtggatggaaagaagtgaggcatgccctgtctgtggaaagaagatggagtttgacgagacaacataatcctctggctggactctacaccatggcccatggattaacaaaccttctcatatgacattctgaaaatacagatggtctagcccagcaagttctctgtaaatacgccctgtaaatattggactggtagtgtgggtccctcttggccatacgagtgctctccaaatgctggaacggtgcacataaacattcttttccgatttgttacaaatagtcggcaggggaaggttgccccccctctgcctgtctgcgcctctgcctctgccttgtcgaggcttagaggtgcattggttgtccggtgatagattcatcggaagcctgtaaattaaagacctaggctcatataataatcatatggagtcccgtggttctggaaaaaaaatattaggccggaaaaaatgcgaataaagaagttcctcaagaaataaaaaaaaagggcggc

SEQ ID NO: 4097 - DNA, 505 bp, Zea mays
  Clone ID: TF_LIB3592-075-Q1-N6-G10
ttttttttttttttttttttttttttttttttttttttttttttttttttttttagttatagatttgcattatgggcctcgtccaaccaaacccaagtaacgggatctctctgttcctgatttgattaccttacaaaacgcggggccggaggcgaaatacatttggtctaacaataacccacatttgggaaaacggggctaatacacaattataaaggggggacaataagctgccttcaagcaaacatcatgcgttcattgggggcagtacccagcttcaaagggcaacaacttcccgggggcctcataactggtgactcattgcctcaagatcctcgccaggaacttcagcaaagcaaacagggcataccttgtttatgccaagccattttgtcacccagctggcatggtatacatgcttgcatggaaaggtcatttgaaaaattcctttcctgtactccatttggcaaaacacacacctcttacgggggggtttctttccttg

SEQ ID NO: 4098 - DNA, 786 bp, Zea mays
  Clone ID: TF_ZmC518526_1
actttcccctctgtcgcccccctcgacgcggcggccgccgccgggatgaccgccttctagcacaccacaaccgatctcccgcggagtcccccgcccgccctgcgtcgcgccgacggagatccgggccctcttcggactgcagatgcacaaaacatagtgtaccagctcttcctcactcaacatgtggagttttgcatcaaatgccatagctggaagcataaagaaaaaggtacaaccatcaaaaggcagcctatccaatcctgattgctctgatgacgatggttcttcatgtgcaagtcgagaggaaggccttgaatgcccaatatgctgcgaatccttcaacatcgtagagaacgttccttatgtcttgtggtgtggtcacacaatgtgcaagaactgcatcttgggccttcagtgggctgttgtcaagttcccaacccttcctatccagctgcctctctttgtctcgtgtccttggtgcaacctattatctttccggctggtgtacaagggcaacctcaagttcccacgcaagaactactttctgctgtggatggttgagagcatgaatggtgacagagcaaagttccattcctctggtcatgaagagcgccaatcagtatgtccgtccagtggtggcaccagttccagtcaacaccaccgaagaacccccacggcacgagcagagacctcctcgtctgccagagatagaaatgccgctgccaacacccccaacactgccagcgtgtctctccaaaagctcatggtgtgcttcgtgcagctgac

SEQ ID NO: 4099 - DNA, 884 bp, Zea mays
  Clone ID: TF_ZmC2009_3
ggtaattcggctcgtgcggctcgagcggctcgaggaccgtatgcggtcacattttctgccagccgtgcatcaaggctgccattaaggcccagaagaagtgccctacctgccggaggaagctcactccaagacagcaacaccgggtgtacctcccatcgccttagtagcccagtgcagagtcattttgctacaagttctgccgtaccgggcacgaggggcgggaggctactgggggccgggggccgagctccacccccacccacccacacgcacacactttgccggcggcgagcaccaccaggacagcagtatcttttattgcaacaccatgaactcccatggtgctggttcgcattcacggcttttggacctcaactatccccctgctgaaggggctggtgagggggcttcacgtttcagcagtatccctgtctctcatagagagggttcaagcagcatgcctgtacaacacatccaggcttcgagtagtacaccaccggctactggtgagcctcgcattggtatgcgtagttgccccatcgatgtggaagccatcgatgatgatgccgttatctattcttcaagaccactgcctcgagcaagacagcagttgaccacgacagaaagtattactatcataatagatgatgattccgaaacaaacctagaaacagcaggcgatgctcttgacgagcatgtgaacttactgctatctctgggcatagaacgctcgcatgagcctacaagtgcaaccaacaccttccctggataagcatggtggacacaccaaaagtaaacaccttcaaggtgcctcctgaacctgtgaaggaggttccgaaagaaccgaagctcagctgcccgatctgtatgaacgagataaccga

SEQ ID NO: 4100 - DNA, 664 bp, Zea mays
  Clone ID: TF_ZmC9505_3
gtcccttcccgtgtcccgtagtcgtctcctctcggcttccctcatcagctgccgcgtcgtcagccagcgccaagaaacaaaagcgccgcgataagtccgttcgttgaaggcaggcagccatgatccctaggacgtcctcggtctcggcggcggcggcgccctcgccgccggcgtggcaaagcgccagcagcagcgacggcatgttcccgggcccgggtagctcggggcagcagcagctggccatcagcaacggggtgctcctcgccgccgtcatcttcctcttcatggtcgtcgtcttcgtcttcctcctctacctctacgccaagcgctacctgggcgcgaacccgctgctggcgccgtcgtcgccgtcctcgcggttcctcttcgttgccgcgtccccgctcccgcagcgcggcctgcccgcctccgtcctgcaatccctccccgtcaccgtctacggctcccccggcggcaaggacaaggacgcgctggagtgcgcggtgtgcctgtccgaggtgggcgacggcgagaaggtgcggacgctgcccaagtgctcccacgggttccacgtggagtgcatcgacatgtggttccattccacgacacgtgccccctctgccgcgcccccgtgggcgacctcgacgcgctgccgcgggaggagccc

SEQ ID NO: 4101 - DNA, 332 bp, Zea mays
  Clone ID: TF_cC-zmpo14820003g11d1
ttccgtggtcgtaccacgccttcgctccgatggtatccatcacgacgacgcggctagctgcccggtctgcctggaagactacgcgcccggccagcgtgcccgtgagatgccctgcatgcacaggctccagcgcaatagcatcggcccgcggctcaagaggcacatctgctgccctgtgtgccgtctgcatctgacggctaccggctacaggagatcatgcagcgtccgagacggagtgtacctcaatgtcgatcctgatcgagacggccatgaccacggacggtgcgatggtcgggcaagctgtccgggcaacgcctatctagcatgcacct

SEQ ID NO: 4102 - DNA, 1728 bp, Zea mays
  Clone ID: TF_ZmC84167_1
ctggcaagcaaagctcttcagccagtgcagtattggagaggaagtgcaggtcattttccgattctactactagcaacttgaagggctcatcaagagttgctaaagggtttgctgcaagcatatctggatcagaagtatcagttgacctttcctttactggtaccctttccccttctccatcatttgatgccaaggtagttagtaactcaaactcagcacctgctgctagcacagatctttcattggcattgccctcaagtgatagtttaacaccatctttgagtcatgattccaatactgaggtagtggactctagtagcaaaattaatttttcatatgatgaagaacagaaggtctggatcccacaagataaaaaggatgaaattgtcttgattcttgtccagaggcagaaagaactgcaagcacatacacgtgactggacagactgggctcaacagaaagtgatgcaggtcgcacaccgacttgcaaaggagaaggatgaacttcagtcactcaggaaagagaaggaagaggcagaccgtctgcaagaagagaggcaccatttggaagagagtactcggaaaaagcttctagagatggagtctgcaatttctagggcaaatgctcagctggagaaggcagaagcttctgctcgcagacgtgaggttgagaatgcacaactcacgttacagatggaagctgcaaagcgacatgcagcagagtcagcaacaaacatttcagagcttttaaagaaagatgagaacagccgtaaaaggtctcagcgttgggaatctgatagagccctgttacaagaggatcttgcagcacaaaagagcaggttatctcgggttcaagaacaccttcagcatgctaaagagctaaaggatcaagtgcaggcaagatggaaacaagaggaagctggaaagattgaggtaattgcccttgtaacctcaaagaagaaagagagggagcaaattgagacctccatgaggtcagaagagaatttactgcatcttaaagcagcgaatgacacagaaagatacaagagtgagatccgtgctcttgagcagcgtattgcacagatgaaggtttctttggactcttcaaaggttgctgcccccaagtggggtgctgacaataaaacatatgcattgcatctttctgaagggagaaagaacagcagtgcccaaattttgtccaacatagcagtaccccaagatcccagttttgatgatatacagcgtgaccgggagtgcgtcatgtgcttgagtgaggagatgtccgtggtgttcctcccttgcgcccaccaggtggtctgtgccaaatgcagcgacctccatgagaagcaagggatgaaggaatgcccttcatgccggacccccatccagcgcagggtgcgcgcccgccccgcaggttgctagatttcacatataccatttggattttatcctgttttttttgttttaccttgattgctcagcttgagttgatggaagattggagagaataatgggggggatgtgagtggtgaaacttggacaataatacatcgttaaacatcaaacaagccccagcggacagtgggtactggttgggtttgttatatggatataccggccgcttctgaatgctttggttttgttgcaaaaaaaaaaaaaaaaaaaaaaactcgaggaatgtgggcggcacgctcgtcaatttccggttctaagtaccgtactgttttgt

SEQ ID NO: 4103 - DNA, 2410 bp, Zea mays
  unsure (1)..(2410): unsure at all n locations
  Clone ID: TF_ZmC12187_1
gccggccgggttcgggaacgcattgcgaccgacccgcccaggctcagagagagcgcagaatggaatcgtcgctcttatcatactccatgactccatcactagactagagagagaaacccttgtacccttgttcctttttatcccccatttctccgagtctccggcccatcgccgaacttcgagtccaaggaagcggagccaccggagaaggggatatttgcctttcccgtcgggggcctagggagcaggagggatgcagcggcggcggggccacacgtgggcaggggtggggaagacggcccaggcggcggcggcgcacgccgcgctcttctgcttcactctcctcctcgcgctcagggtcgacggacgcaccgcatactcctggtggataatattcagtccactatggctctttcatggtattgttgcacgcggaaggttttcaatgcctgccccttctttgcctcatggccgtcattgggcaccatgtcattcgattgttgcggcgcctttactaattgcgttcgagctgcttctttgtatatatcttgaaagcataagagttagaaatcatccatctgttgatctgaagattgtgttccttcccctgttggcctttgaagcaataatccttattgacaattttagaatgtgtagagctttaatgcctggggatgaagaaagcatgagtgatgaagctatttgggagacacttcctcatttttgggtttcaatttcaatggtgtttcttatagctgctacaacattcacccttctcaagctgtctggtgatgttggtgctttgggctggtgggatttgtttataaattatgggattgcggaatgctttgcatttcttgtctgtacaagatggtttaatcccatgattcataagtcccccactcatggggaggctagctcatcatcagcgattagataccgtgattgggaaagtggtcttgtcctcccatcactagaagatcacgaacaagagaagctttgtggtctacctgacattgggggtcatgtaatgaaaatacctcttgtggctttccaagtattgctttgtatgcggttggagggtacaccaccaagcgctcgctacatcccaatatttgctcttttctcgccactatttattctgcaaggtgctggtgttcttttctctctagcaagattagtggagaaggttgttctgctattgcgtaatggaccagttagtcctaattaccttacagcctcatcaaaagttcgtgattgctttgcttttcttcatcatggttcaaggcttcttggttggtggtctattgatgaagggagcaaggaagaacaagcccggttgttttatactgaatctactgggtacaataccttttgtggctatccgccagaagtggttaggaaaatgcctaaaaaggaccttgcagaagaggtttggaggctacaggcagctttgggagaacaatctgaaatcaccaagtgtaccaaacaggaatatgaaaggcttcaaaatgagaaggttctttgtaggatttgttatgagggggagatatgcatggtgctacttccctgccggcacagaactttatgcaaatcttgtgctgagaaatgcaagaagtgtccaatctgccgtgtgccaattgaagagcgcatgcctgtatatgatgtttaaacctcactaactcagcttaacaatacaaatttgtgcatgtgggttctgtcatgctgtgcatttagtctcgatcacaactttaagctgattgaggtttgcacttcagaaagggtctgcaatatatgggggaaatacaagtatatcatgtctaaccaaaagcatggatatgtggttgatgagcattgtcgttttggaccagttatctactgtaagtatgtggtcagtgtatttcccttccctcttgtgattggtagatgagtcagatagtcttgttcgcgtagcagcattttctcagggatatgcagttgttgagaagaaagtgaaacaaaaacagactgtaaataaaaacactgccttgtttgaatctagtccttgtttgagaagaaagtggaacaaaaaaaatgtaaacatctctgttgtattattttgtagtagaaaaatgtctgccgaaatttgtgaccgcaacgnttcgttgtctggtgtcttttcacaatgtgaggggtcgtcttagcaaaattatttaaagattgtggaagcatgtctggagaagaaaggttgcgtctggtctgtgccaaggaatcattgttggtatgttttttcaaaccgtattgcggtgattggaaccaatttaatcatgatactgtggactgctgtctccttttaaagcagagtataaatctaaatattgttcgtcaaactattttaagtttgactaaatttgtataaaagatattgatg

SEQ ID NO: 4104 - DNA, 1094 bp, Zea mays
  Clone ID: TF_ZmC22071_1
ctcgaggccggccggggcaattctcaccctcgcacagtcgtcttctcctactgcactcaacgcatccgggcttttggtccacccccgccactacatacatagccgatagccccaggctcttgccgtgccgtgccactgccagaaacgaggaaccacctctcgatggagtccaacaccaccccgttcgccgcggttggcacggccgccgaggaggcatcgacgcggcgcgtggccaaccgcatcatccgcgccctgcagcaccagctccggctgctgcaccgcgccggcgccgagttcttcgtgctcggcgtcacgggcaacgtgtacacggtgacgctgtccaccacgccggcgtgcacgtgtccggacccagccgtgccctgcaagcacatcctcttcgtgctgctccgcgttcttggcctctccctcgacgaggcctgcgtttggaggcagactctgcacccgtgccaggtcgcgcggctcgtcggcacgcccacgtacccggacgtgctcgctggtgcgcgcgcccgggagaggttccaccagctgtggtcggcccgtccagccaacaatgttgctgacgacaggcaggaggcgtcgtcccacaggccgctcgacggcgcggcatgcccagtgtgcctcgaggagatggcgccggcacaaccgtcacagggcagcggggccaccgcacaggcgatcctgacgtgtaggacgtgccggaatgcggtgcacgccgagtgcttcacgcgctggaagcgaagccgctcgcggcgggccgcgacgtgtgtcgtttgccgctcgcggtggaagaagccaaaccgggagcatgagcatgagcagtacatgaacctcgccgcctatatgaacgacgacggcgacgtcaccatgctgagcgccgacggctggctgtgtgcggggtagttgcaggctttcgattattcaacaggctaattgtcacataactgtgcctgtacagaatatagaaccattgtgatctctgactctcaactctagtttatatatactctttctcttcaaattagaagacatcttaactttttcaatcataaaaaaaacaaaaaagggcggccgtt

SEQ ID NO: 4105 - DNA, 670 bp, Zea mays
  Clone ID: TF_ZmC14225_2
ggcgcagacggggcagaacagaactctgttgtcgcagcaggagcgcgcgtggcctacgatgcagggtaagtggaaggcgtgggagcaatcgtctgtgaacactgccgagctgccgccgctcttgacgccacgcgagcacacgccgcaccgggactgcacgtaaagaaaagagagagaacccacatcagcagctgagactcaaaacattctgcaaagacaggagaatgatcaacaaacaaaacaagatggagtgttttccaaagaaaggaagaaaagagcacgagtaaaagattgggctttttggacgctaagcagcagtaggatcattcatttggagcactgagatcaaaatctccatttggacaggcaaaagctgatgtgctgtgatctgattggatccatctttttgcgctatagcctccaccttctccctcgtcctacgaaagaagagaaaagaaaagcagggggatttgcatccctctgtgcagcagctgctaccaaaaggtgtagtacaaatacaataatgctacagaggttctgaaccctagaaaaggcgttgtaggcagtacggttttgttttctttttggacggataaggaatggcaagagatgcatgaaatacagaatgagagaatccggtcctgagagggtctctgcctcgtgccgaatt

SEQ ID NO: 4106 - DNA, 1077 bp, Zea mays
  Clone ID: TF_ZmC35655_4
ccgggtgacacattccttctcgagcttttgacaatttccaatttgtaaatttttcggagataatgtccaagaacatggcacaatcaaggaaagaggctgcatttgctctttcagcattgatggagataccacaacagtataaagcaaccgtggaattaggaattttaggtcgtcgctcttccaagtctcccaacagagttcctctacctccgccttccgcaagtcatgatgcttattcctattcatctaaaagctttagcaaaccaaccacctaccctcagagttcttcatcctcatcagcctatcctcaatatggaactccacatacagccaccccggccgcaccttcgtccacttatgacaaccaggtctgtcctatctgtcttgtgaaccccaaagacatggcgtttggctgtggacaccagacctgctgtgactgcggacagagtctcgagtcgtgtccaatctgtcgcactcccatcaccacaagaataaagctatactagcaagtggtggctttggatcattgccaatgggtggtatactggagccaccctgcctcacactggaggatcgcgacggcatgtcccaataaccgtcggaacacccgctccgtagatcgattggagctaaggattgcagggccaagcttggatcgattggagctgaggattgcagcgttggtctatcggacagggttgccccagtattcatatccacgagtaatgatccaaatcgcagcttgcaaaaaacaatctctatataaacgagaagaaagagagaggagaacacaaaggtagtggtgtggtggagcagtcaattgcgtgtcgggccatgacacgcaacttcccttggtgccttcgttacttgtcaaaccagcaacactagttgtacatatcagaatttcgtgcttatctggacttctgatgccaggcttagaggattctttatttgtgcgcgtacttttagtttcgtccgagatatatgttgatttgttctttgcttgcaattgtgtaaaaaattcaatccgcaaaattttgttttggtgaatcagaaaaaaaaagtatttggtaggtg

SEQ ID NO: 4107 - DNA, 673 bp, Zea mays
  Clone ID: TF_LIB3591-068-Q6-K6-G10
ctattttgtatctttttccttgatctggttgatttttagtgtgtagtgggggtggtgttttgtttgctatgttgttccacggtgttcgatcatgcatgtatttctgcagagcaatgttcttcgaggggattcatcccttgcaaagctagcgcagcttaaagagttctcccattacttccgacgcattacagcgtgcggggggggggaataattttaccatagcctaaacgcgggcgatgaagacgacgaccacacttgttgcatttgctacaactgtgattccgatgcaacattccagccatgccatcaccggtcctgctttggctgcataagcaggcatctcctgaacaaccagaggtgtttcttctgcaatgcagtggtaacatcggttactagatagccgattcgcgagcgatgcgctgctctactcattgcctctttcggtatcgtgatccgaaggaagatggtgccactgatttgtcttatctattttgcttgacctgagggctggggcgctggcgtcccaaagatctttccattgcttttccaggaagaacgcgttacctttgtgcacgagggtcagaagcgggtcttcgttttccttgctgtatatgtaaaggccaggtaatagtagaaaggattcaataacattgccgcagaaggaggtttctgt

SEQ ID NO: 4108 - DNA, 929 bp, Zea mays
  unsure (1)..(929): unsure at all n locations
  Clone ID: TF_ZmC12187_2
aaaagttcgtgattgctttgcttttcttcatcatggttcaaggcttcttggttggtggtctattgatgaagggagcaaggaggaacaagcccggttgttctatactgaatctactgggtacaatacattttgtggctatccaccagaagtggttaggaaaatgcctaaaaaggaccttgcagaagaggtttggaggctgcaggcagcgttgggagaacaatctgaaatcaccaagtgtaccaaacaggaatatgaaaggcttcaaaatgagaaggttctttgtagggtttgctacgagggagagatatgcatggtgcttcttccctgccggcacagaactttatgcaaatcttgtgctgagaaatgcaagaagtgtcctatctgccgtgtcccaattgaagaacgcatgcctgtatatgatgtttaaacctcactaactcagcttaacattcaaatttgtacatatgggttctgtcatgctgtgcatttagtctcgatcacaactttaagctgattgaggtgtgcgtttcagaaaaaaagtctacaatatgtgtatatcatgccatgtctaaccaaaagcatggaaaggtggctgatgagcattttgccatttcggtccagttatctactgtaagtatgtggtcagtgtattccccttttgtgattggtagatgagtcagtcttgtttgcgtagcagcattttctcagggttatgcagttgttgagaagaaagtagaacaaaaacagactgtaaataaaaaaatactgccttttttaaatgtaatcctcaagtgtaaacccccctgttgtgccattttgtagtagaaaaatgtctgccgaaatttgtggccgcaagaaataaaaaaaaaaaaaaaaaaaaaaaaaacgaagggcggccaaagactagaaagcncatcgaccagggaatt

SEQ ID NO: 4109 - DNA, 1421 bp, Zea mays
  Clone ID: TF_ZmC22395_16
ttgggaccctcgaggccggccggggtaattcaaaatttcttgctcacactgctgtctccgttccatcccctacgagatctgccccctcgccctcgccctgctccaatccccatctccttgcggcccgatccaccctgctccaatcccccggcgatggtcgtgtgcaaatgccgaaaggcgacgagggtttactgcttcgtccatcaggtccccgtctgtggcgtgtgcatatgcttcccggaacatcagctatgtgtggtgaagaactatgctgaatgggttgttaattctgagtatgactggccacaacactgttcgtcttgcaattctgttctcgaaggtggaactgaagaaacaacacgattgggttgcttgcatgtggtacacaccaaatgcttgatatcacatatccaaagttttcctacccaaacagcaccagatggatacgtctgcccctcctgttctgcacccatatggccaccttctagcattaaagatacaggttcgcgccttcacactgaactgaaagaagcgatagtccagactggaatggagaaaaatgtatttggaaatcattatgtgacaatagctaaagctgatactcagacacctcctgcttttgcatcagatcctctcaaaactttatccaatcgtgatgatagagaatttaatagtgcaaatgcagctaaagatgctgctttgccatcaacattacattctgggatgtactcttctgctgtaggatctgagacaactattcatgttgatccagaaattgttgaaatagagggttctagtcctgtatcgacccaattttcagtgcaggactccaacttcatcaggagtccaagcccacatgggcctggtgctatgacaagaaaggcgctaatactgttgatagacaaaattctgagatttcttattatgctgatgatgaagatggaaataggaaaaagtatactaaaaggggtacatttcgtcacaaatttctaaggatgctgctgccgttctggtccagtgcactgccaacgctaccagtcacagcaccatcaaaaaaagagagtgatgctctagaggggagtcgatcacgccatcagagatcatcaagaggtttagcaagtttcaagttgatgtcagattccatgaggtgcactgcaacaagtcatttgttcattcaattccatggttgcacagaaaagatgaggcgatgccaagaaaaagtcgatatgtctatgtgtttaagttaaagggccaaaatgtatttcttgtttggtatataacagccctacaacactttggtgaacttagttactgcagattaggtaattacagttgcaccttttgtattttatagcaaacccagaatttttcattggattctacgactgcccctcttgtagtgggaaaaaaaaaaaaaaaaa

SEQ ID NO: 4110 - DNA, 404 bp, Zea mays
  Clone ID: TF_ZmC89425_1
gaggcggcggacggggtgcggcggctgggcaactgcgcgcacgcgttccacgcgcgctgcatcgaccgctggatcgacctcgtacgggtaacgtgcccgctgtgccgctcccacctgctgccgcgccggcgcgccggcctgcttgccatggcacggcttggcgacggctagtatagtcgcccgtccgtccgtacctggttgtttccttgccacgtgacgtgcgtgcccgtgcccgtgtgcttggctttcaggcgcgcggcactggtgccggatgggggcggaccaaccgtgaactgatcgcgattaggacgatggactaaccaccaacctgatgttattaatgaatgggcgcaagttaaattaaccggaggaggttggcattaactacttgttgacgcgatacc

SEQ ID NO: 4111 - DNA, 281 bp, Zea mays
  Clone ID: TF_700381537H1
cagctcgatcattcctatacatagctatcattacggagaccagtatgatggctgtgtgagttccctgtatcaatgtgaggatgtggacaagctgcgggtactcccctgtggtcatggctaccacagccgctgcgtggactcctggctcactcagactcggaagacctgccccattggcaatcagcctgttcatcggggtcctggggactaatatcaagagggagaaactcaagggcgagtggagggtgatcaagtggacccgagggaccatccttcctcag

SEQ ID NO: 4112 - DNA, 280 bp, Zea mays
  Clone ID: TF_LIB3158-018-Q1-K1-F12
gagcacggcaattcgtgagggccctgcctcagtgccaacacatattccacgtgcggtgcatcgacagttggctcctccggcacgcgtcctgcccgctatgccgggccggtgttcacatagaccatatacatatgtaaatgaactcgcagggtggcacctggtgtattttcgtagcgaatacccgtgctcctgttggatatcacaagtatagctgtatacatagggtttttttgccagaattcagggagcttgttagtcggtccattttcctagatcgcga

SEQ ID NO: 4113 - DNA, 784 bp, Zea mays
  Clone ID: TF_ZmC435619_1
cattgggtacctcgaggccggccggggcgttcgagttcacgctaagcatcgtcatcgccccatcggtccgtcgttagtgcccctcgctccctcggaaaaccctctcctctcccctatcctctcgtctccccccaccccgccgcgatcaaccgagacccaccgccatggcgagcgacgacgaggaggcgtgcgactacttctacgacgacgacgacgacgccgaggaagacgccgccgccggactggaggaggactcttcgcttccaacgccggagggccgcgcggactactgggctatcacacaagataccgttttcgctgcacagaaacaagatctgtctacggtgatgaacttgctcaatataaatcaacatcaagcacgagccctcctcatccaccaccgatggagtatggatggcatctatgattctctagacatggggcgagaacgcatgctcagaaattcagggatcgtgctgcaggaggtcaacagcattgcagcagctggctcaatgacaccatggagaacagtgacctgcaaagtgtgttttgaggacttctccatggatgctgtttcgaccatggactgtgggcactgcttctgcaatgactgttggacggagtatttccacgctgcggtagagagcgggaaaaagcaaattcggtgcatggaggtcaagtgctcggctttctgcgatgaggacctcgtgcggtttctccttgtccaaaagtatccagacatggccaagaacttcaatcgcttcctgcttgggtcctaccttga

SEQ ID NO: 4114 - DNA, 431 bp, Zea mays
  Clone ID: TF_uC-zmflb73019d10b1
cggactcgttggtttttcgaaaagctttgaataaggcaaaccaatcaaatttgggtaaaaaagtcaaacgaattataaattaggacggagggagtaactattaacacctccacttgctaatggttagctggtctattaatatgcctgtttagatccccacttgctaattttagctgcaagctatcggcgctaaccgatggaaacaggctacgtatcctcatgggtctccaaatccaatacatgtccatgcaggtccgtgggctcccatgcgcgcacaatttccatgtggagtgcatcgaccagtggcttcggctgaatgtcaagtgcccaccgtgccggtgctccgtcttccccaacctggacctgagtgcgttgaacaatctttggtcgaccagcgagccggaccattcatcctgcagcgccagcaatgt

SEQ ID NO: 4115 - DNA, 415 bp, Zea mays
  unsure (1)..(415): unsure at all n locations
  Clone ID: TF_21210134
ccgagcgatcgatctttggcgcccatcaatctacaatctatgatccgatcccatctcagacgacgggagtcgctgttctcgttcgtgaatgtgcgcaggatttccaggtcggggagaaggtgcggacctgccggactgctggcacgtgttccacgtgccgtgcatcgacggctggctcatcaagcacggctcctgcccgctctgcaggaggaagctgtaggcggatcgaccggacgacgccatggacgatgttcttctctgcgatcgagccgatgatgtgtgtgtgtgtgcccccgccgccgccaccaccgatagctgctgctaggatcggaggagggaggagggagaagagactgacatctatagaacccttaatttatagagagggcttttgctttaaaaaaaaaaanaaaaa

SEQ ID NO: 4116 - DNA, 722 bp, Zea mays
  Clone ID: TF_ZmC11824_5
aaactgccactaagtttttaagttagtatataatgggtggctgttgttgctgttcgtcgagaacatctgaagccgatagagcaccaattgatatatataatacgatgaagaaaatccccgctctgtaactaagtgtgagcaccatttccatctttgctgcattcttgaatggatggagcgaaaagatacttgcccagtttgtgaccagacaattttggtggatgagatgtccgaatagacttggtaatcctggtggatcatcacttgaagctgtttgttactgaggaagtgcaggcaacaactactacactcttgatattcgtccattctgggtggctctcagagtaatgaattgatggggcaaaaattgaaaggatgaacgacatgaaatgtatttacgccccctcctttaccctgcattctgtgtcatgcttttgctgttcatagcaacaggtggactaggaaactgcttggttgaattatatatagagagagatatgtcggcttgcaggttgattcagttaaaagtgcaaaactatgccatttcgcttttctgaattcagagtttcagacatctgctggttcttccaggaatccagtcagctttttacatggtatattaggtggttgcaggtaaaaatggtctagatggaggtgggggtttctttgtataatccacatgctattcaagcttcctgtatataatatttcctgttttcttc

SEQ ID NO: 4117 - DNA, 641 bp, Zea mays
  Clone ID: TF_LIB3066-048-E2-R3A
aagcctttggcggactaccggtggtcccacgcgcggtgcacaaccacttgcacctgcgccctgtacggcgagcgccggtcgtgctgccgcgtggccgccgagtcctacgactaggagtcgtgcacgcggacccctgtgacacagcggaggccgacggagcacgtggagtgcgccagcagccaagcgtggatgcactctgagtggaatgcgtggcgacaggcggacatgacgcgaagcacctcggcggcgttgaaagcgcccaggcacaccgtagcactcagaggcgcggaccacgttgacgtcaccagagccgaaccggaccgtcggaagcgcgcccaccgtggagctgctgagcccacaccggcagcggtcgtacgaggagggcgcgaagccgaggcccaggccgtcgggccgctcgccggggccgcgctgcttgcagtgcttggcgtagatgaggaagaggaagagcgccagcagcacggccgtgagcacgcccatgatgactgccgcgtccactgccggcagcggcggcggtggcagcggcggtggtcccaccttcgtcggcggcgacggcgactgcatggcctggcgcgcaagcgctcgcagcggcgtcggcggggacgtcatcctgtctcgatcat

SEQ ID NO: 4118 - DNA, 619 bp, Zea mays
  Clone ID: TF_LIB3597-002-P1-K6-C5
gtcttcctgcccaaatcgttgccggctacgccggtgcctcaatctacttggggccgttcacccggcgacaagcacacaggcttgggtaaccaccaacaaattaaaattgtcagccaacgtccgtgaatcaaccagcggtggcagcaccaacaatacagctcgtgttcgctgtggaggtgggagatgctttgatctgcctcaagagccaatagtgcctttatgtggacacctattttgttggccatgcatttaccggtggctgcacatccatactcattcaccagagagcccagtgagcacagatcttgtggaggaagacacgcttgttccactttatggtacgcggaaaggatcgtgttgactcaaggtacaaagaacatgcccattggtgagattaataaccgcccaactggtcagaggcctgacctagccccccaggccgttgctacacaacaactttgtcactgccaagttcaatgcgactccaggttgattggcacacgcatgcatttggctaatgcgcgctggcgaaactacgcattctgagctgctgtctggggactatatcctatgcttagcttccaagacatgtgtttccacatactgctacttatgcgca

SEQ ID NO: 4119 - DNA, 474 bp, Zea mays
  Clone ID: TF_3340896
ttttttttttttttttacaatgcaactaataatatattcctgattttttttttttttttacaatgcaactaataatatattcctgagacagcactttgagtaactttgataaataactgactctatcagcacatttttttggatacaaaaatttacactcatcaaggcctggagttacattagcaacggaacagaagttgaaacagattggcattgtcaagcggactgcattcatacggaacagaagttgaaacagattggcattgtcaagcggactgcattcataagggggcatgttgcattgatgtgaagccacttatcgatacaggtgcagtggaaatggtgcccacaggggagttcgcgcaactctgcactgtcatcgtaagccgatacgaaatacaacactctgcatcttcagctgcaagcactttctcaataggttgattggtgccacactctatcattattccacca

SEQ ID NO: 4120 - DNA, 840 bp, Zea mays
  Clone ID: TF_ZmC6478_1
ggggccgcccctgcccggagcccatcttcactccctcccgatgccctaacccatggttacgactccgacgacgcgaccccggcggcctgctgcccagctccctctgccttcgcgccgtgcctcctaccctcctgaatccgcgccgtgccacccgagtccaggcccccccagggtgcgagggcggcaccggcgcaggcgaaccgcagtccgcgcctccgcactccgccccatccgaagctccgagcacagcaggagcagcaaagcaagcgagcgtcagactggctgaatcgagaggtggaggcagcaaccaacaaggtagcactatgaaggtcaagattcttcagtggcatgcagtggcttcttggacgtgggatgcacaggatgagacatgtggcatatgcaggatggcttttgatggctgctgtcctgactgtaagttccctggtgatgattgcccactcatttggggtgtctgcaaccatgcttatcatcttcactgcatactgaagtgggtcaattctcaaacatccacacccctttgccccatgtgccgtagagagtggcagtttaagggctaaggtactatggacatctagaactgcaccaagcgactctcagttctcagagaagactgatgtttttctggtacttctgtgatgctttattttaactactacatattgttttccgtatctagtataaatcctgatgtcagcgcctgatcctgtgtatgcttccgagcttgtagtggaacaaatgaaattattgcttttcttagggctgatttcctaatcttatcccatattggtttgttcgaaaaaaaaaaaaaaaaaagcggcc

SEQ ID NO: 4121 - DNA, 341 bp, Zea mays
  Clone ID: TF_LIB3206-072-P1-N1-G5
ggggattgcaggatcaattcgatccatgggcatgaacgttgaatggtactagtacatgtgttatgttgaatctggttctgaggcgaaacaagaaacagagatctcatctatacaccgatcgaatgcttgttttctctaatcgatcatcgacccgtcaccgatgaacgcgaaaacgtggcggaatgcaacgcatggcgctgcgggggggtgtcagaagaggttgaggacctcgcggatggtggcgttgcaaagcgggcagcgcccgcggccggtgcggagctcgcgcgcgcaagcgcggcaaaaggtgtggccgcaagggatgaaggccccgccctttgccc

SEQ ID NO: 4122 - DNA, 532 bp, Zea mays
  Clone ID: TF_ZmC240975_1
gtacaagtatattacattgtttacaacatttaccctatacatatttacatccacatagtgtgtgagacaatgtgagccacgtactgtatctgtacatgcgtgcccaagacgtagaaaaaagaagaaaaaaataatcaaggtatgcaagaaagaaccaggtgtcctgcactcctactaccctacaatactctgctcctggtctgggacacgtgtgcacgcgcatcggctcacggttgcccaaagacatcctaacgaaaagtgtgcgcaccggcttagaccgcgcccacgcgtccggagcagccagacgtcgatgcacggcaggtggaacgtgtgcccgcactccggcaagctccgcgccgtctcgcctgcctcgaagtcctgcaaaatcaaaccaccgaccgggtcgatgtcgaccatcaaaaactgtgcagaaacgacacgaaaatcggccatgcacagcctgcactcgctgcaagcatgcgcggcggcggggatctataggtagctgacctgaaggcagacggagcagccg

SEQ ID NO: 4123 - DNA, 819 bp, Zea mays
  unsure (1)..(819): unsure at all n locations
  Clone ID: TF_LIB4758-090-R1-K1-B1
cctcgaggccggccgggattctcctcttcttcagactagtcgcgggctcgcggtcgcggccgaggatatcgaagctgcgagcaacgcgatcgagcgcgacgcgggtgagacccgagagagccgtgagggagccagggagggaaccccgaacccccgtcgtcgtctcgtgctcggtctctccggctggcggcatggagagtgccgtgctcgcctgcgaggcgccaaccgccgccgccgccgccgccgccgtctcctccgcgacgccgccaccatcaccgagtgtctccacaccttttgcaggaagtgcatatcagaggagtttgtaaataaggaagtgtgctgctgccctgtttgtagcattgacttgggctgtgctccactggagaaactcagaattgatcatagcctacagtatgtaaggtcaaaggtatttccttctaaaaaacgaaaggttgaggatccagaagtcacatcgccaattacatcacctataaagacgaaagtacggtctttatcttctttgacaaaacatgctcctcaaatgtctatgcaaaaatgcttgagaaagaggagaacaaaagcttcatgcttacaaaacctccctttgcactcaaccttgcggngcagtagtaatatcacaaaaaaatctggnngggtggagacctttagggtgtcactttcgagcagctaaaaaagaaaggtctcttagacnctaatcagacgatataaagacagctggaaaaaggactgatgatccagntgatgtaactcttgccagtncagcaaagactangaagcagattaccagacgtggaaatc

SEQ ID NO: 4124 - DNA, 1274 bp, Zea mays
  Clone ID: TF_ZmC21544_5
gggtacctcgaggccggccgggccgatacccaaccacagcgaccgaacaaacaacatgtatgatttcacaagccgcccgctgaaaccaaagccttttgccctgtcgtcaggggcgaggtttcatcaacctcagtacctcaccctcctctcccggagagcctctcgcctccgctccgctcctctgccctgccctgcccttccccgccacaccaaccaaggcgccaaaaataaacgccgcgccactgcgtggcgagggagcctgtcacattgcttgccgctgccctgccgcctcgtcttcgcggagaggcctcgtcgcgcgacgatatggagctcgccgaggcgccggcgcccgtgcccgacgaggacgggctggacgaacgcggcgtcgcgctgcacctcccgaggctgctggccggcgtcgtctccggcgccctcactggcctcttcgctctcgctggagctctgaccggggcagtcaccggcgcggtggcgggcagggcttccgacagcggcggcgtcctgcggggagctggactgggggcggtcgccggagctgtcctctccattgaggtccttgaggcttctcgcgcttactggtgctcgtcggaccggctgggctcgcacggcggagcatcgtccatggctgatttcattgagcagcttcttcgtgcccggtttgtgcaagagcaatttactgcttcaggatacgcatcatatcgctggcagctcagcatatcatattttggtcaggatgacctatacaacatctttggggacatttcatctgaagcgctctcgcaagagtcactgaagtaactaccacatcatatgaatgcatggttggagtgcaatgacagatttcataccgaaatttgtttgctactaaatgcagcgtctggccttggctggcaccttttttcttcttcttcttctaataattataaacaacgccgacggccgacctaatggctagcgtccttcgtcttgccgcaggacattgtggccggtaagacagcaagaaggctgcccggttgttttcacgccttccaccagccttgggtggacaaatggctcgtcggccatggctcgtgccccgtttgcaggcaacgcgtgtaaaaaatatataggcgacctgtgtctgtgtacgtagataaacgtggagtgaagagaaacgaccgtgcgcatctggcaatctcacttcgtttcttgcaccccggttccaacatgtaatggcaatggaataagattgctgtcggagcagttcctgtttctgt

SEQ ID NO: 4125 - DNA, 569 bp, Zea mays
  Clone ID: TF_LIB4605-011-R1-K1-H12
gggcttccccgacaaaggcagccgcgtcgcatccccttcgcctagttccttgctcggggcgccccaacttcgctgccggccgccgccgcattcccctcggctactcgctcctcgccgctccccggcgatgtctggcgggaacgcgaggtcgccactgccttcgcacggatagggatccgagactagcggcatggcgaatcgcgccgacgagcgggggggggggaccaacagcgatggcggcggcggcggcagcaaggacgctggcagcttcaagtgcaacatctgcctggacctggcacaggaccccgtcatcaccctatgcggccacctcttcagctggccctacctctacgagaggctccacgctcacgcacactataaagagtgtgccgtcagcaagggcgacgtccaggaggggaaactagcccacctgtacggacggaccggaagctgcgccgtaccccgcgcaaggtcaggggccacagtggaaatcccaatcaggccaaccgagcagagcgcctccactgccctgctgccggaccacaacaaccattaccctcaccagaacc

SEQ ID NO: 4126 - DNA, 1122 bp, Zea mays
  Clone ID: TF_UC-ZMROTEOSINTE105E03_FLI
aagagtaatattttcctcttttttagagtattagatgcagcgctaaaaggaacagagtccatagtgagcattttgtagtcctatgaaacccaaaacagcaaagcttgttgagacaatgcaaacatgaatgagcaggggtaggcacatttgacattgctaggtagacctgctggcgttcttctgtgagttctattgtagataaattatgttgtgcatcttaatggcacttccatagtattttctatgttcactttcatatgtaaggtttcttctaactatagtatttccttctatgtagtatactgcaacattccagaggcttgagtctaggccaaacaacccagctcaaggggttgctccactgggatccactaatccaagtgtcaacataaatgacaattcactcaatcttgtttctagaccacctccatatgataccgatcctagatatgcccgtgttcaaagagagggattagtctccaggcgtgagaaatccataaatcttgcacaagaagagtcactggcccttagacgaaatgccagcagctctggtattgaacatttagctgctcagaagaaacgcaacagcactgaaaatgagggtgaatataaggtccatcgttctgaatcaactaagagtttgtctgcaaaagcttatagtagcagctatgctgttgtcgcttcagaagatgaggatgtctgccctacttgcctggaagaatacacgccagacaatccaaaaataataaccaagtgctgtcaccattttcatcttggttgtatttatgaatggatggagagaagtgatacatgcccaatttgtggtaaggaaatggagttttgcgagagcccatgatagcctttcggtttacatgatctcacatgaagtctgagctgcaggaaacggggttctgtgagaaccaatgatagcctttctatttacatgatctcagatgggagcaagggaaacattctacagagtacaacagaatgctggagaattgtaaataatagttccttatgcatgcgatgtccaaatagatctctttctcgagatcagtttcttacatgtactgagatggttatctgtcttactaaattcatgctagaatttgcttggcc

SEQ ID NO: 4127 - DNA, 1483 bp, Zea mays
  Clone ID: TF_ZmC4212_1
gggaccctcgaggccggccgggctccgtttctccgctccccccaaccgctctcccgccccccccatcggtccccaccgctccgccaggctcagtgtctccgcttctcgccgctttcccctcctccgcctgggcgcggcgcccgcccgcccctcccgatcccgtggacgtcctcgcaggcggcgtgttgcacgagagcttagggaatgttttaccagtattgttcatggtaaactcagagtttctatcaactgcccgggaaagtgaacttgtttccactccatctttagtgtcaaaaccaatttcttctacaggggcaacggaactacttcgaagtgaattatgggtgggttctgctgctgcctcagtgctgaagaatttgatgaatatgtctatccaaacaaccctatctataggcaatgcgtatccttgaggcatcttttccacagcatttttggcgggtatactgcaacattccagaggcttgagtctaggccaaacaacccagctcaaggggttgctccactgggatccactaatccaagtgtcaacataaatgacaattcactcaatcttgtttctagaccacctccatatgataccgatcctagatatgcccgtgttcaaagagagggattagtctccaggcgtgagaaatccataaatcttgcacaagaagagtcactggcccttagacgaaatgccagcagctctggtattgaacatttagctgctcagaagaaacgcaacagcactgaaaatgagggtgaatataaggtccatcgttctgaatcaactaagagtttgtctgcaaaagcttatagtagcagctatgctgttgtcgcttcagaagatgaggatgtctgccctacttgcctggaagaatacacgccagacaatccaaaaataataaccaagtgctgtcaccattttcatcttggttgtatttatgaatggatggagagaagtgatacatgcccaatttgtggtaaggaaatggagttttgcgagagcccatgatagcctttcggtttacatgatctcacatgaagtctgagctgcaggaaatggggttctgtgagaaccaatgatagcctttcgatttacatgatctcagatgggagcaagggaaacattctacagagtacaacagaatgctggagaattgtaaataatagttccttatgcatgcgatgtccaaatagatctctttctcgagatcagtttcttacatgtactgagatggttatctgtcttactaaattcatgctagaatttgcttggccagtttttgttatatttgcaaatggtagctcatagatggaagcacaactcatggatgaaagaatatattaacctgagctgtgcttccatctatgagttgtgcttccatctatggaacacaactcaggttaatatattctttcatagatggaagcacaactcatggatgaaagcttacagcaaccctttgttggtgctgca

SEQ ID NO: 4128 - DNA, 491 bp, Zea mays
  unsure (1)..(491): unsure at all n locations
  Clone ID: TF_jC-zmXLIB3526060ac08b1
atcaggttgtatgctcattgtgtggcactgaacaggaggtgtgtgaccgaacctttactaatgatcttttaccagacattatatgtgtttcacctgtatcatcatggttccttgtccgttggcaggtgcgacaagtatgtatcaattgcggtgtttgcatggggaaatacttctgtggtttgtgcaaactcttcgacgatgatgtctctaaacagcagtatcactgcaacggatgtggaatatgtagaatcggagggagggagaatttcttccactgttcanaatgtggatgttgctattcaattgcgctgaagaatagtcatgcatgtgttgaaggggcgatgcatcatgactgtncaatctgcttcgagtacttgttcgattcgacanatgatgtttccgtcctgccttgtggtcataccattcatgtaaagtgcctgaaagaaatggaagagcacntgcagtttgcttgccccctttgctccaagtcg

SEQ ID NO: 4129 - DNA, 742 bp, Zea mays
  Clone ID: TF_ZmC213505_1
cggtgagctcagtatccgcccaggcccgcgagcagcagcagctcgtgcggccgcagcagcgtcgggagcagcgtcggggagggcacgggcgcgccgaggtaggagaagtccaggtcggaggcgtcggcgggccagagcgcgccggggacgagcggcgcgcggcagagcgggcaggtgcgctggtcgtgctccatccagcggtcgaggcaggcgcggtggaaggcgtggcggcagttgccgagccgccgcacctcgtcgccgccgccgatgccgccgaggcacaccgcgcagtccccgccgacgacgcgcgcctccagctcgtcgaaccgcgccacggggagggcctcctcgatgaccatcgccggcatggccgtccggaactccgcccgccggtgctgctgcggctgcggctgctgcggcggcggcggcgcctggtggtcgtccccgagatccagcaggtcgccgaggcccacggcgtcgaacgcccagaggaggaagcggcggacgtaccccagcagcagcaggaggtggagcagctgcttcgggagcaccagctccgagtagcccgccgggaaacccatgcgtggccgtgcctcttggcttgcggtggtggtggtgtaaggggaaggtggggtggggtggggtggtgaagcgacgtgcctggcccggtgcttcctgcagatatggcgcttggcgatgcgtggtggacggcaaaaagggagcggacgctaggtcgacccgg

SEQ ID NO: 4130 - DNA, 866 bp, Zea mays
  Clone ID: TF_ZmC195726_1
cattgggtacctcgaggccggccgggggcttccttctataaacctttcttccgctttcctcatttgcgaccttcttctttgctggcattttcctcttccatctttcatatctctctcgtttatttgcgcgactctttttcttggagacatttgtgatcttttccttcagaattcgatttgcattaagatcatcttcttgttgcgaagccgtcttggagatttcgtaaattaaagcggtttttacctttggtggtttatgcgcaccattggctgccgctctcttgcgtttgggttgtgcagtaccagcatctcgtcggcgcagaagccatcatgtcgacggccgggagcggcagccttcgcccggcggtggtggaggacacgggcagacactgggcgccgcacggacctgtgctgacggcctgcgtcgtggccatcaacgtgctcatgatcctcctcgtcttcgtcttcttctggcgctacttctccggtaaacggggaccatccgcgtcatccggcggcggcggcgacggcgacgacgacgacgcgtcgtcatccgcgtcgctgcccgtggcctctccatgggcatggtcgtcccgccggcggagcagcaaggaccacggcccgcagccggtggacgacgacgtggcgtcggcgctgcccgtgtacttgtactccagtagcgccggcggcgaaggcgggaaggccccggagtgcgcggtgtgcatcctggagctccgcgacggcgactcggcgcgcctcctcccgcgctgcgggcaccggttccacgccgactgcgtgggcgcgtggctgcggctccacaccacgtgcccgctttgccgcgccagcgtcgtggcgcccagagcggt

SEQ ID NO: 4131 - DNA, 1806 bp, Zea mays
  Clone ID: TF_ZmC22619_1
ccggccggacctcgagaaacattgttgcttccccactcctgtagtaccgccgccgtgttccggtgatccgccatccgcctccgttcgccgtcccccgcttgtcccgttagtggttttcgtccttctggttcactcgccggcggactacatgctgatcgacgggatgaggtccgtggtcgcgacggtgagcggttaccacggcgacgagcggcataggcttgtaaacctcattgcggagaccggtgctagctacgtaggatccatgagcagatccatcacccacctggtgtgctggaggctcgaggggaagaagtacgacatcgcgaggaggctggggacacgcgttgtgagccactggtggttcacggagtgtctcagggaggggaggcgcctcccagaggacccctactttatgtggtgaagaagcagggccagtcccagagctgccttctcgttcccgtaaacaagtcaagaaaaatgccatcatggaggacagagttttccaagagttacctgatgatttctgggacactcctcgagctagagccagctataaagttaagcttgatgattctgattttgagtctgccctgctagaacaaacgttaagaaaaggagaaagcgtatgaagcatgtcaatacatcaacggacagagatgtcttaaaccttcaggataatgtgtcaagtgtcatggcaagacagtgccttcatatctcaagtcatagaacgtcccagagcacatcaaagcataagggaaacttgtcacgcttgcttcacaatgaagttcctatccggatgggagaaaggaacaatcttactgaaaactctgaaaatgatagtttgtctgacagcttcagtgaacctcagacttcagatactctgtgtatagaagctcaaagaaaatcaagtgcaccatcatcatcacttagacgaagtaccctagattctctatatgaatttggtgaaactagtaggcatgaaccagcaggaagaacaaaactagacaacgttgaattaagggagacttcaagaagcttacttccatttgatttgtcaggacaggaaccagctttctgtactcaggagcaagtagataaatgtagccttggcactctagctgataacaaacccatggaaaaatcatctaatatggaaaggcaaccggaattatcatgtgtcatatgctggacagatttttcttctacaaggggcatcttaccatgtggacatcgattctgttattcatgcattcaaggatgggtggattgtctggcttctaggggtaaagtctcaacatgtcccctttgcaaagccagtttcacatggatcagtaaggtggacgaggcaggcacctcagatcagaagatatactcgcagaccattccctgtgaagcttctactgatgtttttgtgccgggcaatgtaggctacgatttctctcgaccaacgtctgggcaaggagcatgctaccagtgtcacttccgtgagcccgaggagcttcttctaagctgccacgtctgcagatcacagtgggtacactcgtactgccttgatcctccgctgactccttggacatgcatgcactgcagagacctgcgtatgctgtttcaccggtatcgttagccccagttatggtactcatgtcaaaccttaattgttggaggaaattgtatcagaaggcatgaacaccatttgattactgagatgtaactgccaagttccatttgatgtctatactctaacattgattactgagggtcgatgtgagttttttttatcgcaaaaaaaaaaaaaaaaaagcggcc

SEQ ID NO: 4132 - DNA, 1114 bp, Zea mays
  Clone ID: TF_ZmC11815_9
gacttacccccatatcctctccagctttccgctctgcccttgtcgctcgtccagccaccgtgcccgtgcccgtgccgccgagaattctatccagaagcaagcaacaagagcccacccccgcttcgcgcgcgctttcgtgccaggcagacacagagcacagctatctgctcgtgtcccggtccgtccaactcgctcgctcgctcaatccactgatgatggggatcccgctggtgtgctactgcctcgccgtgcccaagccggtcatcgccttctgcaggctgctcagcgccgtcagggacgccgccctgctgatgctggccgtggtggggctgtgccgcttcccgcccgacggcgcggcggacgccggccaccagcccggcgaggtgaaggcccggctccccgccgtggagtacggccagctcctggccgagcacgacgagcagcagcagtccggcgaccacgactgcgacggggacgccgcgtcgtcggattgcatcgtgtgcctcgagacgctggaggcggcggaccaggtgcggcggctgggcaactgcgcgcacgccttccaccgcgcctgcatcgaccgctggatcgacctcggccgcgcgacctgcccgctctgccgctccgacctcctgccgcgcgggccgggctgggccagccggctcggcctgggccggctcacgcgcgttcggtgaggaggaccgtcttccagggcagttttgtctattggatgatggggcgcggacaggttagcgacggcgatcgcccgggtggtataacaacagctgctctgcctgccatcagccaaccgctaatctacggggggcttcattagtacgtaaaaggcgcctcacacttggtatacgtaaaagatatactagttattaatacgttaaaggattgagtatacggcacctagatgtttcatttgtacacgattttcattctcttctcgaccatatattaatagtaattaaattagttcgtcaacttattgtgcaacttggtgagcttagcagcagcaagtttgcgcaactggcagtgatgaataatttagcaaccaacttgaatcctctcaaaaaaaaaaaccaaaaaaaaaaaaaaaaaagcggcc

SEQ ID NO: 4133 - DNA, 921 bp, Zea mays
  Clone ID: TF_ZmC7432_2
ccttcgacccccctaacccaaccaagcccgaactctcgagatacaggacgcggatccaaaccagaggcccctgcctgccctcccccaccacaccacagcctaccgccatgtcggcgcccgctacggacgaggccgcggtggaggcgcgcctccaggagctgcgggggaggctcgggaagaagcagcacttcgaggaggccgtaaacgagctcgccgccgccgtccgggaccgctacgccggcgcctctccagccctccacctccagcatggcttgttgcccagaatttaacgagggaattgagcatactaactgaatcctctggtgatcaagatgggagcaacaacagaacagtgcctagagccgaggagattacacctgctataatgaacctcctagaaaccatatcaggcgacagggatctagaaactgctttggaagaatcactgcagggaatcattgagcatccacagagggcacccccggcttcaaaggaagttgtcgccaatcttcctgtcattgctgttaccgaggaagtcatgtctagattgggtagtgagacggagtgtgctgtctgccgcgaaaacttggttgtggatgacaagatgcaggagcttccctgcaagcatctcttccatcctctttgtctgaagccatggctggacgagaacaactcctgccctatctgccggcatgagctgaggacggatgaccatgtgtatgagagcaggaaggagcgtgaaagggaagaggaagaagatagaaggggtgcggcaaatgctgttaggggtggagaattcatttatatctgaactcaacagttccagaatgtaatccctttgatgaacttcgtgattaccatgttgacatatatatatacctagttacttatgcttgagttaaatatcttgcggtctttttt

SEQ ID NO: 4134 - DNA, 706 bp, Zea mays
  Clone ID: TF_LIB5074-010-R1-XP1-A11
gccggccgggtccggaatgcacccgacctcgcgccctccacggcggagccgcgtcgtccccaaggccaggcgcggcgagcgccccggtgcggccgccgccgcgggagccgttccctatgctgctgcccgtgttcatcctcttcgtgctcctcctctgcttcctctccatcttcctcctgcgcgacctcctccacttcctctccctctggctgcgccgccggcgccgcctccgcgccgatgcggacgccgcgtccgacgccacgccggacacgcacgcgtcgcacaagccggccggtctggaccccgcggtcctcgccacgttccccacggtgcggtggttcgaggagacgcatcggcccgcgtcggggcaggccgagtgcgcggtctgcctgtcggagttcgccgcgggcgacgcggtccgcctgctcaccgtctgccgccacgcgttccacacggcgtgcatcgactcgtggctcggcgcacacaccacgtgccccgtgtgccgctccgaactggacgcgccggctgccacgccccgctacggcggcggtggacgcatcgcgatcctggtagacgatcagggagacggcagcgcggcggtggcggacaccgaccatgcggaatcatccccggcgaaacgttggcgtgcaatcgcgcccctgaccgatgacatacatattgtcccaaaatcgccgagtgccagacg

SEQ ID NO: 4135 - DNA, 2164 bp, Zea mays
  Clone ID: TF_ZmC4578_2
tcgaggccggccggggtctttctccccaccctgtccgtccccgaaaagctcatcgtgcttataaatacaggacccacccgtatcggcgggcgcttccgaatttccgatcgagctccagcccccaccggataccaccgcctccaccaaccgattccgttccgtccccccggccccgacctcgtcaccaccggtcacgctcgagcgggaggcttctctcgccacccaccagcggattcctacagctcccgcgccgatcgcgtcgcggacccgtccggagggagaggtgatgataaaggatatttgctgaccaaacttgcagtatttctccttaaggaaatagaaattggcgtcatgtcatatagaaatatgctctggacacatcagtccgttaatcctgaatgggagcaaggacatgtccaagtccaaccaagaagttcctattatgcaggcactgtaagtgattcatccaacctgggcatgcaagttgctgttggtgttccagtaaatactgttaatgttggtatatgtgatctgtggaatcatgagcgcctgcctgttcataattcatacccacatgccagtgttacatcgagatttgtcctcccaactagtatgtacaacccttgcatgccagcagcagctgtcaacatatatattcctcagactcaaagctttggactgggcaatgtgctaccaccatctttacatagtcaagtttccacaggaactattgatgagaataacagcagtttcaattttggtgatagtgccattggatccatgaaaaggaaaaccgcagtagttgccggaaaccatcacattcttcatggatttgctggctcaagttcatctgttcatgtccctcagaatcctgtgtatgggccatggaatgcttcatctcaatcaaattgtttacccagttctgcagcttcaaacctaccagaataccacaatagtaatgggtggccgttcttagaagaatcttctgcaaatgcttcaaacagtttcacttcagtggatgcttgtccagagttggtacctcatggtaacaatttatatccagcttgtcacataatacagtgcaatacatgggttccacagactgcaagtcatggaataccacagtggggatatggtaatgtcatggtcaatcctccaggaaccgtagacatgccgaatggaaatattcaggattatcaagctgggcattcttctattcatgggccactacctcatttctgccagattcctttgcgtagtatgcaagtacctcaaatacaagtaccccatcaacagttcatcggtaacaatgtggtgcatggtttaaatccttcagccgcaggccttccgttagatccaagaatgctggctttcccattcaatgatgagcacacttttgggcatcaagtgcatccacctctgataaaccaagccaacaatggggctttaagaattctgccatatcagaatgctacagtgatggatcattcaaggatttatgaagcaggacatgttattgatgaacatagagatatgcgtttagatgtggataacatgacttatgaggagcttgtagcattgcaagagcagataggtgatgtcaatactggtttgacagaaagctatatccaagaaaacttgaggtccacttttcatgttccaggagcagctagcatttctgatcatttctgtgagctttcgttagagaacgatgcttgcataatatgccaggaggagtatgaagctagagaacttataggagcccttgaatgtggtcacaagtaccatgaggattgcataaagcaatggttgatggtgaaaaacgtgtgccccatctgcaagacaacagctttgtcatcagatagaaggaatggatgatcttcgccagtaacattattggttatttaccgcgtggcaagttagcgcgattttgtatatagacagggttgcctttatttgccgtcccccttcgctgtggacataaactgtacagatattattttgtaggatattttagacgttaaatggcaccatggtgtgtaaggctcccatggttgccttggtagatcctcccttcctttacattgtatttatctttactcttcaaaaaagaagcccgaaaacatgtatattttggaagtgaaagaaccgattttttttcttc

SEQ ID NO: 4136 - DNA, 628 bp, Zea mays
  Clone ID: TF_LIB4740-104-A1-K1-A8
cattgggacctcgagccggccgggaatcccttcccggcagtcgcatcgcatcgtatcgcatcccctccgcctcgttccttgctcggctcgccccaacttcgctgccggccgccgccgcattcccctcggctactcgctcctcgtcgctccccggtgatgtctggcggtaacgcgtggtcgccactgccttcgcacggatttggatccgagtctagcggcatggcgaatcgcgccggcgagcctgtggcgaggaccaacagcgatggcggcggcggcggcagcaaggactcgggcagcttcgagtgcaacatctgcctggacctggcgcaggaccccgtcgtcaccctatgcggccacctcttctgctggccctgcctctacgagtggctccacgttcacgcgcactctcaggagtgccccgtctgcaaggccgtcgtcgaggaggggaaactcgtccccctctacggccgtggtggcagctccgccgtaccccgtgcaaggtcggtggccggtgtggaaatcccgagcaggccgaccgggcagcggccctccactgccccgcagccggatcacaataaccattacccgcacccgaacccctgggtccatggtgctggcgccccccctg

SEQ ID NO: 4137 - DNA, 537 bp, Zea mays
  Clone ID: TF_LIB4826-003-R1-N1-E5
ccggccgggttccccggcagacggcagtcgcatcgcatgccctccgccttgttccttgctcggctcgccccaacttcgctgccggcggcagcaaggactcgggcagcttcgagtgcaacatctgcctggacctggcgcaggaccccgtcgtcaccctatgcggccacctcttctgctggccctgcctctacgagtggctccacgtccacgcgcactctcaggagtgccccgtctgcaaggccgacgacgaggaggggaaactcgtccccctctacggctcgtggtggcagctacgccgcaccccgtgcaaggtcggaggccggtgtggaaatcccgaacaggccgaccgggcagcggccctccactgccccgcagccggaccacaataaccattacccgcaccacaacccctgggtcaatggtgctggcgccgcccctgtggctaatggtaggagggggagttaccctttatcggccgccatcggagggctgatcccgttgatgagcttccgggggccgggattcccgcaagcgact

SEQ ID NO: 4138 - DNA, 663 bp, Zea mays
  unsure (1)..(663): unsure at all n locations
  Clone ID: TF_LIB4828-091-A1-N1-E3
ctcgaggccggccggagacggcagtcgcatcgcatcccctccgcctcgttccttgctcggctcgccccaacttcgctgccggcggcggcagcaaggactcgggcagcttcgagtgcaacatctgcctggacctggcgcaggaccccgtggtcaccctatgcggccacctcttctgctggccctgcctctacgagtggctccacgttcacgcgcactctcaggagtgccccgtctgcaaggccgtcgtcgaggaggggaaactcgtccccctctacggccgtggtggcagctccgccgtaccccgtgcaaggtcggtggccggtgtggaaatcccgagcaggccgaccgggcagcggccctccactgccccgcagccggaccacaataaccattacccgcaccagaacccctggttcaatggtgctggcgccccccctgtggctaatggtaggtgggggagttacactttctcggccgccatcggagggctgttcccgttgctgagcttccaggtgcacggattcccgcaggcgactgcctatgggcctgctgcagggtttccttatgggtacggncattctttccatgggtggcatggccatggcttcccgcgccaggcacacaaggccagcaagtcgatgcgtacttggaagtgctgctgct

SEQ ID NO: 4139 - DNA, 1838 bp, Zea mays
  Clone ID: TF_ZmC4170_1
gtcgtgtccgttcgcgatcgggcaaatctgcaaccctttcctcttcgtccccccgctcggtcggtgccccaagccggagtacggagtacggcaatcgcacccccgtcgtcccgttccttgctcgccgtgttggggtccggacgcgtggggaagtcccaatttccccttcgcctttgtcttcccgctcccgtcccgaaatccgcccgccgattaagcttgcttgccctagcagatcgaagcactagccctagccctagccgaggagcgcgcccatggccgccgcggtcgtgggctgaggggccgcggctctttgcatggggtgaggaagcggcgtcccgaggcgcgggaatggaccctagcctgaaggaggaggtgatgaaggcggtggaggaggcgaggtccgcgtcggtgccgcggtgccgggtggtgcgcatcatcgtgcacgacgaggacgccaccgactcgtcctccagcgaggacgaggacgaggacgaggcgggggagcgcgcctcgccgcatccgggctcgccgtcggcgtcggcgtcggcggggagcgtgaagcgcagccgcgtgctgctccagtccgccgggtgcggcgcggaggaggacgaggaggaggaggaggagggggaggggccgggcgggttagcggctcggggtcgggggtggcggcccggccttccccggcagacggcagtcgcatcgcatcccctccgcctcgttccttgctcggctcgccccaacttcgctgccggccgccgccgcattcccctcggctactcgctcctcgtcgctccccggtgatgtctggcggtaacgcgtggtcgccactgccttcgcacggatttggatccgagtctagcggcatggcgaatcgcgccggcgagcctgtggcgaggaccaacagcgatggcggcggcggcggcagcaaggactcgggcagcttcgagtgcaacatctgcctggacctggcgcaggaccccgtcgtcaccctatgcggccacctcttctgctggccctgcctctacgagtggctccacgttcacgcgcactctcaggagtgccccgtctgcaaggccgtcgtcgaggaggggaaactcgtccccctctacggccgtggtggcagctccgccgtaccccgtgcaaggtcggtggccggtgtggaaatcccgagcaggccgaccgggcagcggccctccactgccccgcagccggaccacaataaccattacccgcaccagaacccctggttcaatggtgctggcgccccccctgtggctaatggtaggtgggggagttacactttctcggccgccatcggagggctgttcccgttgctgagcttccaggtgcacggattcccgcaggcgactgcctatgggcctgctgcagggtttccttatgggtacggccattctttccatgggtggcatggccatggcttcccgcgccaggcaccacaaggccagcaggtcgatgcgtacttgaaggtgctgctgctggcagttggtgtgcttgtaattgccagcctaatcgcattttagattatgtatggctggcgatgtcgctgatccttgttggtgtgtaccgtagttctagcatcattgcatcttagatggctcccaaagtttgatgtcaatgtgtagagtattgtggatgcttcggctagtaatagtacttgtgataattggtggcagctgttattcattgtgtaaagttgctatcgaaaattataggtgcatctgttgtgttcatgccttgaactttggtcatgttcatatttcttcaatgaagtttccctggaatgttctgttaaaaaaaaaaaaaaaaaagcggcc

SEQ ID NO: 4140 - DNA, 1251 bp, Zea mays
  Clone ID: TF_ZmC4170_2
tggggcctccggccgggaggtttacgggtcaccagtctcgtcgtgtccgttcgcgatcgggcaaacctgcaaccctttcctcttcgtccccccgctatctcgttgccccaagccggagtacggagtacggcagtcgcacccccgtcgtcccgttccttgctcgccccaacttcgccgccgcatccccctcggctgctcgctcctcgtctgcccctagtgatgtctggtggtaacgcgtggtcgccgctcccttcgcacggatttgaatccgactccggcggcatggggagccgcgcaggcgagcctgtggcgaggaccaacagcggcggcggcagcagcagcaaggattcgggcagcttcgagtgcaacatctgtctggacctggcgcaggatcccgtggtcaccctctgcggccacctcttctgctggccatgcctctacgagtggctccacgtgcacgcgcactcccaggagtgtcccgtctgcaaggccgtcgtcgaggaggggaagctcgtccctctctacggccgtggtggcaactccacctcaccccgtgcaaggtcggtggccggtgtggaaatcccgagcaggccgaccgggcagcggccctccactgccccgcagccagaccacagtaatcattacccgccccagaacccctggttcatgggcgctggcgccccccctgtggctggtggtcggtgggggaattacactttctcggcggccattggagggttgttcccgttgctgagcttccaggtgcatggattcccgcaggtgtctgcctatgggcctgctgcagggtttccctatggatacggccattctttccatgggtggcatggacatggctatggcttcccgcgccaggcaccacaaggccagcaggttgatgcgtacttaaaggtgcttctactggtagttggtgtgcttgtaattgccagcctgatcgcattttaaattatgtaaggctggcgatattgctgatccgttggtgtgtaccatagttctagcatcattgcatcttagatagctcccaaagtttgatgtcagcgtggagataagtagacaagttgtgataattggtggcagctggtattcattgtgtaaagttgctatcgaaaattataggtgcatttgttgtgttcttgcgttgaactttctccatgttcatgtttcttccaagaaatttgccagcaatgttctcttcttcccaaaaaaaaaaaaaaaaaaaaaaaaacccaccac

SEQ ID NO: 4141 - DNA, 861 bp, Zea mays
  Clone ID: TF_ZmC4170_3
ttgggtggtacccgcggccggccgggcgttccggttaccagtctcgtcgtgtccgttcgcgatcgggcaaacctgcaaccctttcctcttcgtccccccgctctctcgttgccccaagccggagtacggagtacggcagtcgcacccccgtcgtcccgttccttgctcgccccaacttcgccgccgcgtccccctcggctcctagtgatgtctggtggtaacgcgtggtcgccgctcccttcgcacggatttgaatccgactccggcggcatggggagccgcgcaggcgagcctgtggcgaggaccaacagcagcggcggtggcggtagcagcaaggactcgggcagcttcgagtgcaacatctgtctggacctggcgcaggatcccgtggtcaccctctgcggccacctcttctgctggccatgcctctacgagtggctccacgtgcacgcgcactcccaggagtgccccgtctgcaaggccgtcgtcgaggaggggaagctcgtccctctctacggccgtggtggcaactccacctcaccccgtgcaaggtcggtggccggtgtggaaatcccgagcaggccgaccgggcagcggccctccactgccccgcagccagaccacagtaatcattacccgccccagaacctctggttcatgggcgctggcgccccccctgtggctggtggtcggtgggggaattacactttctcggcggccattggaggggtgttcccgttgctgagcttccaggtgcatggattcccgcaagtgtctgcctatggtgctgctgcagggtttccctatggatacgtacagtcattccatgggtggcatggacatggctatggcttcccgcgc

SEQ ID NO: 4142 - DNA, 919 bp, Zea mays
  unsure (1)..(919): unsure at all n locations
  Clone ID: TF_ZmC4170_4
cccacgcgtccgcccacgcgtccgcccacgcgtccgcccacgcgtccggttcgcgatcgggcaaacctgcaaccctttcctcttcgtccccccgctctctcgttgccccaagccggagtacggagtacggcagtcgcgcccccgtcgtggcgtccgtccggagacggcagtcgcatcgcatcccctccgcctcgttccttgctcggcagcaaggactcgggcagcttcgagtgcaacatctgcctggacctggcgcaggaccccgtggtcaccctatgcggccacctcttctgctggccctgcctctacgagtggctccacgttcacgcgcactctcaggagtgccccgtctgcaaggccgtcgtcgaggaggggaaactcgtccccctctacggccgtggtggcagctccgccgtaccccgtgcaaggtcggtggccggtgtggaaatcccgagcaggccgaccgggcagcggccctccactgccccgcagccggaccacaataaccattacccgcaccagaacccctggttcaatggtgctggcgccccccctgtggctaatggtaggtgggggagttacactttctcggccgccatcggagggctgttcccgttgctgagcttccaggtgcacggattcccgcaggcgactgcctatgggcctgctgcagggtttccttatgggtacggccattctttccatggggtggcatggccatggcttcccgcgccaggcaccacaaggccagcaggtcgatgcgtacttgaaggcgctgctgctggcagttggtgtgcttgtaattgccagcctaatcgcattttaaataatgatgngctggcgatgtcgctgatccccttgntgggggtgtaccgtagntctagcatcatggcatcttagatggctccccaagtttgat

SEQ ID NO: 4143 - DNA, 760 bp, Zea mays
  Clone ID: TF_ZmC4170_5
actccatagggcgattgggttcctcgaggccggccgggaaaaaactcccagtctcccactcgctgcagtctggcactgttctcgggagaggcgtattgctgtcctcccgcaccgcaccgcaccgcaccacgttagcggctcggggtcgggggtcgggccaatcccttccccggcagacggcagtcgcatcgcatcccctccgcctcgttccttgctcggctcgccccaacttcgctgccggccgccgccgcattcccctcggctactcgctcctcgtcgctccccggtgatgtctggcggtaacgcgtggtcgccactgccttcgcacggatttggatccgagtctagcggcatggcgaatcgcgccggcgagcctgtggcgaggaccaacagcgatggcggcggcggcggcagcaaggactcgggcagcttcgagtgcaacatctgcctggacctggcgcaggaccccgtcgtcaccctatgcggccacctcttctgctggccctgcctctacgagtggctccacgttcacgcgcactctcaggagtgccccgtctgcaaggccgtcgtcgaggaggggaaactcgtccccctctacggccgtggtggcagctccgccgcaccccgtgcaagatcggtggccggtgtggaaatcccgagcaggccgaccgggcagcggccctccactgccccgcagccggaccacaataaccattacccgcaccagaacccctggttcaatggtgctggcgccccccct

SEQ ID NO: 4144 - DNA, 810 bp, Zea mays
  Clone ID: TF_ZmC4170_8
ggaccctcgggctggccgggaccccacgcgacgcgtgggggttcaccagtctcgtcgtgtccgttcgcgatcgggcaaacctgcaaccctttcctcttcgtccccccgctctctcgttgccccaagccggagtacggagtacggcagtcgcacccccgtcgtcccgttccttgctcgccccaacttcgccgccgcgtccccctcggctcctagtgatgtctggtggtaacgcgtggtcgccgctcccttcgcacggatttgagtacgttctctcaagcaattgtttgcgcgatggtcgctccattgcctgtttattcggatctgttccgtccacataactctctctttgatccacgcataacgcattgggtattgaacgaattgcatctactcctgattgtggcagcgacgactcctgcttgcccttttttattttgctcgtgtcgtcggatcgtggcttgattgatctccgcatcccgcagatccgactccggcggcatggggagccgcgcaggcgagcctgtggcgaggaccaacagcagcggcggtggcggtagcagcaaggactcgggcagcttcgagtgcaacatctgtctggacctggcgcaggatcccgtggtcaccctctgcggccacctcttctgctggccatgcctctacgagtggctccacgtgcacgcgcactcccaggagtgccccgtctgcaaggccgtcgtcgaggaggggaagctcgtccctcttacggccgtggtgggcactccactcaccccgtgcagggtcgtggccggtgtggaaatcccgagcaggccg

SEQ ID NO: 4145 - DNA, 520 bp, Zea mays
  Clone ID: TF_ZmC1176474_1
atacatttttacgtccacgccgcgcgtgtgtgtgtgtgacaatgggagccatgccctgtatctgtaaatgcgtactgcccaagacgaatagaaaaaagattaaggtatgcaagaaagaaccaggtgccctgcactcctactatcctagaatgctctgctcatggtatggtcggggaatcgtgtgtgtcgctgaaagacaccctccaaacgaaacgcgcgcggcggcggcggcggcggcctagaccgcgcggcggcacagcgggcacgacgcgtgccggagcagccagacgtcgatgcaaggcaggtggaacgtgtgcccacactccggcaacctccgcgccgtctcgccggcctcgaagtcctgaaggcagatggggcagccgatgggctccccggaggcgtcggtgacggtactctcggtgacggccgtgacggggagcgccgcgatggcggcggctggcatgcccgcggcggccgtctcgaacatgtccgccagtgtcggcgccgtgtcctgcgagtc

SEQ ID NO: 4146 - DNA, 807 bp, Zea mays
  Clone ID: TF_ZmC588778_1
ctcgcggccggccgggactctcgatctcactccatccccagtcactcgtctcactgcgaccgaaacagcgcggcctcactaaactaacccagccatgctggccgtgacggtgagccaggttgtggcgctgctctccaaggcggcgggggccgaggccgagcgctggcggcgacgttgcggcggcggccacgaccgctcggcgccgtcgccggcggtggggtactgctgcgtgtgcatttcggcgtgccgcgacgacggggacgacgtccggaggctgccctgcggacacgccttccaccgcgactgcgtcgaccgctggctcgcgcgctgccgccgcacgtgcccgctctgccgcctgcacgtggccggcggacctaccgtgggtttcgtcgaccagcagcagcttcagctcagcgacgacctcgtcatctggttctcttcgctcttcgtcgccggcttgtagttgtaggtagctacagggctcgccccgcccgcgcacgcacccgccgtagggataagctagcaatgtgcctctgccaactgcctgcgtacgcgcataaaagtattaaagcttttcctgtggttattaaaaaaaaatgttcggaggacaaaagtctcttcggtcctgctacatcatttctatatcgactcctccaaatctaccgcttggtttaaattatgtaaaccaacacgttgtatagtggaagagttgttttcgaaatctatcgtaactgcttccacaatgtatataaagatggttggtttaattccctgataaaaacctcctcaacggcaacctttattttt

SEQ ID NO: 4147 - DNA, 1937 bp, Zea mays
  Clone ID: TF_ZmC15150_3
gtaccctccagacccccaaaaggcaatgcggccctcgatgctcgccgggctgcctcgtccggtcctctcggctctcggtgtgggaagggaaccaaaccgagacggaggcggagtacgacgcctgccttccctcttccgccgagcgcccgctgcgtcattctcgtccctcctcttcatcttcatcggccaaccgattgccgctgaccccggccatcggcgactgtcccccggtttttctttaacgatttccgattcgattccatggccggctggaccgattccaccggcagcggcggccgaggatcaggaggaagaggcttcacgacaccccgctatactactaattccaccaatgacatgatccatggaggtaccagcggcggaggcggaggtagcggcaggtggagaggaggcaggtcaagggggtggccgcccccgcagcctcaccatcgctaccgccgtgtggatgccgttcatcgtgactccgcgcctgtctctctatcggagctacaggcggcctcctccacatccagccgccaccggtaccttactcgttccatctcagcggacaagtcttccgcctcgggaaccgcgggttcaacagataccaaggagcctgacgacaaggctaaccgcagcgctgccaactttgagtgcaacgtctgctttgacatggccgctgaacctgtggtcaccaggtgcggccatctcttctgctgggagtgcctctatcagtggctccatgtccattctcaccaccgtgagtgccctgtctgcaagggtcaggtagctgatgatgctatcatacccatctatgggcgtggtggatccgcagcctctgtggacaacgctcccccaaggcccactggagccagagtagagagcacaaggcagcaacaacaacagctgccaattttccatcctcccaatgtttttgaattcataggccttggcttggccgctgcagccagaggagagcactccaccgagcagctgctgctgccaactttctcccaccccacggtgtttgatgatgacgacgggcatgaatgggacatggatcttgtgaacaacggcattgatcctttggacctcataactcccggcacccaagacttggacatggatgattatgatggcactattgatttcgatgatgatgattatgaatatgactaccatttggcgggtgctacgttgtttgcttctgctgggactgaggccagcaatcccagctcttcacaagcacatgctggtatgatcaatattagggacaacattcttggcactgccaccagcatctatcatcagcaagagtttggctactctggcgtgagacctcataataacaggggacggcgccggcaccgtaatcgcgcaagggcatcagcaaatcactcaggcgctgatgaaatggtgatcgaggataccagtcatttctaccttcagaacggtggcagttctaacattagtgcaggcgctgcttttcggcccaacggtggctggactgggagaagaggaagaagcaacctgaactcgaattcaggtggtggaagcaacctgaactcaaactcaggtggtggaagcaacatgaactcgaattcaggtggtggaagaggagggattcagggtaccagaagacagaggacaaattacaactgatagtgatgttgggacatgcttcgaaataggagcgataactgatgagataaacaaacttaatcctttgtcttccattttttttctttgtttctctcgtattattaatccttttgtagcctgtggctattggcaccttgtcaaacatcttctctccgtttcccctgaattgttatgcctggttaatgttacttatttttagtaccaccatccacaaaaaatctaaggaatataggatcctggttaagttgcggaaaaaaaaaaaaaaaaaagcggcc

SEQ ID NO: 4148 - DNA, 828 bp, Zea mays
  Clone ID: TF_ZmC3359_1
ggcggcggcgtacgaggtgctcgtagcaggcggggaggggctgttcctcaagaccaagcccccggccgccagatccgccgtcgaggcgctcccgtccgccgtcgtcgcggccggccaggaagtccagggggatgagtgcgctgtgtgcaaggacggggtcgcggtcggccagcgcgtcaagcggctgccgtgctcgcaccgctaccacgacggctgcatcgtgccctggctccaggtgcgcaactcgtgcccgctctgccgcttcgagctgcccaccgacgacccggagtacgagtcctggaaagccggccggaccgacgccgcgtgaaccggccaaccaggcagtggccgcatgctcttatggtatggttttattgatagtgttgtatgtatgggttgggtttgaatcgggtgctttggttataaggttgctactcagccgtatcaaaggcaaagtatagaggcagtagatgcagagatggtttttgatcggtttcctttttctccttaaagagggactcatgaagtttttccaagtgaccgaggttggcatatacttgttagttgttactaaaaaaaaaaaaaaaaaaagcggcctactgctgtatttattctaaatgaatccagagaggttagctggatatcttggtgcagggcagctgtatatcctgatgcaatgggacgatctacttgctagatattatgatgttacattttaactgatcgttgtttggtgactctctaatattatgtctagtttattagagcatcaaattacatttccacatcttgtttatagtggcacaggtgatacccattgattccctt

SEQ ID NO: 4149 - DNA, 567 bp, Zea mays
  Clone ID: TF_LIB5072-065-A1-XP1-E8
tcgggatggtcatcgtcctcgccgcgctgctgttcgcgctcctcttcgcgctgggcatcaactcgctcgcgcgctgcctcatccgctgggcgcgccgcgcgccggcagcggagggcggcggcggcgggctccagaagcgcgtgctccggagcatgcccgtcgaggtgtacggcaccgcggccgtcaccgtcgccgacgtctgcgccatctgcctcggcgagttcgcggacggcgagaaggtgcgcgtgctgccgcgctgcgcccacggcttccacgtccgctgcgtcgacacctggctcctgtcgcacgactcctgccccacgtgccgggcctccgtgctcgacggcgcaaaggccgccactcccgccggtgggggcagccggcggcaggggccgcagggcagcgaggctgctgccatcgccgttgtcattggatgacgtggacaggaagggcccgcgtgcccattggtggtggtggtggagccacacggcaggtatgccagagcttccttccgtggttgggagatattttgctgtgaaagaccgaccagtgggcccagaccctttg

SEQ ID NO: 4150 - DNA, 1137 bp, Zea mays
  Clone ID: TF_ZmC17955_2
cattgggtacctcgaggccggccggggcttttttctttccgctccccacacccctgttcgtggcggcctccgcctctccctctcaggctctcgccaccgtctgcaagtggttgccgcggcgccgctcccccctcgtggtggcggtggacgactacggtcggggatcgacggcttcttcgtccgttggttgggaggcgaggcgatacatcgaccaaccaaaagaaatgtcagctggcaggcaagcatactggtgttaccagtgccgacagagggtgaggccacggggccgggagatggtttgtccctactgtgattctgggtttgtggctgaaatggatgatgtagatgctctgatgagccacttcgttgggacggatcctgatttccatcgcgacccacggttcgggatcatggaggcgatctccgccgtgatgcggcatggtatggcagggatgaaccgggaggttgatgtcagagggaggccgaacttcttttcagacctggagatggagttcggttcagggccatggctgctcttccgtggccagctccccggccatctcaccgaggacaacggtttcgatgttttcgtcaatggacgacgtggcggcggcggcggcggcggcggcgtcggccatgaggagggccaacatcgcggactacttcgttggccctggactggatgatcttatcgagcagttgacccagaatgatcgccgaggaccaccacctgctgcacagtcctcgatcgacgctatgcccacagtgaagatcacccagaggcatctcagtggggactcgcactgccctatctgcaaggagaagttcgagatggtatccgaagaagcaagagagatgccatgcaagcacctgtaccactccgactgcatagttccttggttagagcagcacaattcctgccccgtttgccgttacgagctcccgtcacagggctctgccacgggtgctagctgctcgcgcgcgagatcaaccgaccagagccagagctccagtagttcaagcagcagcgggagaaccagtgggcgtcaaaggagaaaggacccgttctcgttcctgtggcctttccgctcatcaagtagttctcgctagattagcctctggtatctttgctcaggt

SEQ ID NO: 4151 - DNA, 1224 bp, Zea mays
  Clone ID: TF_ZmC22858_1
tgtccggggaggggagtccgtgatgagtgatgaccctaccagaaatcgacccgatacggctccagcgccagatcgtccatcaatagcccgaatcacactcatcacaagcctcaaacttttccaaaccaatttagatgcggcgtgagtgctaaagcgctctctggactctgtttcgcagtggccgcagctgcagcgtcccttccctttttgccatccagcatcacctgtgccgccggcgcgtaattgcaccgcggtcactggttagtaggaagaagggaaggaggaggggggagcggtgtcggggtatcgtctcgtgcccatgggcgtgcacgccaggtcgatgagctggtacatggggtcgccggcgccggggagcgccgccgagggcgaggggcagcgcgcgctgagaagcagctccggtggcagcgacggcagcttcgacaccaacatggtcatcatcctcgccgcgctgctgttcgcgctcctcttcgcgatgggcctcaactcgctcgcgcgctgcctcatccgctgggcacgccgcgcgccggccggggaggacggcggcgccggcgggctaaagaagcgcgcgctccggagcatccccgtcgaggtgtacggcgcgtgcggcgccgacggggcggcggctgtcgccgccgacgtctgcgccatctgcctcggcgagttcgcggacggcgagaaggtgcgcgtgctgccgcgctgcgcccacggcttccacgtccgctgcgtcgacacctggctcctgtcgcacgactcctgccccacgtgccggggctccgtgctcgacggcgcaaaggccgccgcctctgctcccgccgccgggggcaaccggcggcagggaagcgaggctgctgccatcgcaattgtcattggatgacgtggacgtgtgggggcccgcgtgcccactggtggtggagccacacggtatgcgagactagcttcgttccgtggtagtgagatattttgctgtgatgagaagccgacgagtcgcggcggcccatctctcagtcaagactacagcatggccttcaggatattatcccttcggtctgtacttgtgcatggtcgtcgcagctgatcctgtttgtgtatactaggagtggatgacggggtatgccgctataggcttgcaataatacagttttgtttgtacgctggcccacttgcctagttgaacgctacatgcttggagtgtactgctcgcta

SEQ ID NO: 4152 - DNA, 426 bp, Zea mays
  Clone ID: TF_LIB3228-004-P1-K1-F1
gctttggcttgtgtgattggaattgctgtttgttgctgccttccgtgcattattggtatcttgtatgctgtaactgatcaggaggagggagcatctgaagatgacgtaaacaacctttccaaattcaaatttcggacaatgagtgatgcagacaagctagctgccggcattgcagcacctgtgggtggagtgatgacagaatgcggagtgctgtatctgcctatgcccgtatgaagatggcgtggaactacttgagctcccttgcaaccaccattttcactgcagctgtatagacaagtggcttcacataaatgctacatgcccattgtgcaagttcaacatcgtcaagagcaatctccacagagaagaggtctaggtcaataaggggaaaaaaataatcattgcaacacatttcggcatgttcca

SEQ ID NO: 4153 - DNA, 2281 bp, Zea mays
  Clone ID: TF_ZmC5544_1
ggccgggggctctagctctcactctctcaggcccatttctgacgggttatttcgcggcgcggagacgccgaggctcccgagacccgattccccgtcccagagacgagagacggcacaacccttgctgccgtcctggtcgccacacggccacaccaacccaacacctcttcttcctccgctctcagcttaccccaccacaggcgagggaggcgactccttcctcgcggctacccgctccggccccgatcgcatctcctttgcacgccacggcccgcgcgcagtgtccaccggcacggccgtcctccgtgtgtgggggcgcatctggtgctagcttgccgggctagggtttggcttggcctcgtctaccgccccgtctcgtctgataggcacaggttccgtgcacgcgatcgtcgtctctccatccgttgtgactgcttgccgtcccccgcttgcttcgtcctgctacgggagggccactgctgccatcgcgtccaccgacgaatttccccacagagcattagagcaattatcttggagttgcagatctgcacctgaagattcatattgaaatctggaagcttctgctgttgagtacagagaaatatttcttgccttttgaggaagactgcagagcccctaaatgtgaaacttgtttcttttcttgtctactcctgaatgctgacgaactcagcctctcacgttacttagctgaaggtcgtactggtacagacaccgaggatggagcaagcaacaggtgtaagtggtcctgaacacataattgatattccaagggaaattggtcctcctgcttcggtttctcgtagtgctggtagagagaaccatgaagaatcgaatcctgtggacaggccttcaacaagagctctagtacctgccttgcaggcaccatcagcaataggtgctgtacctattacagggcatacttcaggcactaggagaaatgacaactatgttcgtcggcacagaagcccattgaattctggactgtggatttcaattgaagttattgttaactttagccagattgttgctgccattgttgttctttgtgtgtcaagaaaggaacacccacaagctccattacttgagtgggtcataggttacactgttggttgttttgcaacgttaccccatctctattggcgctatatacaccgtaatattgtaaatggtgagcatgagtcatcacatacacctcaagggtccgctcataacaactcaaatgaagcgactcatgctgcaagtgcatcagaacgccgtagaaatgctgcccgaaatgctgtgcttgctaatcctaggatcaatgcgctgtttgaccacttcaagatggccctggattgtttctttgctgtctggtttgttgttggaaacgtgtggatatttggtggccgttcttctgctgctgatgcaccgaacttgtacaggttgtgcattgtgttcctcacttttagttgcattgggtatgccatgccattcatcctatgtgcaatgatatgctgttgccttccctgcattatatctgttatgggttttagagaagatacaaacaatacaaggggtgcttcctcagaatctatcaatgctttgcctacatataaattcaaaatcaagaaacgtcgccatggttcaggcagtgaaactgaaggccaggaaggagggatattggctgcaggaactgacaaggagcgatcactctctgctgaagacgcagtttgctgcatctgtcttgcaaaatatgcgcacaatgatgagctccgtgaacttccatgtgcacactgtttccacaaggactgtgttgataaatggctcaagataaatgcactttgccctctgtgcaaatctgagatagtgagctcgtctggtacttctgatgcccgccaatcagaccagaacaccgttcctgtgcaggagatcgaaatgcattaggttggtctgttcccgcagcttatcacataaggatacatctgatttgtggctctcaatcttcatgtataaagttggagattgatgtatggattgtagagacgcgtaggttttttttttgtatttaacactgctatcttggagaagttacagctattctcgctgtcacccaactatggcaagccaatactacccaggttttcccccatagcgtgggctgcacctaatgttctgctcttgatggcattgcatgacttctttcgagtttctagagcgaaataggcaggcgagtttctttaagcgtgtatgtggacgtgtaaagtaacgttttgcattgtag

SEQ ID NO: 4154 - DNA, 692 bp, Zea mays
  unsure (1)..(692): unsure at all n locations
  Clone ID: TF_LIB4732-093-Q1-K1-A9
gatcgagtcgaggcaccaccgctgcaccccagccatggactggtgcctctgctgcatccgcgtgtacacgctgtccatcgccaactcgttgtacctgggcgtcacggggattctcgtctacgtgctcgcgcgatcgcactcccgcaccacgtccggcatcgtcgtggcctccgtcttcctcgtcctctgggtgagcatcggcgccgtcatctacgcctccttgtgtttcgccttcttcccgtgggctgcgcttgagaacgcgcgcctctgctgcgtccgttgcaccgccgggtggctgcggcgcccaagtggcggcggaggcagcgccttgccgcagtatgcggcgaggagtcggagtcatgccatgaacgagcttccgggggagcccacggtgcgtgccggcgaggcgcgcgtagccgcagcggctgacatcccggcgtacgagctgcgcgacgacgcctggcaggggcagcctgatggctcgtctgattgcgcggtgtgccttggcgagatggtcaagcggctgccagtgtgcctccacatgttccaccagcaatgcgtcgacaaatggctgaacaacaactcgacctgtccggtgtgcangnntgcgtcgtgttcgcgccgctgccgtcgttaaaatggtggtggaccttgatctatttctcatttccnttctctgagttctgtcttct

SEQ ID NO: 4155 - DNA, 1758 bp, Zea mays
  Clone ID: TF_ZmC348_1
cacccgtcagccgcggtctgacgaggcggggccgtttcctcgccttttcccttgccgtggacgcgtgccgcggtcgtcgccggccgcgggaggagatcgattccacgcggcggacttggtctacagtctactaatctattctctatctctagcagtggtaccatttggcggcgatcgccgtgctattgcttgggccttggactgagtaggtttggaggtagcgatacgagacactcgcccccgattcccctcccgttgccgaagcctgtgttgcagggatcgttcgcggaagcggtttttgatcggagagagagaaagagagagcgagggagggaggtggcagggatggacgcggcggcagcggcggcggcgcagatggagaggcactcgtcggcggcggcgcacctggagaggcactcgtcggcggcggccttcgtggagggcggcgttcaggacggctgcgatgacacctgcagcatctgcctcgagaccttctccgacagtgacccctccgcggtgaccagctgcaagcacgagttccacctccagtgcatcctcgagtggtgccagaggagctcccagtgccccatgtgttggcaggcaatcagcatgaaggaccctacgagccaagagctccttgaggccgtcgaggaagagcggaacgacgtgcaggaaaaccacgcgcgcacaaccaccgttttccgtcacccgctgctcggagatttcgaggtaccggtggatgcagacgacgccgagatcgaggagcggatcatgcagcacctggccgccgccgcagccattcgccggtcgcaccgccacgccagaagagaaggccgccgcagcagcagggcggcggcagctcatggccatggccacccacaaccacaaacacaagtcctgttctttccgtctgctggcgaggccactcctggtggttctggttccccgtctccgcatccgcggcaagaacatgctgcttcttctgtggtttctcctccgccattgcccgccgttgcctccgcagaaggaacggatgcagacagtactgcctcggttggtggcgctgtcgggccagatgacagtgtttccaggagccagtcttcgcctgtcaaccacgatgaagctggaccatctgctgacgcgcagtcattctcagacacgatcaaatctaggctgcagtcagcctatggcaggtacaaggactccataacgaagagcacgcgcgggtggaaggagaggtggttcgcgcagagcagcgccatgtcgaatcttggctcggagatgaggagggaggtcggtgctgggatcgccgccgtttcccgcatgatcgagaagcagctggagacacggccggatgggagtgggacagcgccgtcgcctgctaccgcttcgtctccagctcacgcccaccctggttcggatgcaagtagtcagggtcagggagctgctgttcccgctacacctgcagccgctctgaataacgctacgcctgcagctgctgctgctctgaatgacgcctcgtcgtcttcgacagcttgaacgcgcgccaggatcatgttcagtgagtttgcactaggtgtggttttcaagtgctttagatgcttgcaatgcaatgcgtcgcgtgtatagtcagtttgtcaattagcctcattggtagccagtgaaacagatagtggatgccaagctactgttcgatcagtgaatgtttcagaataaagttggatacttggatgcgcacaagaacacccgagagaccac

SEQ ID NO: 4156 - DNA, 914 bp, Zea mays
  unsure (1)..(914): unsure at all n locations
  Clone ID: TF_ZmC5151_3
ccgggcccaaatcgcgccacccattgttgtcgcttctcacttctcactcaccaaccaacccaaccgagcaacttggctcgtaccgtacgtactacctgctccgacacgccgaggagctagagaggaccgcgcgcgtgctgctgacctgcgggagctaggacagacacgatacgacagataccatgtcgacgacgacgacgaaggcgagcgacccggggtccgcgtggttcggcagcggtgcacggacccggtcggcggcggggataagccacaacgcgcggctcgtcaccaccgcggtcgccgcgttcgtgtccgtgctcggcctcgccctcttcctccacctctacgtctgccacgtgcgccgccgcaaccgccgccgcgcggcggcagtgctgccgacgaccacgcncccgcggggnnggggnggcggccccgaagcgcgggctggatcccgcggccgtcgcggcgctgccgaccgtcctctacaggacgcgggcggcgccgacgatggcgccgagtgcaccatctgcctcggcgccgtgcaggaaggcgagctggtgcgggcgctcccggcctgcggccacgtgttccacgtcccctgcgtcgacacctggttcgcgtccagctcgtcgtgcccggtctgccgcgccgaggtcgagccgccgccgccgccggcactgagctcatcggctctgttcgtgcaggcggagaaggtggtgcaggacgccgtcaaggaggaggccggcagctccacgccggagagggggatcggtgcctgcgcgtcgctgatgaagatgctcagcagggagaggccggcgccgcggaggccacacgccgacgccggggacttggacgacttggaacggcagcagcattctgttgccgtcaataattagcctattgttttttattag

SEQ ID NO: 4157 - DNA, 962 bp, Zea mays
  Clone ID: TF_ZmC17955_3
cctcgaggccggccggggcggccttcgcccctccctctcggctctcaccaccgtctgctggtggttgccgcggcgccgctcctccctcgtggtggcggtggaggactacggtcggggatcgacggcttcttcgtccgttggttggcaggcgaggcgatacatcaaccaaccaaaagaaatgtcagctggcaggcaagcatactggtgttaccagtgccgacagagggtgaggccacggggccgggagatggtttgtccctactgcgattctgggtttgtggctgaaatggatgatgtagatgctctcatgagccacttcgttgggacggatcctgatttccatcgcgacccacggttcgggatcatggaggcgatctccgccgtgatgcggcatggtatggcagggatgaaccgggagtttgatgtcagagggaggccgaacttcttctcagacctggagatggagttcggttcagggccatggctgctcttccgtggccagctccccggccacctcaccgaggacaacggtttcgatgttttcgtcaatggacgacgtggcggcggcggcggcatgaggagggccaacatcgcggactacttcgttggccctggactggatgatcttatcgagcagttgacccagaatgatcgccgaggaccaccacctgctgcacagtcctcgatcgacgctatgcccacagtgaagatcacccagaggcatctcagtggggactcgcactgccctatctgcaaggagaagttcgagatgggatccgaagcaagagagatgccatgcaagcacctgtaccactccgactgcatagttccttggttagagcagcacaattcctgccccgtttgccgttacgagctcccgccacagggctctgccacgggtgccagctgctcgcgcgcgagatcaaccgaccagagccagagctcaagtagttcaagcagca

SEQ ID NO: 4158 - DNA, 1595 bp, Zea mays
  Clone ID: TF_ZmC42210_1
ggcgattgggttcctcgaggccggccggcagaccagtcaacgtcacctccggcagctggctaacggcgtgaccttccccctcaccgccctcctcgtgcagtctccgtcacccgcgacgtcacagctgcggcagacgccgtcccacataaaaccggcctcgccgccggccggcccttcccattcccctcccctgtcgtcgtctcccctcacccgaagccccgattcgaaaccggcggcgttcgatttggggatttcggcgtctcgctccccggaatttcttggatctgagtctgtccgccgtcttcgatttgcggctgcagtgagcctgcgagttttccggctctgatttggtcggggtcttcgatttcggggatggcgtcgtctccggtgtcctactggtgctacagctgcagccgcttcgtgagggtatctccgtccaccgtcgtctgcccggagtgcgatggcggcttcctggagcagtttacgcagccgccgccgcgcggcggcggcgggagcggccggcgcgggacgatgaacccggtcatcgtgctccgcggcggatcgctttccgggttcgagctctactacgacgacggcgcgggcgaagggctgcggccgctgcccggtgacgtccagcacctcctcatggggtccggtttccaccgcctgctcgaccagttctcgcggctggaggcggcggctccgcgtccgccggcgtcaaaggctgcggtggagtccatgccgtcggtgacggtggccggaggtggtgctcactgtgccgtgtgccaggaggcctttgagcccggcgccgccggccgggagatgccgtgcaagcacgtctaccaccaggactgcatccttccctggctctcgctccgcaactcctgccccgtctgccgccaagagcttccggccgcagccaccccagatgcggaggcggatgctggcctcaccatatggcgacttccacgcggtggattcgccgtagggaggttcgccggagggcctagagagcagctcccggtcgtctacactgagctggacggcggcttcagtaacggagttgggccgaggcgggtgacgtggccagagggagatggccaagtggatggcggtgaaggtcggattcgccgcctacttaggaatctatttggctgttttggtcatggcagctggccagctagttcatcgcagtcccgtagtggctgagcacagttttccttggtaacaagttttcaattgatagcactgaagaactagggctagtgtaagaatggaacccagattataatttcttggggcttttgatgtaaatgaaggcctagcattcccccttcctttgtctcatctaagaattattaagagatgtctatgagcaaacatcttggagcgagctttgcaaccaaattaggccaaacacaagtgcaagccttcaagaaaggaatagcaatgagtgttttggggaaataaatctttttcaatattttaggtagagagaacaattgttgtatttgcaaacccactgttcgtgtacatactggattggttgaacatgaattcccattctgctatgtgctatatcttatattgacatt

SEQ ID NO: 4159 - DNA, 967 bp, Zea mays
  Clone ID: TF_ZmC9753_2
ccggccgggaaaaaaaaaaaaaccttccttgcgaactccgccaccgcgtccctgcgttatagggccgtcgacgacgacgggttgcgcgtccccgcctcattcgcgcgaccatggacacggacacggacacgacgacgtccaccggctcccgcctccatcccgcggccggagcgcgcgccggcgtacgctcattggccgcccggggcgccgagagcctcgtcacctgcgtcttcgcgacggtgggcacggtcctcggcgcgatcaccggtggcctcatcggcctggccacggagacgggcgtgctgcgcggcacgggcgtcggcggcatcacgggcgcgctggtgtccatggaggtcgtcgagtcgctgtggcgctccgacgagccggcaatctggagcgtcgtctacgtgctcgatgtcatctggagcttgctcaccggccgccttgtgcgcgagaaggtggaccccgccgtgctcagcgccgtcgagagccagatgagcgcagcggacacaccggccttgcatggagaccacgccgacatcttcgacacgggcggcaccaacggcatggcgagggtcgccatggacgcgctccccgtcgtcaggttcaccgagcgcagcaacgtcgacgccaacggcgacctcatcgcctgttcggtttgcctccaggagttccaagccggcgacagcgcgaggagcctgccggtgtgccgccacacgttccacctgccgtgcatcgacggctggctgctccggcacgcctcctgccccttgtgccgccgcgctgtctaggccgcgcccgttcctctacccccaaagatagccgccacaagagctgctgacaagcgacacccgttccttcacgctgtagccgtacgcacactggcagcgtgatttttctgtagctcatcagatgattcagatgagcgttatgtaaacattggttagttaacagatgcaattggtgc

SEQ ID NO: 4160 - DNA, 948 bp, Zea mays
  unsure (1)..(948): unsure at all n locations
  Clone ID: TF_ZmC27511_1
aactgaangccacactatcgcagacaaagatcactcgcgttcggccagttcttggccccgtgcggccatgtccatcccatccatgtcgagctcgagcccctccgtggggagccctttgccgccggcgcacgacggcgggccgggcccgctcgtgtggcggcagaaggagcagccgcatccgcagccgcagcatccggactacagcttcaccggccgcgtcctgctcacggccgtcgtcatcctcgccatactcaccgtcgtcttcgtcctcatccgcctgctcctgtaccagttcgtggcgcgcggacggggccgcctggccgtgggcgtccgccgctccttcggctccttcggcatgaggagcgcccgccacgggctcgccgcgtccgcgctcgccgcgctgccggtcaccacgtaccgcgtccgcggggcggacgacgacgggcctagctccgcctccggcggcgccgggaccgggacggcggactgcgcggtgtgtctgtcggagctcgcggacggcgagaaggtgcgcgcgctcccgggctgcagccacgtcttccacgtcgattgcatcgacgcgtggctgcggtcccggaccacgtgcccggtgtgccgggccgaggtgcggcccaaggcgacggcggacacgcgcccctcgccgcctccggcgttgatcgatgccgctgggggcacgttggtcgtgaccgtggtaggcggcgccgcggagaccggggacgcacaccgcacgtccgtgctgggctccggtcaaccggccggtgccgttgggtaggtaggcaaaaacgacgttgcgactccttagcacatagtgtattatactatacatcataatacatgtaattagaaacattgtgtactactttatcttctgtaattctgtgaagatgacaccttagcatctccaacaaaaataattatccttcgcctcag

SEQ ID NO: 4161 - DNA, 1187 bp, Zea mays
  unsure (1)..(1187): unsure at all n locations
  Clone ID: TF_ZmC3483_1
ggattattnccttggcgaagaactagcccgtcatggctgtcgaaggtcaaagggctgaacttcccacttcctgatgagcatcagtcgagaaccaggcagattgaaactgatgagatgtttgcccgcagacttcaggagcagctcaatcagcaacagctaggatctcagcattccgaagcgactgatacgacaatagcctggacattacatgagcgggacgctgagcatgccagatttgctgcaagagaaggccagtctagttctagccagagggacagatcaatggcacacctatattcttatggacgtcattcacccgttcaaaattttgctccttggcatccaatcatactccaattccaatgtcaagaagaggcggcttgcaaagaaactccaactgtcctcaagcggagcaacgcaatatgcttatctctcagttaaccagaggatgcttcagagaagacatggatctacaaacgagattggctgtactggactcactttctgaagcatttaggaactgcgaggacacacactctccagattcggatgatgatgattacgaggaccaaatagcgctcggcgtcgacagccagcaaagaggcgcctctgatgatcagataaacagcctgccactatcagtaatcgagggtgaaggtcgttccgatgaaccctgcaatatatgcttggactgccctgctgctggtgattcactccggcgtttgccatgcatgcacaagtttcacaaagagtgcattgacaggtggctcgggatgaagatatggtgtccggtttgcaagtcaaatgtgttctcccagtaggccgtgagcatctcttatactttttggagcagcatcgaagctagattatagttggctgatacgaggcattgttacggctgcagtgtgtacattgcgttcttgacttgtgctctcttctgctccgtggggagcatttgaatgctctttttccgcggagagtttttttggctgtgagagaaggcacggaaaacctcattctgctattcccatttcttgtataccttatcgtaggctgatatgcccaacagtatgtcaggtttaggcggtgccataggacatgaggctggatccagtgccatttttcgatcatactttttatctattaacctgtcccagtgtnnnnnnnnnnnnnnnnnnnnnnnnnnn

SEQ ID NO: 4162 - DNA, 712 bp, Zea mays
  Clone ID: TF_LIB4756-051-R1-K1-B1
gggtacctcgaggccggccgggaaaaggttcgttaaggcttcatagccttccgacacaccaactgcaatcatcagtaaactccatttcagctcaagaaaactgctatagaagcctagaactagaagaggtacttgaggcagcgtgcctgcctgcatacgcaaccagacagccggcgagccatctccatccgagttgggcgccatgcaatttgcaatgtcaccggacaacctcctcttcttctgctccgtaacggcgtcggtggccgcctccttcgctctcgtctcgctgtgcaggcacctggcgcaccgccgaccgcagcagcccaccgcggacggcctagcgacaagctcctcaggaggctccgccgagccagaggagctgctgccgctgagcgccgttgccgcggccgtccccacgttcatgtacaaccggctggtgaggcactgcggcaagggcgcgagctggaccgagtgcgcggtctgcctcggcaccatccaggtcggcgccatggtcaagcttctgcccgcgtgcagccatgtttaccaccgcgactgcatcgacctgtggctctcgtcgcgctccacgtgcccgctctgccgctgcagggtcggtcctccctccgagacaggcgccggccaagagaccgcccgggagcttgctcaaccttcccctccaataagatgaatcctcactcgcccgtcacagatgttt

SEQ ID NO: 4163 - DNA, 1114 bp, Zea mays
  Clone ID: TF_ZmC12693_1
cattgggtacctcgaggccggccggcgaggcgtcgtcaacgagtcgggttgttacctcgaggccggccggggacctgtccacagtccaccatacatatcactctccgctccgccattgttgctccttattagtagttcgtcccgcgtcccttgacagttctatctatccccaccacaaataagagaccacctctctgccttcttctcggaggtcggagaagagctctctgcttcattcggccggtccaactccaccgaccgatccaatccaacccactgaccatggggttcccgccggtgtgctgctgcgcccccatccccaagccggtcgtcgccttctgcaacctgctcggcgccatcaaggacgccgtcctgctgacgctcgccgccgtgggcttcccgcacgacgccgcgcgcggctcggcggacgcccaccagcccgaggaggtgaagacccggctccccgccgtggagtacgcccagctcctggccgagcagcagccgtcgcccgccacccacgcggcctgcatcgtttgcctggacacgctggaggcggcggacgaggtgcggcggctgggcaactgcgcgcacgccttccaccgggcctgcatcgaccgttggatcgacctaggccggacgacgtgcccgctgtgccgctccgacctcctgccaagcccccggggccgggccgggctgctcgggctgggccggctcgccagccgtctcacgcgcgttcgcgtttggtgaggaccgtctcggaggccacttttaccttttcggtggccaggccgcggtcgcagcccatcccggtggtgccggaacggcgcggacacgttagcgacggcgaccgggccgccggatggtcttaaatctgctctgccacttgccaaccgctaatcaaccagcgggcttaattagcagcggattggcttggtgtctgacagtcgatattatgacagctaaataagcagttaaatgtttctataggattgagtatacacggcagctaaatgtttcgtatacagtggcggacgcaggacgaaaatatagtacatgaatgtcctctatccgatcctttcatatagtataacagttaaattattcatcagctgtg

SEQ ID NO: 4164 - DNA, 405 bp, Zea mays
  Clone ID: TF_LIB3066-035-Q1-K1-F7
atatgctgctgcctgacctgtataatctccgatctgggcgtccatgaggatttggatatgaacagaggcgctaccacagaggcaatcaataccttggtggcatacaagttccaatcaaagagggttcatgatggggatgtgggaggagatggtggtggagctttgaaacgttggaactgacagaaagcgagctattactagactaaaagctctatgctgtatctgcttgatcacgttttaatactacgaagacctgggcgaactatcctgtgcacatgcattccacacggaatgcatagataagtggatccagatgaacacgttgtgtcctgtatgcaaggctgagatcatgggatcataagcgtcctgtgatccatagagtgactatgaggatcccgacaacac

SEQ ID NO: 4165 - DNA, 255 bp, Zea mays
  unsure (1)..(255): unsure at all n locations
  Clone ID: TF_5761830
agggatgaagggaaccagggacgcgcgactagccgagccgtgccatgccgagtaggccggcgcgccggcgcggcagcaggtgggagcggcaaagcgggcacgtcacctcgcccaggtcgatccaggggtcgatgcatcgcgtgtggaacgcgtgggtgcagttgcccagccgccgaacctcgnccttggcctcaagccactcgaggcacacccggcacgtcggctccgcccccagccccgacgacggtgacgacg

SEQ ID NO: 4166 - DNA, 1991 bp, Zea mays
  Clone ID: TF_ZmC28561_1
ggccggccgggatacaatccccctgttcatgtgttatggcagggcatcatcataataacacacatgcctccaggatggatcatgtgaacaggttccagagtgaagcacagccttttggcccaaagttatttatgcattctagaactgatgcagcaaatggagctctaccatcaggttatgtgggcgcaccaataagaccaaatggcattccattctcaagtcacaccgggcaatctcatattcagcacagtgatgctcctggaaccatgcttgcatcctattctggctatcctcttgctggaagctccagtagcacctatgcaccacataatactcatcatctgcctgctttgagctatccacataggtctgatgataacttcattctgagttcccatatggatgacagaagggttgcactgaagcggagaaatccaattatttatccagtggatggagtcaataatgggagctgttatgctggcagttcatctaatcctcagttcccatgctacatgcctccaaatcctattcctgctcctgaaccctgccctcctcgaataacatcaaatatgggttcaagctactggactgatcagccctttggtagcaatggaggatctcagaggaatgtgagaggtcgccatgatcacaatcctatccatttgggacacaatccaggtgtagcttgcgcaacaagcagcactcatgggccaccacaccatgctaatgtaattggtcctcaaagtacagcagtgccacaaaatagagcatatttttctatacctccaagagtgactgccccaggcagcgatggaaactgtagcatggttttcagggaagggacatactactctgctccgcagaggaccaacataaatgccccccctgtcctagcacctcctggttcttctgatagtctacattttgtgcatggtgggtatgccccaagagcagcccctcctaacagcatcagcacatatcctgccccggcttttgcgactcctaacaactcagtgacagttacccatgagcctgatatcccttgctatcgacctgccgtccctggctatccgcctgctacctcagcagcagcagcagcagcaagtgttcatgctgaaggtgctgctgcatcttcgagacatctaggtcatgtggctctaggttccagtggtagtgcaaggagtagaaggctgagggattcataccatgcttttcgtccactggttattgaagaaaataacttgagaggaccagcaaccgagcgttttatgatgctaaatcagttatttatccatgaatcgagagaagattctgaccctcactgggacatgaggctggacattgatgatatgagttatgaggagctgctggctttgggagaacgaataggcaatgtcaacacgggcctagctgatgaaaaactttcaagctgtgtgacggagataccctgctgcagctctgcccgtactcatgatgataatgagagcgcaagatgtgtaatttgcctggaggattacaaattcgaggactctgtcgggaagctaaaatgcaatcacaagtatcacgcagactgcatcaagaaatggctgcaggtgaagaacgcttgcccagtctgcaaagcttctgcggcagatgacggcggaggcaccgaatgaagcgccctgccgcccccattcaccctatctcaggcgaagctgtactggctgatctggtttgctgtgtgtaaataatggtcctgaaacggattatttgtgagctgaattaaactcgacatgtaaatttaatcctcaagctagttgcaaattgatggcagcggttagccctacgtgtcagccgtctgacgtaactgcagagagaaaacgtttgcatgcatatgtacagctcgatccaatagaggttattaaatgttaacaatttattagttaaaaaaaaggtctttacgacgtccaaaaaaaaaaaaaaaaaaaaaaaaaaaaaatttaataaaa

SEQ ID NO: 4167 - DNA, 1299 bp, Zea mays
  Clone ID: TF_ZmC3771_1
ggtacctgagcacacgccggcgctcttcttctctttcccttcgcattaatggccgctctctccctatcccctttcgtctcgctctcggagtaggacactcgcccgcttccggcttaaccttcaagattctccctcctcctcctacttcttcccgcttgggcgggcgcggcaccttccggttctgggcctcctatatatatacgcgcgcgaccgtcccccttccatactccctagcatgctcggctcgcaccccggattgatcgagctcgcccgtcgccgcgatggattcggtgccttccccctcctcttctacccgggccaccgctgctcccggtccctgctgccgctttgacgcgctgcggagggcgtgcgccaggcacgccgccgccgccgcgcgggccgccgggtgggcgctcggcgcgctgctcacctgcgtcttcgccgtcgtgggctcactcgtcggaatcttcattggtgccttcatggggatgtctacagaaagcggcatgttccgcggggctggtgtcggagcagtctcgggagcagtcttctccattgaggctgttgagtcctgcatcgagatttggaggtccagccattcgggaaaatacagcattctctatgtgctggacatcatctctagcctcttcagcggaagaattgtgtgggagaaagtcagtccagcgctacagcgtgcagtgcaaagccagatgagtctaatgagcacaccgttcatcgacaacaatgacctttttgaaactggcagtacaggaggcatgtcaagggctctgattgataggatcccaaagatgaggttcagtgctgcaagcaattgtgacaaggaaactgatagcagctgctgctcagtctgcctgcaggattttggagcacagcaatttgtgagggccctgcctcagtgccaacacatattccatgtgcggtgcatcgacaattggctccttcggcacgcatcctgcccactatgccgggccggcgttcatattgaccatatacatatgtaaataaactcgcagggtggcacctggtgtattttcatagtgaatacccgtgctcctgttggatatcacaagtatagctggatgtatacataggttttctcctttttttttgttacttctccggtcttatgtggggctatgctttcagctgcacgtttttgtcgaagtaatacctggattggctggatatgtacatcttgagaacggattgactaacaagctccctgaattatggtaaaaaaaaaatcaaaaaaaaaaaaaaaaaaaaaaaaaaaaacac

SEQ ID NO: 4168 - DNA, 1565 bp, Zea mays
  Clone ID: TF_ZmC8011_1
cggaccgccatccgggtcgacccagcgttccccccgcgtccgcccactcgggcacctcgagccggccgggaatcggcctctcttgtatcatcggcctgccgcctgcccgcctgctcctcctgccccattaacgccgccggctgccgtgccgccgcgtcctgctccccgccaccgcgttcctcgcccgaagcaccgccgcggcctcgcgccaccgcccagaaaccatctccgggcctcgttcgaccgaagcgccttgtgtcatatctccgcgacctagccgccgcccgccgccgacgctgccgtcgtcgtcatcctcgctggcggtgctgtacctgcgtgcagcgcagatccatccgagctcggattgatttcttcctttgctgtactgtcataaccgaactaaaacagtttctgagaggaagcatcgcgattgccatggaagctgggagaatggatcagccatttatggctgctatcaatagccagcctttcgtggaggatattgagccagtgaagaaagccagtggggacatgcctgcgacaacaggaagcggatgcttcgaatgcaacatctgccttgattttgcatcagaaccagtggttactttctgtggtcatctctactgctggccttgtatctacgagtggctgcgccctggggtggagtcagctgccagcgacaacagcagttcggcaaggcggcaatgtcctgtatgcaaggcaacactctcaacggacacccttgtgccactatacggccgtggaggcaactcaaagaagtcacttgatggcatggccatcccgcgccgccccatggtacaccgggagactgttgagcaacagaatgcacagagcaatgtcaatgaccagcactaccaccagagcatggaagacaactctcagcgccagccattgctgcaagcgcaccaccatcccattcccactgggtttgacttcatctaccctccagcaccagtagggcgtggcttgatccactcaactgccggaggggtgctcggagggatggcagagattgtgcttcccttggcgctccgtggccagatgccagcgagcttgcactacacgaatccataccatgttgcgacacagaacgtgaaccccaggctgaggcggcatcagatggaaatcgagaggtccctgcaccagatctggttcttcctctgtgtgtttgtggtgctgtgcctgctcttgttctgagacaagactattctatacacctctttgtagatattgaaagtgggagggggatactaatggatgatgcgtatagtaaacagggtaatggtctgtgtcgacaggcatgtgcttaagcatgctgatgtagagttgtaatatgatgagacacggaggtgaaatgcatatttcattcttctctatcactgtcggcctgttaggttgcctacctgacatcttcatgttaggtttagcatcatctgttgtgtattggttggtgtcactgccaagggccttttgatttgtatataaatagaaaatgatggtttgtctaccaaaaaacaaaaaaaaacccacgcgtccgagaacgc

SEQ ID NO: 4169 - DNA, 2482 bp, Zea mays
  Clone ID: TF_ZmC8011_3
ccccgaggctggccgggaaataccccttgacggagcctccctccgaaatccgcctctctcctatcatcggcctgccgcctgctcctcctgcccccattaacgccgccggctgccgtgccgccgcgtcctgctccccgccaccgcgttcctcgcccgaagcaccgccgcggcctcgcgccaccgcccagaaaccatctccgggcctcgttcgaccgaagcgccttgtgtcatatttccgcgacctagccgccgccgccgctgccgtcgtcgtcatcctcgctggcggtgctgtacctgcgtgcagcgcagatccatccgagctcggattgatttcttcctttgctgtactgtcataaccgaactaaaacagtttctgagaggaagcatcgcgattgccatggaagatgggagaatggatcagccatttatggctgctatcaatagccagcctttcgtggaggatattgagccagtgaagaaaagccagtgaccacaaacatatattggagattagggcgtacaccttgagcctatctcatactttcctttgttattcatatctgctcttttggtcttccccagccgtttgtctgaatataatttttttaaggatctgtggtaataactggtaatctgttcaggacctgccagcttgccgaatcccatgttttgcaagtttttttagaactcgaacagtattctattttcttcccgaggcaatttcgagctggcaataatagttctaaccttgaacaaggagccaagtcttggagtcaatattttatgctgccatgcacatttcatataaggtagtggttccatttccttgctgacataagtttccttatctctgatagctagattattggataacttgtcgatggcacaaaaagtagcacgcggataaccataacaaaggggacagaaacaaagcacaaaagttgtaggccccagtacaaaagggatagaatcaatgactgctgctgacgcacactacactactaggtactaaaatattagaatcatcactgctgactcggtctactaggaaagacgatggattcttgggtaaaagcgcaaccagcatagactctcatggacactcgcctcttaccacgttttggagatttacgtaacaggagcttaagtaatcaaatttgttgaatggcttcgcccagccgctccaggacagggatggtggggggtgcgcctaagaactgcttactacgtggacacctctatgtacttcgatcattactggcgattgtgtctactacctcagcctctgcctcagaagcaagcacatctcaatccctatagatgtgactggagataccctccagcgccggtagggcgtggtttgatccactcgactgccggaggggtgctcggagggatggcagaggttgtgctcccgtgggtgctccgtggccagctgccagccagcttgcactacacgagcccataccatgttgcggcacagaacgtgaaccccaggctgatggatcagccatttatggctgctatcaatagccagcctttcgtggaggatattgagccagtgaagaaagccagtggggacatgcctgcgacaacaggaagcggatgcttcgaatgcaacatctgccttgattttgcatcagaaccagtggttactttctgtggtcatctctactgctggccttgtatctacgagtggctgcgccctggggtggagtcagctgccagcgacaacagcagttcggcaaggcggcaatgtcctgtatgcaaggcaacactctcaacggacacccttgtgccactatacggccgtggaggcaactcaaagaagtcacttgatggcatggccatcccgcgccgccccatggtacaccgggagactgttgaggagcaacagaatgcacagagcaatgtcaatgaccagcactaccaccagagcatggaagacaactctcagcgccagccattgctgcaagcgcaccaccatcccattcccactgggtttgacttcatctaccctccagcaccagtagggcgtggcttgatccactcaactgccggaggggtgctcggagggatggcagagattgtgcttcccttggcgctccgtggccagatgccagcgagcttgtactacacgaatccataccatgctgcgacgcagaacgtgaaccccaggctgaggcggcatcagatggaaatcgagaggtccctgcaccagatctggttcttcctctgtgtgtttgtggtgctgtgcctgctcttgttctgagacaggactattctatacgcctctctgtagatattgaagagggggaggagggatactaatggatgatgcgtatagtaaacagggtaatggtctgtgtcgacaagcatgctgatgtagagttgtaatatgatgagacatgggaggtgaaatgcatatttcattcttctcgtcaaaaaaaaaaaaaaaaaaaaaaaaaaaaaaaagaaataa

SEQ ID NO: 4170 - DNA, 3927 bp, Zea mays
  Clone ID: TF_ZmC219_12
tttttttttttttttttttgcacgcgctgcccctgccatccgtagtagcggcactgcagcagggcagggcgagcgccatgtgcaaacacagtgcgccactcgagtcgacagcgaaatggcagggaaacttgtttatagatcactaaaacaagtactactactacgagtaataagagttcgttcattcgttcattacagatcactgtacacttgcttgcctcttttactcccatccttgggtgctgcctcaaatcaaatgcctcaacgacaacgaggaggagagcaagacgagaggtatggaggaacggaaccatgatttgaggatccttcactgcggtttcgccggaggcgacccgctggtctcgccgccgccgccgccgagaccagactccaagtcgccgtcttcattctgcggctgctgctgctgctgctgctgcgccggcgggggcgcggccgtggcgccgccgcagccaagcagtcgccgtagggcggcaacactggccgcctccacgaccgccgcgactccggcgatgggccctgctgctgcaaccggctgcgacggcgcggcgccggcgccccgggtgctgacggcgccgtcctgggagccgaagaagaggacgttggtggggaagttgggcgagtccgggtccgcctcgggcgcccgcggcgcggcgtcgtcgccggcgaccgcgcggcggcggcacagcgggcaggtggagtgggagcgcagccacatgtcgacgcactccacgtggaacgcgtggccgcagcggggcagcacccgcgcggcctcccccgcggccagctcgccgatgcacacggcgcagtccccgcccgccgccgccgcctcctccctcggcagcgccgcgatggcggcctcgtccagcccgccgtggcaccccgcgccgcccgcgaacacgaagcggggccgggccctgtcgccgccgatggtcggggcggccccgcggtaccgcttcgcgcacaggaagaggtagaagcagatgacgaaggtgatgaagatggctgccgccgccgccagcatcgtcgccgccgctgccaccgaggttcccgtcaccgccatcgggggctccggctccagatcccttgtcttcctgctcctcgtccaaggaagcagcctgttccccagctttcttggctagtagcactgttcttggccgcggtggagaccggcggcgcgctctgagattgggagtagcgactagcttagctagtggctcgtgccgaattcggcacgagtaccgatccagccggcgagatggacatcgtggtgggtgcgctgtcgggcatagtggacgcgttgccggggaagctcggcgagctgctggagcaggagtatgcgctgctctccggcgtccgcggggatgtcatcttcctcaaggatgagctatcaagcatgcgcgccgccatccactactgcgagtccctcgaccaccacgactcccagaccactggatggatcagcctcgtccgcgaggtcgcctacgacatcgaggactgggttgacctcttcagcatccgcgtccacggcggtgcccaatccacttccgggtttcgtgcctggcttagccgcagcgtggacaagttaacggcgctccccgctcgccacaccatcgcgagcgagctccagggactcaaggagcgcgttcttgagattagccggcagcggaaccgctacaggctgggccaaatggttggcaccacctcgcaacatccccatgatcccagactttctgcgctcttcgtcgaccccggccgcctcgtcggcttcgatgggaaggtggaggacgtgtccaagactgtcatggacgccggaggtagtaatgggctgagaatcgtctccattgtcgggatggccggctcagggaagacgacgctcgcaaatgctgtgtaccggcgtctccaagcagacaacaccttccagtgctctgctttcgtctccatcggaccgaagccggacatggtgaagacagtcaaggatatgctctcaagactcggcgacggccaccgaggaggcgaggacattagccaactcatcccgagggtcagaggaatactggagaagaaaaggtacctcgcttggatcgatgatatatggagtagtgaacaatggggagtaataaggtgttgttttccagacaacagtcttggtagtaggataatcaccacatcaaggaatgatgcgttgcccaccaatcatcattacggttcaagcaaatttgtctacaagatcggcctccttactgacaatgaagccagggagttgtttctgaagaaagctttcagcagccggaatgactgtccacaacatctggtggatgcttttaccaaggttctgagaaggtgtgctggcttgccacttgctgtggttagcgtagctgccaagttagcacacaagcaatcaagagaagaatgggagaagcatggattgaacttgctatacagctcacattcagatgggtcagatgggctgaagcaaatactccatcttagctacagcgatctacagccacaactcaggtcatgtttgctgtacctgagcatatttcctgagaactcagaggttgagacagatcgcctagtgaggcgatggattgccgaaggactcatcgctgcaagcaatgaggatacggcaatcagttccctcaatgagctaattgggagaaacttggtacaaccgttggatctgaaccatgatagtatcccaaggtgttgcagagtccacccagtgatatatgatttcattgtttgcatgtcgatgcaagacaactttgccactgtaacggatgctcaacatgtcccaatcaacaacaaaactgtccgtcggctgtccctgaatttgaagagcaacagcaagcaagatcagcctgcagcacgaaatgagactactgatttgtctcatgctcgctcagtcactgtcttcggtcacgctagtgccacccctcatctgactgatctgaaagtggtgcgtgtgctggatctcgaaggctgcaaaggtcctgtgtgcttggatggcctatgcaagctggtgctgctgaggtacctgagcctcagaggcactgatgtcagtgaactgccagcggcaattggggatctaaggtgcttggagacacttgatgtgaggtcaacgaaggtggaagagcttcctcccagtattgtaaggctgcaaaagctaatgcatttgcttgctgggagtgccaagctgcctgacgggatggataagatgaaagccctgcggtcattgtcatgcgctgctaccacaaagagctctgccaacgtcgtggaagagctcagcaagcaccataacttgagacaactggaactgtattactatgctactgaaacgcctgggaatgagaagcaaatcaagttccccgctgatgggctccagactgtgaaacaactgtgcatccggtgcacatcaccatcggtgacatttgagccccgtgtactgccaaaggtccaagcacttgtcctgagattcgagaaaggccgtgctgatgacacgattggcgtgtctggcttagagcatctgtcgagcctcaagcatttggtacttgagtttgagcagcatgatgcgggtgccatggcgacagttactgcagtgaggatggctgctgaggggctccatctagatcatcaatatataactctaaaggtggatgggaaaaagtactgaggctatcttcagcaaaggcgtgtatataaacgtagaaagcactgttttacaattttttgtttaaccgtgcagtgctatgtaagctactaactttgcgctggtgcggatgctgatttccctccccctagctttttgtgaggctactctacagcttgattcagcttgctaataatgtttgcctctggacataaaaaaaaaaaaaaatagtctgatctgtcttcagctcgtgc

SEQ ID NO: 4171 - DNA, 1067 bp, Zea mays
  Clone ID: TF_ZmC748101_1
aaaaaggaaagctgctcgacaattaacaagccccctacatcagcatcagctcaagctgctcaattcaaattaacacactgatccccacacccacgccaggcgccattataccaactccatccaaccggctgcacctaaacctctccaagaacgcgccaataaacatcccctaaatctcagccacaagtcaccacacaagatctcacgccgaggggcgatccaaggcacgagagaccatgtcagcgtcgccggagaacgtcgtcgcaggcggcagtggcccgccggtcgcgtggtggagcgcggcctcgccggtgggcggcgacgtcgtcctctgcagcgtagccctcctcttcgtcgccctggccttggcgttcgtcctgtaccactactccacggccacggtcagtcgccgcggcggcggcgcgggggtggggggcggcgccaacgagcgcccagcagcaccagcagcacggcacgctgggacgaggacgcgacgccaccggcggccttgacccgtcggtgctccgggcgctgccggtgacggtttacgaggcgaaggacgaccaccgggcaggcgaggcgctggagtgcgccgtgtgcctcgccgagctcgccgacggcgagcccgccaggttcctgcccaggtgcgcgcacggcttccacgccgagtgcatcgaccagtggctgcgcggccactccacgtgcccgctctgccgcgtcgacgtcggcctgctccctgcgccggcgccggcggccgtcctcggccctccctccggcgctcccggcgcccgccacctaccccacggacctgccgacgaacgtcctgttctggggatcccagggcgcggtcaccgtggcgagggcggcggtacgcagcggcccgagcgctccccgtggagcgccgccgccgctggtcatccatgtcagggaaacggcaccggcaccgccaccgcctccgccgccgcgtgaaggcggcgcggcaaaagcgcagggcttggcgcggctgagttctctcaggcggctgtggagccgagggaggcatgacgacgctgcggctgcgaccaccc

SEQ ID NO: 4172 - DNA, 1190 bp, Zea mays
  Clone ID: TF_ZmC18438_1
cggcccgacccacgcgtacgcccacgcgtacggccacgcgtcctttatttctctagtaaacctttcaacactgttcaaaacagaatttgttactgtccttgtgtctgcattttctctactatacctctgcaacacatttcaaaaagtataatgagccaactcctctacttgtaatgtcaaggaaagcaacacaggaaatgatgtgcatggtgtgcctaaagattcaacccgttggtccgttctgccaaaccccatcttgtaacagactatcgatggcaaagtactactgcaacatctgcaaatttttcgatgacgaaaggactgtgtaccactgcccgttttgtaatttgtgtcgtcttgggaaaggtcttggtgttgatttctttcattgcatgaaatgcaactgctgtcttggaatgaaattaactgagcacaaatgtcgggaaaaagggctagagacaaattgtccaatatgctgtgacttcctgtttacatcaagtgccgcagtcagagccctcccttgcggccacttcatgcattcagcttgctttcaggcatacacttgtagccactacacttgtcctatctgctgcaaatctctgggagatatggcggtgtattttggcatgcttgatgccttgttggctgctgaagagcttccggaggaataccgtgataggtgtcaggatatactgtgcaatgactgtgagaggaaaggcagatgtcgatttcactggctataccacaaatgcggctcctgtgggtcgtacaatacccgagttatcaagactgacactgcagattgctccacaccaaattagctggagggaacatttgtgcttatttgtagcctttttttttctcttatgtaaatatcttctagcgggaaggaaaaaagagatgtcctgtaggatagttaacataatttcattcgtagcgatatcagttttgtaagtgtagcagtttacaatttactaggtctagtgcgttgtactgccaaaatggacggttctgctggacaaaggacataatccgagaaaataggctagttagaacaaaaaaaaaaaaaaaaagtactcgtgagcatgttctgcaatttggcgggcactcagactatcttcaattatatctactatattccttctttaagaaaaaaaatctttcgtattaattacggtgaaattgtgaca

SEQ ID NO: 4173 - DNA, 685 bp, Zea mays
  unsure (1)..(685): unsure at all n locations
  Clone ID: TF_LIB4570-011-R1-K1-B7
ccggggctctctgtcgccgacgactacgccaggtcttcttcggggcccaggtcgctgccgcctacatcaggggccccaagttttcctaggacccctcgccggcgacgagcaccaccagcttggttcactcccaacaaaatgtcagccaatgtgggtgaatcaactagcggtgtcagcagcagcgatgcagctggggggagctttgagtgcaacatatgcttcgagctgcctcaggagccaatagtgactctctgtggccacctcttctgctggccgtgcctttaccggtggctgcacattcacgcacactcgccagagtgcccagtgtacaaggccctcgtggaggaggacaagctcgtccccctttatgggcgtggcaaggatcgcgtcgacccgaggtcgaagaacatgcccgagggcgagattcctcaccgcccaacgggccagaggcctgccacagcggggaactcgcattctcagctgctttcgggggactgttccctatgcttagcttccaagttcatggggtttccagatgccgccgcttacgcgcagcctgctgggttccactatggatacgggcatgggcatgggcatgggggtccaccatggcgggcatatggggacagcacaagcccatgggcgtncaccgacaggcaccggttggggcaacaacagcagcagg

SEQ ID NO: 4174 - DNA, 1380 bp, Zea mays
  Clone ID: TF_ZmC26341_1
ccccacgtccgccctccgccccatcatctctctctccccagctctttctaccgtttctcttctagtcgagcggggaaaacaaagaaacaaaaaagcaaggaagcagctgcacgcacgccgtcgcctggccggccatggggttcccgtcggtgtgctactgcgtgatcctgccgcagccgctcatcctggtgctgcagctgctggacttcctgcggcacgccgtgctgctctgcctctcctcgctgggcctcgcggcgccgccggccgccgacgaccatccggcctacgcctacgcggcgccgccgccgccgccgtcggacctctgggcactgcagccgtcgtccctgcagcagcagcagcagcaggcggcggcggcggccctggcgccgccgcccacgccggcagccatcaaggcccgcctgcccgccgtccggtacgccgacctgctcggggcccgccgcgccccgccgggcccggccgtctgcgccgtgtgcctcggcgcgctccaggcgcggcaccgcgtccgcgagctcggcaactgcgcgcacgccttccacaaggcctgcatcgacaagtgggtcgacaagggccaggccacctgcccgctctgccgcgccttcctcctccccggcctcagcgccggagacggcgacggcgacggcgacggcgagctcgcctcctcctccttccctttctccttctgaacccacgcgtagtacgtacgtacgtacgcgcgcgtgctccagccgacaagcaaaagtgaaggcgcacggccggcggcgtgcgtagtacgtgtacgtacgtccctgcagcccggcggccgattgggaggcagagcaaggtcagtagcaaagccacctacctacttactacactactcctgctagctgatgagacacgagccccgtcgtacggccggccccggtcctgtgaccatccatggatcccgatgagacgagcaaggaaacagaggagagagaagaggaggtgtcagtgagcgtgaggtggtgcagtattattggtaggtgaggcacaaattatgaggaggacagggatggctacctgcattggatctggtggatgcgtagatccatccactccgcactgctccacccttttctcctgcagtgcagctccaattcacaccccccctctctctttctctctcttttgtttattaattaataattattagtttccttttctttttttttctttctctctctatctttctttcttttttctgtggtccctcctatatattattaacttgatctgcgaggggaaccaggagagatgtgcgttgtacatagctgcctccacttgacaataatattattgcaacggaacaaaaaaaaaaaaaaaaaggcccctagggcc

SEQ ID NO: 4175 - DNA, 1083 bp, Zea mays
  unsure (1)..(1083): unsure at all n locations
  Clone ID: TF_ZmC26341_2
tcccggtgcaaanaaacaaaaaacaagggaacagctgcacgcacgccgtcgcctggccggccatggggttcccgtcggtgtgctactgcgtgatcctgccgcagccgctcatcctggtgctgcagctgctggacttcctgcggcacgccgtgctgctctgcctctcctcgctgggcctcgcggcgccgccggccgccgacgaccatgcggcctacgcctacgcggcggccctggcgccgacgaccacgccggcagccatcaaggcccgcctgcccgccgtccggtacgccgacctgctcggggcccgccgcgccccgccgggcccggccgtctgcgccgtgtgcctcggcgcgctccaggcgcggcaccgcgtccgcgagctcggcaactgcgcgcacgccttccacaaggcctgcatcgacaagtgggtcgacaagggccaggccacctgcccgctctgccgcgccttcctcctccccggcctcagcgccggagacggcgacggcgacggcgacggcgagctcgcctcctcctccttccctttctccttctgaacccacgcgtagtacgtacgtacgtacgcgcgcgtgctccagccgacagcaaaagtgaaggcgcacggccggcggcgtgcgtagtacgtgtacgtacgtccctgcagcccggcggccgattgggaggcagagcaaggtcagtagcaaacccacctacctacttactacactactcctgctagctgatgagacacgagccccgttgtacggccggccccggtcctgtgaccatccatggatcccgatgagccgagcaaggaaacagaggagagagaagaggaggtgtcagtgagcgtgaggtggtgcagtattattggtaggtgaggcccaaattatgaggaggacagggatggctacctgcattggatttggtgcacgcgtagatccatccactccgcantgctccccccttttctcctgcagtgcagctccaattcacacccccccctctctctttctctctcttttgtttattaattaataattattagtttccttttcaaaaaaaaaaaaaaaaaaaacaaaaacc

SEQ ID NO: 4176 - DNA, 2189 bp, Zea mays
  Clone ID: TF_ZmC12362_1
cggacgcgtgggcgcgttcgcctagtctccttccttttcctctcgctctccgcctccatcagctcgagccgcttccttccacccaccacgcaccacctgacctcccttccctcatcggctcctcctcgttcccactaggcaggaacgccgcgcgccgagccgagctagcggccggaatgcccgcgcagaagcgcccgctcccgtcgtctgcctcgcccggctccgacgccgacgtcgaggaagctcctggcgccgacgcggacggctgcggcggggccgaccaacggtcgccgaaggtgacgctgaacggagtggaggagcgggacggcgggccgctgcaggccaaggaccagcgccacgattccgacgctgacgacgaggaggaaggagaccgcgaaggcggcggcggcggggacgggagcgggagcggaggcgacgacgactgcgacagccagtcgtcgcagagtgacggcgtgatggacgagtttacgcttgtgaaattagtggatgttcggaaggaagtgcaatgccctatatgcctaggaattattcggaagacaaggacagtcatggagtgtttgcaccggttttgcagggactgcatagataaatcgatgcggcttggaaataacgaatgcccagcgtgccgcactcattgtgctagtagacgttccttgagggatgatcctaactacgatgctttgattctagctttatatccagatattgataagtatgaggaagaggaacttgcattcagtgaagaggaaaggacccgtaacaaaaggattcaagaatccattgctgagacatttcggaggcaaacagaagcacttgtgaagaagcgctccactgtaaaagcaacagatgcagcttctacaaggaagactcgacggaatatgcgaccaaggaggagaggacgaattagttctcctgatattgccccaactgattttgacgatgatgatagagaagagaacggtgatgatggaagcaaggagtcgtcttctgttgatgatcactccccagatgtaaggccaaaaagatctcggaggtggcccatgccacgccgttcccctgctaaggccattggcaataccgacaatagcattgaggataatgacgactcaggaggtgctagggactttatgactgcttctccgctgcggggagagatgcttgcatgggggaaaaatggcacccgcagccaaacccggcatggcaactccagtggctccagcggaaggatgggcaggagtggccgtgttgccaagttggtagatcagttccgtaatgctgatgacttcgataatgagttgaacctgtatcttgtcctgcttccacttgatggtcaaagtgtgcctaaactggaaaagccctacctcagttgcctgccaacactatctgttcggcatctctgccagtttgttgctctccagttgtctcggcaacccaaagaagtcgagatatatatcaggaaaagcaaggatgcatgcttgtcagccaattacacctgtaaatacgagacaaagccagaacagcctaatggtttagagagactgtgggaagagaagtctctttcggatctctacccttccctcgccacccgtcaaggagatctggaattgttatactctctgaaagcacaaggacaggggtagatcagatattcactatcaactcgaccagtcgcctcaacgccactgtctgcaaggaccttcaactggtggaagcttgtacataaggctttcaatatagaaaaagatctgaaagtagcttacttgttttaaatttgctctgatatcttgtgaggtatatggtatacccaggttcattagtaaaaatgtgtggagttgagcagtagcaaaccaaccatctgaaacaggctgagcaaagcttgtctatttctgcagccagtattaattgtgtcccatttgaactgatgcaagtactgaggacctctgttccaggatgatccgtggcttgctgtcgtcgccttgtgtgacgcgttcgcgttatccatgttgtcacgccacgtgtccgcgaattagaatgtccagttgttaaccagtaggaaatggtaaacatctgcagctttgtagggacagtattgaaatttttgttgtttatacaataaagctcacgggtcgttgctgaaaaaaaaaaaaaaaaaaaaaaaaaaaaaaaaa

SEQ ID NO: 4177 - DNA, 526 bp, Zea mays
  Clone ID: TF_ZmC147852_1
ccacccgtccgcccacgcgtccggcgcttgagcaggaaatccctggcgccggccgcgagctgctggtccgggctggccggggcgatctccgccgccgccgtcagcggctgcggtaccgggtggaagaagagcaggtcgtccaggctgggccgcgtccgccgcgccgccctttgcggcggcgatggtacgggcggcggcagcgccacggcggcgcggcagagtgggcaggacgcgtgcgcgcggagccacacgtcgatgcagtcggcgtggaacgcgtgcgcgcacagcggcagcgtgcgcagctcgtcgccgtccgcgaactccagcaggcacaccgcgcactccctggacgccccggagccccgcgacgacgcgccggcgccggcgccggccaggtactgcgccgacggcagcgacttgatacggcgttcgtcggccgtagtaggtgagaagtgtggtagtagttgtcgtacgtggtgaaagacgcgaaggagtcgtccccgctgcggcgcgccgagggggagcc

SEQ ID NO: 4178 - DNA, 1867 bp, Zea mays
  Clone ID: TF_ZmC2185_1
attttattttccagtacctctcacactttaaccctccctaattcacagtttatccttgtctcaatacataatatcgtgatatattactccccgccatgtcgataatgttggcttcccctaaataacgaatgcccaccgtgtcgcacccattggcggcgcagacgttctttgaggcatgagccgcaatatgatgccctacaacctaggggcagaccagatattgataagtaaagaagcgccggttcccattgctgtcttcgagagagcattcagaaatggcggctcccacctctgatgccacctccggtggaggcgtagaaggaagaggagggcgcccgccgctgccgagcaggggcgcctgcaggccgaggttgactgacccggagccacagggcggactcgaagacgattcggacacggagggtgacggcggcgcggacggcgacagtgaatcctcgcagagcgacggcggcggcaccgacgagtttatgctagtgaaattagcagagatacggaaggaggttcagtgccctatctgcttaggcattatccggaagacaaggacagttatggaatgtttgcaccggttctgtagagactgcatcgacaaatctatgcgactaggaaataacgaatgcccagcgtgtcgcacccattgtgcaagcagacgttctttgagggatgatcccaattatgatgcactgattgcagccctgtatccagatattgataagtacgaggaagaggaatttgctttcagtgagcaggagaggattcggaataaaaagatacaagaaaccattgaggaaacattcagaagacagtctgacgcaattggtaagaaacgttccatggcaaaagcaactgcaaccgcctttgcaaggaagtacaggagaacacgggggagagttagaaccattccccctgatattgcccctactggctcttctgaggaggaaagtggagaaggaaattccaaagagacaatcagagagcaatcttctgctgatgatcattctccagatttaagacagaaaagatgcaggaagaggtctggaccacaaggatcacctgctggaaccattggcagtatcgactacagctttgaggagaatgatgaattagttggtggaaaagaaattttagccacctctccgttgcagggagaaatgcttgcttgggggaaaaatggtgcacggagccaaaatcgacatggcagtgttggttcaaatggcaggactggaaggagtgggcgcattgcaaaattggttgattacctccatactgctgatgaaatggataaagagtttcagttgtttcttcttctccttcctgtcgatggacaaaccatacctaacttggaaaagccttatctaagctgtcgaccaaccttgtccattaaacatcttgcacagttcgttgctcttcagttgtcttgtgaagtcgaagaacttgagatgtacataaggatggaccgccaccgtgtaagtgttggctcgaggccttccagtacaggtgaggcaaaatcacgtccatttgatgacttggaaagactgaacgaagaaaaacttgtttcggagcttcatccttcatttgtctctagcaacggtgatatggagttacgatatgctttgagaactcgggagtagatcagtttttatcctcagctatcaatttatgaagtcatactgtccttgtgtaaaaaaaatgttcgatgtgaacaatgttgacgctgtttttctcattggtcatgctaagttaatttaccatctttgtaatatacataatgaactgattagcaaatgacctcagtaggtgaacccagttgtatgctatgtactgttcatttatgcgagtcgatggcagg

SEQ ID NO: 4179 - DNA, 693 bp, Zea mays
  Clone ID: TF_ZmC341_33
attctgcgttgctctggcttgtattattggtattgctgtctgttgttgccttccttgtatcatagcaattctctatgcagtatctgatcaggaaggagcatctgaagatgacattcgtcaaatcccaagatacaaatttcggcggacggatgagcctgagaagcaagatgttgaccccatgggtccttttggtggaataatgatagagtgcggaaccaatcaacctattgagaaagtgcttgcagctgaagatgcagagtgttgtatttgcctatcggcttatgatgacagtgcagagttgcgcgaactcccctgtgggcaccatttccactgcacctgtatcgataagtggcttcacatcaatgcaacatgccccctgtgcaagtacaacattcggaaaagcagcagtagcagtggaagtgaagaagtatgaatgcagtctgcttgacaatgcaaatctgtttcaacttctgttccgttgctaatgtaactccaggccttgatgagtgtaaatttttgtatcaaaaaaatgtgctgatagagtcagttatttatcaaagttactcaaagtgctgtcaatatgtcgtataagttaataaatagttgggtatgcttctgtatttactgacaggaatatattattagttgcattgttatccttcaaaaaaaaaaaaaaaaaaggcccctagggcc

SEQ ID NO: 4180 - DNA, 1499 bp, Zea mays
  Clone ID: TF_ZmC341_57
agccggccgggatatttccattcctacgaagaaagtatttccttcgtcctgaatcctgatctctcacggagttcccctgtatggcgacgcctcgctcaccgagccccagcgccgccgcgcgtctcgattctgcgccgctgctgggcggcgcctccggcggcgggtcccgtcgccgaggtggagcgcttcgccggccctccctccgcggcgcggcgcggctgctgcgtcgcggcgggcggcgggccatgcgggagccctcggtgctggtgcgggaggccgccgcagagcacctcgaggagcggcaggctgactgggcctactcccgccccgtcgtggcgctcgacctgctgtggaacctcgctttcatcaccgtcgctgcggtcgtgctcgtgctcagccgcgacgaggactcgcccatgccgctccggacttgggtcgccggctacgcccttcagtgcgtcgtacacatgatttgcgtcgcaatcgagtacaggatgcgccacggccagcggggcggcgccggcgctggcgcagcgcccgcagacgtggaaaggggcagcgacgcatcgtcctcatccagtgacgaggatgacagggagctcgatctccatggtcgccgcactgattacgccagtattgcgaagcacttggagtctgctaatacaatgttctccttcatatggtggataattggattttattggatatctgctgggggtgaggaggttattcgggatgcacctcaactttactggctttgcatagtctttctggcatttgatgtgttttttgttgtattctgcgttgctctggcttgtattattggtattgctgtctgttgttgccttccttgtatcatagcaattctctatgcagtatctgatcaggaaggagcatctgaagatgacattcgtcaaatcccaagatacaaatttcggcggacggatgagcctgagaagcaagatgttgaccccatgggtccttttggtggaataatgatagagtgtggcaccaatcaacctattgagaaagtgcttgcagctgaagatgcagagtgttgtatttgcctatcggcttacgatgacagtgcagagttgcgcgaactcccctgtgggcaccatttccactgcacctgtatcgataagtggcttcacatcaatgcaacatgccccctgtgcaagtacaacattcggaaaagcagcagtagcagtggaagtgaagaagtatgaatgcagtccgcttgacaatgccaatctgtttcaacttctgttccgttgctaatgtaactccaggccttgatgagtgtaaatttttgtatccaaaaaaatgtgctgatagagtcagttatttatcaaagttactcaaagtgctgtcaatatgtcatataagttaataaacagttgggtatgcttctgtatttactgacaggaatatattattagttgcattgtaacttgtgtccttttgaatgatccgggtgttttcctgcttggttaatg

SEQ ID NO: 4181 - DNA, 1585 bp, Zea mays
  Clone ID: TF_ZmC341_66
ctaaatcccgtcccccaattccattctcggaagagaccatttccttcctcctgatctctcacggagttcctctccatggcgacgccccgctctccgagcccccgcgccgaagcgcccctcgattccgcgccgctgctgggcggtgcctccggcggcgggagccgtcgccgaggcggagcgctccgccgaccctcgctccgcggtgcggcgcggctgctgcgccgcggcgggcggcgagccatgcgggagccctcggtgctggtgcgggaggcagccgcagagcacctggaggaacggcaggcggactgggcctactcccgccccgtcgtggcgctcgacctgctctggaacctcgccttcatcaccgtcgctgcggtcgtgctcgtgctcagccgcgacgaggactcgcccatgccgctccggacctgggtcgccggctacgccctgcagtgcgtcatacacatggtgtgcgtcgcaatcgagtaccggatgcgccatggccagcgcggcggcgccggcgcagcgcccgctgacgaggaaaggggcagcgacggatcgtcgtcgtctagtgatgaggatgacagggagctcgatcgccatggtcgccgcaccgattacgccagtattgcaaaacacttggagtctgctaatacaatgttctccttcatatggtggataatcggattttattggatatctgctgggggtgaagaggttatccgggacgcacctcagctttactggctctgcatagtcttcctggcatttgatgtgttttttgttgtattctgtgttgctctggcttgtatcattggtattgctgtctgttgttgccttccttgtatcatagcaattctctatgcagtatctgatcaggaaggagcatctgaagatgacattcgtcaaatcccaagatacaaatttcggcggaccgatgagcctgaaaagcaagatgttgaccccatgggtccttttggtggaataatgacagagtgtggcaccaatcaacctattgagaaagtgcttgcagctgaagatgcagagtgttgtatttgcctatctgcttatgatgatggtgcagagttgcgggaactcccttgtgggcaccatttccactgcacctgcatcgataagtggcttcacatcaatgcaacatgccccctgtgcaagtacaacattcggaaaagcaacagtagcagtggaagtgaagaagtatgaatgcaaccgcttgacaatgccaatctgtttaaacttcgtgcctgtgtcgttgctaatgtaactccagggcttgagcagtgtaaatttttgtactaaaagaagtgctgatagagtcaattatgtattaaagttactcaaagtgctgtctatatgtcgtataagttaataaatagttgggtgtgcatctgtatttactgtcaggaatgattagttgcactgtaacttgtattctttcgagtgattcgggcgttttcctgctgggctatgatggcagtttgtcttccatggtttctactgacaagaaattttcgactggccattatttacagcagcgacatagctgatgaaagaagccaattggtgatgg

SEQ ID NO: 4182 - DNA, 2447 bp, Zea mays
  unsure (1)..(2447): unsure at all n locations
  Clone ID: TF_ZmC6308_1
ccggccgggccgggactgggcaccggcgcacgaacgccgcgtgctccccgaccaccagctccaattccctccctccaaagcccccccaatcccttcacacggttctgcccaacacccaattgaagacgtcccaatcccaaccctactcccttgcctccccctaatgacatcgcctggcggcgtcttctccgccgcgctcgtcgccgaggacttcccttgggtggacatggaggaggagatggggatggccccggacatgtaccgcgaggtgttcgacctcgcgcagcgcgggacacgagcctttcgcgaccgcctcttcgacgaggcaatatcctgttacactaaagctcaaaatttgagaccagatccaattatccttggcaatcgaagtttgactttctgccggttaagtcaactgttgagggagagatcagcagctgactctgaatatcagcccttgaatggccttgatcctacaactcatgcagagttagctctgaaggatgcagagaagatattatctatcaacagtaattctcctagaccatatattctcaaggcatatgcgctatttctgatggagcattaccatgaggcacgtgagacccttcttgctggtcttcaagttgatcccctcagtcatgtcttgcaaacctgtctgaatgatctggataggaatacaaatattgcagctggggcaaggcgtgcaaggttagctaggattgatgattttgagtgcacattatgctttaagctattgtatgaacctgtcactacaccatgtggccattcattttgtcgctcttgtctacatcagtcaatggatcatggtaataagtgccccatgtgtcggacagtattatttatcggtccaagaacatgccctataagtgtaacattaagcaacataattcaaaaggcttcttctggattctggggtttcttaagtggtttattttaagtcaagcgatctgctgtacggcgatgcaatcctccttgtatatttttatctgataatggatgtaatatggttcggaaaatatccgttcggatccggattcgaagatggtgaacgctggttcagatggaattttcggatatccgaatggttgctatagattcggcaacgggtactgtagctggttgtggctgtgaggtggaaatttcaatgtgtgaaacactgtcggatatgcgcttttattgataggtggaaggcacacgtcggtttcgtatcgtgcgatcatgggctcgagtaggtgatagagttgctgaagttgaatggttgaaagatttacctctgccacaaggttcacaaggaagaagagaactaatggaactggccaatggagcttcacagctggccagggcatatatcagacatgctagagataccgtacggactgcaaggcgaacaagacatctggatcttgagggcatgcctgggccacaggacccggaaaaatttagtttctggctagccaacttgataagtttgaggccctcggatagattagatacgttacgccttcgcgacactagggagagaatttctagtagcatcagtttgctccgtgattccgaacaaggctgccgtgtacaatgacggaaacagtacaagaatcgtttccacagaccaattcgttcgtctaggagtatatcgatttggagctactccgtgattccgaacaaggctgccgtgtacaatgacggaaacagtacaagaatcgtttccacgtaccaattcgttcgtctaggagtatatcgatttggagctactccgtgattccgaacaaggctgccgtatacaatgacggaaacagtacaagaatcgtttccacagaccaattcgttcgtctaggagtatatcgatttggagctagggatgtaatatgattcagaaaatatccgtccagatccagactcgaagatggtgaatactggttcggatggaattttcggatatccggacttttttcggataacggatacaaatacggatattttattcggatatcgaattcgaatacaatatgtctgatatctgtcggatatcgaatatccggatattttctcggataaatcttctcggatatccggatagctgtgtgtattttgttgattttttgtagaaagaaattaataatacacaaatatcctcaaaaattcatgaaaatttatggaggcataccatatgtccacatataatcctccaaaatatttggaccataaaatccacaatattgtagtgtttctttcatttcactttcacttgtgtgaattacacgggaaatcactctaattatccaagttcactttatcatttttatgaaaccaatacgaacggtctaacctcaattaattcggctaccgctctataagatcctagcttacgtatctggaggcaaaaaaaaaaaaaaaagggcggcgcacgcgtcnagaaaaccggg

SEQ ID NO: 4183 - DNA, 706 bp, Zea mays
  unsure (1)..(706): unsure at all n locations
  Clone ID: TF_LIB4764-057-R1-K1-C6
ttgggaccctcgaggccggccggcatttctttgtgctgccatttgtccctgtattgttattctattatgttgtgttatcttctgaacacgtggtcatggttgacaggtgctcggtctgcctagcagaatacgaaccggacgagaggcttcagaagatacctccctgtgggcataccttccacatcaactgtatcgaccactggctctccacaaacaccacctgccccctctgccgagtatcgctccttcccgcccccaaggcaaccagcaccggactggatctggaagcacagactgcggtagaagaggagtctccgaacgcacatcatcgccaggaggagggactcgttgatgccaacacaccacaggaaggtgaggcggccggaggtgacggatcaagtagcgtccaggttgaagaactgcacggcgatgcggccgagccattggcggtgacggtggtcgctgtcgctgcgcctcaggctgacgctgaaggttcaccgagtacagcatgccaaactgttaaagggaagaaataaggatagcctagcccatcgatgtatttctattaccattgtgtgtttagctgggaaaggaaaaaaacgcataaagatggggccattgatgttatgattgccatttttctggngaggaagaagaagagcaagagttcagttgtggggaaatcttattgatacagcacttaacc

SEQ ID NO: 4184 - DNA, 1851 bp, Zea mays
  Clone ID: TF_ZmC2248_1
tattctgtacctcgaggccggccgggacttctcgtcccaactcccaagttgcaacccagccacctcgtctcctcccctccaactccaagcctactcccacccgatcccccctgccccgcccccggcgccgccggttctcgcattcgcggcagtccatctcgctgccccttcccggcggcctctgatccgtgctgctcgtcgcccacgcgaaacctgccgcctcccttgttgccgcgaccgcgagccctcttccctcccctcgcggccctgatctcagttccactgtgccccgaccgtgatccgtccgcacccgcttcatgcccagcagcgttcaatccgtcccctaatgccgctgcctccaaatagttctccgtgtgctggttcttgcggattgcgctgtcaggtccacataatattggggacggtgcagagtgtcctccgttttttcctctctcgcacctaaagttttcgggagcagttagttagagtatattcgattccccctgatatagtttgtttatttcacactacgaagtctatgcactcgagagaaaaatcactggtagcgacggcatcaattcttgtgacgtttagtggctagaacaccctcactagcgctcattcatgtttacccgaccttgtccttttcccttccgccttccgtgtgctggtatcaatttgttgtaatttggggaggccaggagttttctcgccttcttgcccttgttctgcccgtagtaagtgcttgccgtttggttgattggaactcccaagtgttcgtcggtcacatttatatagctttacctcactaggataatcataagcaaggtttccccaaaattcttagaccagttgggatcaggacccgaaggtagattgtgttggctatttgccggtagggcattgtgactccgtgatgtcttgcacctctccagatccaccagactactgctcagccgaatcgcctgagctcaagctgtaccaggccttcatcttctcggtgcctgtcttcttcacgttcgtcttgcttctcttcttctacctcttctacttgaggcggcgcagggccaattggcagtccttgcggatgaggacaaataatttgatacgaggagataatgccagactggagtgtggcttaaagaaggagatgcgggaaatgttgccagttgttatcttcaaagagagtttcttgatcagggagacacagtgctcggtctgcctagcagaatacgaaccggacgagaggcttcagaagatacctccctgtgggcataccttccacatcaactgtatcgaccactggctctccacaaacaccacctgccccctctgccgagtatcgctccttcccgcccccaaggcaaccagcaccggactggatctggaagcacagactgtggtagaagaggagtccccgaacgcacatcatcgccaggaggagggactagttgatgccaacacaccacaggaaggtgaggcggccggaggtgacggagcaagtagcgtccagattgaagaaccgcaccgcgatgcggccgagccactggtggtgacggtggtcgctgtcgctgcacctcaggctgacgctgaaggttcaccgagtacagcatgccaaactgttaaagggaagaaataaggatagcctagcccatcgatgtatttctattaccaatgtgtgtttagctgggaaaggaaaaaaacgcataaagatggggccattgatgttatgattgccatttttctggggaggaagaagaagagcaagagttcagttgtggggaaatcttattgatacagcacttaacataaccgagattagtagtacttgtgagctgtttttcatctggt

SEQ ID NO: 4185 - DNA, 714 bp, Zea mays
  Clone ID: TF_ZmC208303_1
ctagttctagatcgccagccgccgccctttttttgttttgttttattttcaaacgggcccttgcattcatcaaaaaaagttaagagctcacagccttgtcttgatactgcgccactcacgcaagtgcgggatgtacaaatgatgaggaaaacgaccaaactaaaaaggccgtcttttttttagagaaaaaaaataatagagtaattaattattcacggcaacagcatactgctgccgttccaagtcgtccaagtccccggcgtcggcgtaggcgccctggggccttcgcggcgccggcctctccctgctcaacatcttgatgagcgacgcacaggcaccgatcccccggtccggagtggagctgccggcttcctgcttcacagcgtcctgcactttctcctgcacgaaccgagctgagcccaccgccgtcggcggcggcggctccacctcggcgcggcagaccgggcacgacgagctcgacgcgagccaagtgtcgacgcaggggacgtggaacacgtggccgcaggccggaagcgcgcgcacgacctcgccgtcctgcacggcgccgaggcagatggtgcactcgtcggagccggcgcccgcctcggccgcgtcgttcctgtagagggtggtcggcagcgccgcgatggccgcgggatccagcccgcccttgggggccggcgccgcggccgtggtcggcagcaagacggctat

SEQ ID NO: 4186 - DNA, 743 bp, Zea mays
  unsure (1)..(743): unsure at all n locations
  Clone ID: TF_ZmC50086_4
ggagggcgctgagtgcnccgtctgcaaggaggatttctcgcctggagaggtggccaagcagatgccctgcaagcacatctaccacactgactgcattgtgccgtggcttgagcttcacaactcgtgccccatctgccgatttgagctgcctactgacgatcctgattacgaggggcggaagggcactaatcctcagccggctgttggtgtggctgctgctgcatctgggagctctactgctgctgagggacagatggaggagaggcaggagaatccaagggtggttgagaggaggttcaatgtgtcgctgccgtggccattcagtggactgggagggcaaacatcgcagcagaatgggaacagtggaggcagtggtagcaactcacaaggaaatgcacaggatggtgacccacccagcaacaagaattgatcacaaatcagctggaggttacaccttgtggcgatccgttgagaagtctgcagtatttatgtgtcaccatgacttctatacctacaggaatttacagtctatttgttatggaacaatcgttttgttttacttccctttgtcgctgttggttaggtcatgtagacaaggcagcgaaagctgccctgcagcggaatccgcgcgttgagagggtcgagactttgtgtagatttattggttggtcctggtgtatgatgaaatggtgaaatcccaaaaaaaaaaaaaaaatagcgaaaaaaaaaaaaaaaaagcggcc

SEQ ID NO: 4187 - DNA, 1040 bp, Zea mays
  Clone ID: TF_ZmC628035_1
cctcgaggcgcggcgggaggcttccttgcttccttatcacggatcaccccaccaccacacccatgggcccgatcaatggccgccgccgccgccgtctcctgctcctcgccgcggttgctctcgccggcgccgccgtggacgcgcagcccgactacttcaaccccaagaatttcaacccgtccatggcgattgtcatggtcgtgctggtcacggccttcttcctgctcggcttcttctccatctacctccgccgatgcgcggggcccccgctgggcgggcccgacgaccactaccatgtgaggcagctgggtctggggctcggcaacaacagctacgcgccgccgcccagcaggaggatgcgcggcctcgaccgggccgtgctcgactccttcccgaccatggcctacgccgacgtcagggcgcacaagggcgcgctcgagtgcgccgtctgcctcagcgagttcgacgacggcgacacgctccggctgctgcccaggtgcgcccacgcgttccacaccgactgcatcgacgcctggctcgcgtcgcacgtcacctgccccgtctgccgcgccatcctcctcgtccccgacgctgccgagcccaccgcgttggctgctgcccctgtcactgcagcgccggatgatgaccatgccgtggtggtcgacgccgcagccgctgccggggagaccgaggaccagaggctcatggagggaggaggccgccgagctgctgcggatcgccagcgccaagcgcgcgctgcgaagcaacaagtcgcagttcccgcgctcgcacaccacggggcactcaattttaggagagtcgctgcttggttgcgctcctccttcactccttctggacgcgtgttgtattcattttttcttcaacaaaaagcatgtacataaaattagtagttttttctttgaaattaagatacatatatactacctctaagtacaagcacacacgtaccttatctcttatgaataaatattagaattgatgaagtcatttttttaaaaaaaaaaaaaaaaaaactcact

SEQ ID NO: 4188 - DNA, 653 bp, Zea mays
  Clone ID: TF_ZmC146415_1
ttgggaccctcgaggccggccggggctgcggctgcggacacccaaatcttccccgaaaccactcctcagcccggtgagcgctcgaccatcagaaatgggcgccggcgacggcaatggcacgcgccccaaggcgaacgaggtgacgatctcgtgcgacgagggtcccgggcacgcgtttccgttccccaagccgcacgcccccgaccccgacccaccgcaggcgtccgacccggcgaactacgccgtcgctggcaagatactcctcgccgcggcgggggcgttcgcgggcgtgctcctggcgctcgtcgcgctgcacctctacagcagcacccggcgccggcgcctcggcgccggccagccgcggctgctccggagcttggccatcgccggtggcgacgaggaccgccgcgacggcgacggcgacggcgcgggggcgccttccccccgcggtctcgactacgcagtccttgccgcgataccagtagtgtcgatcgaagcaggcgcgggggcaggggactgcgcggtctgcctcgcggagctcgagtcgggggagaaggcccgcgcgctgccgcggtgcggccaccgcttccacgtcgagtgcatcgacgcctggttccgtgggaacgccacatgcccgctctgccgcgccgacg

SEQ ID NO: 4189 - DNA, 775 bp, Zea mays
  Clone ID: TF_ZmC7896_6
cattgggtacctcgaggccggccgggaccacattcttttttctccggacgcgctcgttcgttcgggaaggcgccccttcctgccctcacatccgctcctccctccccgacaccgaccgacccctcgtccgctcgcctccctccccgatccccaccgccatggccgccgccgccgccgccgcgtcctcctcttcctcctccggggttccgatcgccgcccgcacctgcgtctccgtcggcgaggtggcggtgggcgcggtggctacaggcagcggcgaccgggtggcggcggattgcggggtgtgcgccatctgcctcgacaggatagcgctccaggagacggccctcgtcaagggttgcgaccacgcctactgtgtgacctgtattttgaggtgggcatcctacaaggagaaccctctctgcccacagtgcaagcatccattcgaattcctcagcgtgcaccgctctctcgacggctggtaaccccttgttcatctgaaatggtgggagggtggctgaaaattttcaggtagaatgtgagcttgatgcttgtttcttttcttcagcctacatgactacctgtttgaggagagtgtttgcctccttctgagggcagcttggtttgaacctctgatcgtagaggctcacgaggaggctctggaagaagaagagtttctccaccagcagtaccaatacgatgatgacgaagatgatcttgacgaggaatcttattacatgaacagggtccccaagcatccgtattggtaacaggagat

SEQ ID NO: 4190 - DNA, 1551 bp, Zea mays
  Clone ID: TF_ZmC3507_2
ccgaattcggcacgaggcccgtctccatcctcgctcgccgccatggaaggttcgaaggggagtggaggtggtggggccggtgccgggtccgaaaagccaagcgccgagtcgaaccctagtctgaatctgccgccacctaccgcagcggatgtcgaagccacggatgacggtggcgccacggccgcggctgcggctgcggccgaggcggccaggcggcccttcacggccctcagccaagaggaagctgacctcgccctcgcccgcgtcctgcaggagcaggagcgggcgtacatgttgctccggatgaacgggggcggtggcgagggcagcgactacgggagctctgatgaagggagctacgaatatgacgaagagggagaggaggactacgaagaggaactggagcaccacctccgcgtccaccaccacgagcacccctcgggcgatggtgagggagagggcgggggagggcgagggcgccgaggggagcgactacgacgaagagttcgaggaggacgaagaaggggagccggaggtagatcccgcggagtttgaggacgatgaggcttatgcgcgtgcgctgcaggatgctgaggagcgtgaggtcgccgcacggcttatggctctcgctggtctcagcgattggcgaacagtggaggtggagcatgaggaggatcatgcgaatgatccacaggaggcatggcaagaggttgatccagatgaatactcttatgaggagctagtcgcattgggtgaagtagttggcacagaaaacagaggtctctctgctgatacacttggttctttaccttcagtaacatacaagctgcaacatgttcaggatggcaacacagagcaatgcgtaatttgccgtgtggaattggaggagggtgaatctttgattgcactcccctgcaagcacttataccatcctgaatgcataaaccagtggctgcaaataaataaggtatgccctatgtgcagcgcagaagtatcaacctcgggtaacaaggagccatgactgctcctccgatggctatcttgggaacttggtgggaataactagcggcatcactgcagcatctgtattgttgaaacaaaagcagaaaaaacggtctacatacatgcaaggagatcaggatataatcctcttgtcagtctaaagttctgcccttggttccctgctaactggattgattggccttgccgcttattatctcagttccctatgaacgccttatggctgttgtatgatccataaattatgctaattatattatattgttagtcatcatcctattaaaaaaaaaaaaaaaaaaaaaaaaaaaaaaaaaaaaaaaaaaaagaaaaaaaaaaaaaaaaaaaaaaaaaaaaaaaaaaagggcaagcaaactaaaaaaatcaaaaattaggggggccccgttttaaagaacccaactttttttacccgcgttgcgactggaaaaacctttttttggggccacctaaattaatttggcgggcccccttttttaacccattggattgataaaacaaaggctttccccaatt

SEQ ID NO: 4191 - DNA, 658 bp, Zea mays
  Clone ID: TF_ZmC3507_4
catgaggaggatcatgtgaatgacccacaggaggcatggcaagaggttgatccagacgagtactcctatgaggagctagttgcattgggtgaagtagttggtacagaaaacagaggtctctctgctgatgcacttgcttctttaccttcagtaacatacaagatgcaaagtgttcaggatggcaacacagagcaatgtgtaatttgccgtgtggaattggaggagggtgaatctttgattgcacttccctgcaagcacttataccatcctgaatgcataaaccagtggctgcaaataaataaggtatgccctatgtgcagtgcagaagtatcaacctccagcaacaaggagccatgattgctctcggatggccatcttgggcatttgatgggattaactagcggcaccactgcagcatctttatgcttcaagcaaaagcataaaggaacgtcttacatacatgcaaggagatcaggaaataatcctcttgtcaatctaaagttttgtcctggttttctgctcactggatttattggccctgcagcttatatggtcttagttcccttcggacgccttatgatccataaaacatgccaattatattatattgttagttattctttttactaaaaaaaaaaagggcggcgtgcatcagaac

SEQ ID NO: 4192 - DNA, 875 bp, Zea mays
  unsure (1)..(875): unsure at all n locations
  Clone ID: TF_ZmC420590_1
ggctgccgcttccggcanaacatccaggagcagcagcagctaccagctagctctcgcaatgagcatgggcacgcccacctcgtggctgttcgcgtcggacaactcgcggtacagcacccgggcgcggctgctcttcatgggcctctccttcgccatcggcatcctcacgttcctcctctacctcgccatctggtacctctgcagccgccgccgccaactccgccgccgtcagcgcggcgagctcttcgcgcccggggtgggcgacacggacggcgaccacggcatgagcgcggacgcgatcgccgcgctgccgacgttcgtgcacggggcggaggcgccggcgctcgactgcccggtatgcctcggccaggtggaggccggggagaaggtgcggcggctgcccaagtgcgcgcactccttccacgccgactgcgtcgacgcctggctccgcgcccactccacctgccccatgtgccgcgccgccgtcggcaccgcagccgccgccaccgccaccaagcagcaggccgaggtggcggccgtcgtcgtcgtcgtccccgtcccgtccccgccggcggaggcgttgccacctgtgtagtgtggcgtacgtctgtcgtgtggatcgatgcgaggagatggaggaccaccgcgcgccgcctgggccggctgggaatgcttgaagctgactgatcgcacgcatgattggagaacagcaacggcgagttgctacaacagtgatagacacagcacagcagtgctatctttagcttagctagagtggtaacgtactaggatcgtatcaccatcgtacgtatctggctgcgtgttcacatatagaggcttattattatattagttaattaattaattgattaatt

SEQ ID NO: 4193 - DNA, 759 bp, Zea mays
  unsure (1)..(759): unsure at all n locations
  Clone ID: TF_LIB4828-050-R1-N1-D2
actccatagggcgaatgggatcctcgaggccggccgggggctgcccgtatcctccaaattggttcgcgaaacactcatcactagtaccaatggaaacaacactccccatggtccggggcaatggccgcctcctgcccttgtcccttctcttgctcgctgccgccgatttcacaacggtgcatggccaggggcagcagcctgaagggccgtactactcgcgaagcttcaacccatccatggccatcgtcatcgtcgtgctcatcgccgccttcttcttcctcggcttcttctccgtctacgtccgccactgctacggcgacggctctagcggctactccgcgagcccggcccccggcggtgccgccgcgcgatcgcggcgccagcagcgcgggctcgactcggcggtgctggagtccttcccgaccatggcgtacgccgacgtgaaggcgcacaaggccggcaagggcgcgctcgagtgcgccgtctgcctcagcgagttcgacgacgacgagacgctgcgcctgctgcccaagtgctcccacgtcttccacccggactgcatcgacacgtggctcgcctcgcacgtcacctgccccgtctgccgcgaggcttcccgcctgnggatcgcggtcgacgcggaggagcgtccagactgacgggtcgagcaagggcggtaggacagttggcgacgccggcgcaggcgccaagtctttctgacatgacgacccagcgtgcgcgcctggacagcgtgnttgactg

SEQ ID NO: 4194 - DNA, 1235 bp, Zea mays
  Clone ID: TF_ZmC6833_1
gcgcggtcggctcctgcgcgcggtgtggtcgcgccagccgccgtggcaccggcgcgtgcggggggccggcggcggcggcttaacaggcaggcgggacgagccgtcgtccgtcgtccgcggcgacgggcggcggggcctgggcctgccgctcatccgcatgctccccgtcgtcaagttcactgccgcctcctgcgacgccggcgccggcgctggtggcgtggcgccgaggatatccgtgtcggagtgcgccgtgtgcctgagcgagttcgtggagcgcgagcgcgtccggctgttgcccaactgctcccacgccttccacatcgactgcatcgacacgtggctgcagggcagcgcgcggtgccccttctgccggagcgacgtcacgctgccggcgatcccgtcggcgcggcgcgccccggcggcggcggcggcggtccttcccaccagcaggcgccgggacgacgcgctcgccagcgaaagcattgtgatcgaggtgcgaggggagcgcgagaggtggttcagcagcagccacgggacgacgacgacgacgccccggcgccagccgccgaagcagccggcgccgcggtgcagcaaggcggcggagagcgtcggcgacgaggccatcgacacgaggaagacggacgcggagttcgcggtgcagcccttgcggcggtccgtctccctggactcctcctgcggcaagcacctctacgtgtccatccaggagctcctcgccacgcaaaggtgggacgacggcgacgtcggtcgaccgtgagcccggccggccggccgaccgccagctgcgcatcattccaggacggacgcccactaccactacgtacaagacgaagcagcgatttgttttgcgcgccagatcaggcagccatcaacgacgctggtgttgggtgacccaacccccagtcccagtgcacgcggattggacatttccggggcgaaaaaggtcgctcgctgcatgcgcgccgagagcttacgacgggcgcgctggggcctctcagcctagatcggggccacagagccgtaggccagcgcggcgagcatgcaggtgtcgcgcggcagccccctccccctgggcgtgtgcgcgcgagtggccacgcaccgccgactgctgggggcgagggccggcgcgcgcgcgccaccggccacgcacgtaccggccatgtgcgcgcttcgctttgcgggtacgtaagccgaagtggacgtgccctggatgcacc

SEQ ID NO: 4195 - DNA, 838 bp, Zea mays
  Clone ID: TF_ZmC6833_2
cccagcgtccgcggccgcgtggggtcgtgaagttcacggccgcctcctgcgacgccggcgccggcgccggcgccggtggcgtggcgccgaggatatccgtgtcggagtgcgccgtgtgcctgagcgagttcgtggagcgcgagcgcgtccggctgctgcccaactgctcccacgccttccacatcgactgcatcgacacgtggctgcagggcagcgcgcggtgccccttctgccggagcgacgtcacgctgccggcgatcccgtcggcgcggcgcgccccggcggcggcggcgccggtccttcccaccagcaggcgccgggacgacgcgctcgccagcgaaagcattgtgatcgaggtgcgaggggagcgcgagaggtggttcagcagcagccacgggacgacgacgacgccccggcgccagccgccgaagcagcagccgccgctgccgcggtgcagcaaggcggcggagagcgtcggcgacgaggccatcgacacgaggaagacggacgcggagttcgcggtgcagcccttgcggcggtccgtctccctggactcctcctgcggcaagcacctctacgtgtccatccaggagctcctcgccacgcaaaggcaagtgcgcgacccatccgtgcgttcgtgatccgcggatgccatgccatgccatggccgtgcgtgcgtgcagtcagaaggaatacccctgctgtgcctgtgctgcctgctataccttatagcactgtagctgtagatggttgtgctcaatcttttttttttaaattccttgtcactactactactactaggcgctacgtagctgtgactgcaaaaaacttttacgac

SEQ ID NO: 4196 - DNA, 1010 bp, Zea mays
  Clone ID: TF_ZmC3313_1
tgactaaaattccaagtttatgcttgggctaagtttatattgggtattttatacccatgggttaacatgtatgggtgaaagtggaacgttctaatacccgtttacccattgggtcaagatttttgaccaataaccgacccacggataaaatatttagcccacatacatactttaatggagtaaatattcatcaggtcgcgggtacccattgccatctctactgacgcatggtcaggccgcatggtggcacagaccgggtgcgacaacgacacggaccacggagatgactcgctcactcgcccctgctgccggtccgttgcgcgagaggcgacgcaccggcgatgacggtggcacaggtgagcgtggcgccgtgggtgggccgggcggggccgcggcatacagcgtgagcctctggtggacggcttcaacgtggcggtcgtggtgacaggctgccgccggagggcgggcggcggtgccccacgctgggatgcgccgtggacctcgctgccgactgccccgcgcgcccgagcgccatgaggaggatgcggcgctgttcaaggccgagtgcccagacacgaggaccaacgccacggacgtcgaggtgacgccgcaggaccgcgtcaagcccgttgagatcaaggttgtcttgtgccccaagcccgccaccatcgtcgcgggccacctctagcgcgccgcgccatgcatgcgtcgtcctggtgggcgcggcggtggtgtgccggtaccgcaaggaggaggcctggaacgagtcgacgtgcccggtgtgcctggccgacttcgacgacggcgaggtcgtgcgggtgctccccgagtgcatgcactacttccacgccgactgcatcgacacgtggctgcgcgggagcaccagctgcccgatgtgccgcgccgagaccacgcccacgcccacgcctagcccggcctccgtgcgccaccacctcgagctctccgtctccctcgaggagatcctcgtcgcgacgtgagcagcgccccga

SEQ ID NO: 4197 - DNA, 929 bp, Zea mays
  Clone ID: TF_ZmC4566_1
cggctccctcgtggcctctctcccctcctcacacaggcacacacgcactttctgtcagcttcctcccctgcgccgataagcaagcccgtgagccaacagtggtgccagcggcccgagcggcgaggatgcacagcggagcgaggaagctcatgtgggggaccagcccggacaggcccgacgaccacgacgtggtcatcgtgctcgcctcgctgctgtgcgcgctcatcaccgtcctcggcatcggcctcgtggcgcggtgcgcgtgcgcgcgcgggcccagcgcgcaggcggcggctgccgccaacaggggcgtcaagaagtcggtgctgcgcaggatccccaccgtgccctacgccgcctgcagccaaggggaaggggacgacgcggacgagtgcgccatctgcctggcggagttcgaggagggcgagcccacgcgcgtgctgccccagtgcggccacgccttccacgccgcctgcgtcgacaggtggctgcgcgcccactcgtcctgcccctcctgccgccgcatcctctccctccagctgccgcccggcgagcggtgccgccgctgcggcgcgcggcccctggacgacggggacgctgggtggaagcccacctactacagcgccatgccgccgttcctggcgtaagcggcggaggaatcgcccgatccggaagcaaaggaaagcaaagcaaagcaaaccttcgggttaagttcctcggctgcagatttcggtactgcctgtatgtggttggtagtgcgtagcaatctgggaatgaggaaaattaggggatcaattaggttgtttgttgcagctgaaaacactgcactgcagcgtgcgtagtagtagtactagtaccaggctggcgtgtacagtacagtttgtaaatactcaagtaattaatatgcatgcgatgagctttggtatggg

SEQ ID NO: 4198 - DNA, 1343 bp, Zea mays
  Clone ID: TF_ZmC364867_1
ccggccggggtccaacgcctctcctcccccttacccgcgcgggatccaacccgcccataagacgccaccgccccgcatctgcccccacctggatacgacccgaccttcaaccccgacgccaggcagccaggcacgcacgcacgcacctacctgctgcggcggcccagagagatggacggcgggcggccggagatgcggcggaccatgacgctgtccgagcagctgtcgtccacgcccgacccggccatccgcgacttcctcaagatcccccaagacgccgacgtcggcgggatcctccacgacgaagatagcccctcggctgtggacgcgcaggggccccgcgccggcaggacgagcggctggaagccgctgcgggaccggctccggctccggcgcgcggcgggcgcctggcagacgccgcctaataagcccggcgctgccgcggcgcacgccccgaccaacagcggcaatctcagcaacaggtacaactacaaccccggcgaggcggcggcggcgttctcccgcaccttctcccgcgcgccctctctgcgcgcgccgtcactccgcgcgacgcccacgttctcgcgcgtcgcgtccacccgcctcggccccgcctcgtcccgctccagctccaggcgccccgcgacgtacgacttccgcgacctcgacgagcgacgccacgacgccgacgccgacgacgggggcgaggaagaggacgacgagggcgagggcgaggacgacgacgacgagggcgacgaggaggatgagaaggaggaggcgcccgccgcgcagatgtcgctgatggcgctgctggagcagacggacagccagtgggacgacgacgaggacgaggaggagagcggcggcggtggcggcgcgcgcaagaaaggcgagggcgacgacgacgaggacgacggcgagggccgggaggaggagatggtgcacgtgtgctgcgtgtgcatggtgcggcacaagggcgcggccttcatcccctgcggccacaccttctgccgcctctgctcccgcgagctctgggtcagccgcggcaactgcccgctctgcaacggcttcatccaggagatcctcgacatcttctgacggatcgatcgagcttgccgtcgatcaccatcgtctagcttgcttccgcttcatatcctagacgaggatgtgagtggccgatgcgacactccggaatcagtgaaactgaacctctcgtagacgaattcgatttcgagctacccagcaccaaaactctgttgtttgctagattttctttttggggatgtcattgatcgttcaagtacgtatgctaccgtacgttgcaataaaatggtatagtatct

SEQ ID NO: 4199 - DNA, 472 bp, Zea mays
  Clone ID: TF_LIB5026-037-Q1-XP1-B12
gccggccgggtccagagaatcttcgaagccgcaagccctaaaggaaacgcaagaatcgccgagagatccgaagcgaggtggagagatcgagatggcggacgtggggagcctcgagaggatgggccgggagctcaagtgccccatctgcttgagcctgctcacttcggcggtgtccatcacctgcaatcacatcttctgcaacgcctgcctgacggagtctaagaaatctgcctcctgctgccctgtgtgcaaggttccattccaccggagagaaatacggccagcgcctcacatggataatttggtggccgttttcaaaagtatggaagctgcagcaggtattagtgtcgtgtcaacacagctgactcctgcacccaaagctgcagagtgtggtgagtacactgctggaaagcctagaaggtcgaataaaaagaagctagcatccgaaaaaaaaaaaaaaaaaaggccccta

SEQ ID NO: 4200 - DNA, 518 bp, Zea mays
  Clone ID: TF_LIB4744-093-A1-K1-F1
tgggacctcgagccggccaaaaagcgctatgcgccataccaaccatgagcgacctgttatcctacatttccaaggtcatgtgcatcaaggcaagatcggaggcaacacaagccggcgaggacagcggctgcccagcggacgagtgccgcgtctgcctgtccaagattcggctcggcgaggctacccgccgactgccgtgtcgccatgtgttccaccgggactgcgtcgaccggtggctctcgtcctgcaagcgaacctgtccgctgtgccgagtttatgtggccgatgggaacaagcagccggtggcggcaaagcacaccagccgtgaagcacaggcactcgccgacgaccttgttatctggttctccaccgtgcttgttcccggtttctgatgccaaattccttcgtctgttcgttcgtttgaaaaagcttgattgctgattactgaaaataagaagttcgagcaaatatatgttatcgaaatttatggtaacaaaaaaaaaaaaaaaaaagcggcc

SEQ ID NO: 4201 - DNA, 1115 bp, Zea mays
  unsure (1)..(1115): unsure at all n locations
  Clone ID: TF_ZmC28409_2
ttcatacacagggtgcatgggaagatgttgacccagacgaatactcttacgaggagctaattgcgctgggtgaagttgtcggtacggaaagcaaaggccttgctgctgataccattgcctcattaccttgggtgacttaccaggcccaagacaagcaagatggcaacatggaacagtgtgctatttgtcgtgtcgagtttgacgagggcgagtcattagttgcactcccttgcaaacatccataccattttgagtgcataaaccagtggctgcagctaaacaaggtatgcccgatgtgcagtgctgaagttcccacttttgtgaacaagcaggcatgactactgaacctgaagaagatagcggtggcttggtatttatctgccattgatggaagaagcgccaactgttaaattgttcagggaagcaagggaattggctgggttctgattcccgttttcttcagttcgacagacttagtnnnnncccccccccncccccccccccccccgggcctgtacgcatgctaatttctatggccataccgctggttatttatgcattccattagatgccgatgattcattgcttgtagatgtaaatcaacaatcataccaccatagtcaatagcagttgttttaatgccaatagcaacgttcatgtttaaaatggtagcatttttgttccttgttttctagaccggacattttatgttcctgaagatggtgattgtgttacaaaaaaaaaaaaaaaaaaaaaaaaaaaaaaaaaaaaaaaaaaaaaaaaaaaaaaaaaaaaaaaaaaaaaaaaaaaaaaaaaaaaaaaaaaaaaaagggggggccgttttaaaggatcaaagtttacttccgcgggcttgcaacgtaatattttttttttaggggcccctaaataaaattcattggccgactttttaaaacgtcaggaattggaaaaaccctggggttacccaatttaatggcttggaagaaaatccccttttccccagttggggtaataccaaaaaggcccgaaccgatcgcctttccaaaaagttgaccaccctaaatggcaaatgggaccccccctgtaggggcccattaagcggggggggtgggggg

SEQ ID NO: 4202 - DNA, 881 bp, Zea mays
  Clone ID: TF_ZmC592_1
ccggccgggaggcctttgtgtgcatcacctgctttatccttattgctttgtggaaaagaaacattgcagtgtaggtgcaccagctgctaatgtggatctctcaccccacaccaagactagcacccactcctcttcggcaagagaataatattgtgatccccggtgaccacggaaccacacccccagagaaagcattctacatattctcatatacactcattagcacatagcgctaggcgccataccaaccatgagcgacctgttatcctacatttccaaggtcatgtgcatcaaggcaagatcggaggcaacacaagccggcgaggacggcggctgcccagcggacgagtgccgcgtctgcctgtccaagattcggctcggcgaggctacccgccgactgccgtgtcgccatgtgttccaccgggactgcgtcgaccggtggctctcgtcctgcaagcgaacctgtccgctgtgccgagtttatgtggccgatgggaacaagcagccggtggcggcaaagcacaccagccgtgaagcacaggcactcgccgacgaccttgttatctggttctccaccgtgcttgttcccggtttctgatgccaaattccttcgtctgttcgttcgtttgaaaaagcttgattggtgtgtattttttttattgcatgcatgatacatgtacgtacctacgttactgttaattgtccttagaacagtttctagaaaatctgtgtgtatgtagcatcttgttgcatgaactgattggaacttctgtgtttgcagctgattactgaaaataagaagttcgagcaaatatatgttatcgaaatttatggtcgttactgttaaaaaaaaaaaaaaaaaaaaaaaggcccctagggcc

SEQ ID NO: 4203 - DNA, 655 bp, Zea mays
  Clone ID: TF_ZmC592_2
gaccccctgagaaaccattctacatattctcatatacactcattagcacatagcgctggccgccataccaaccatgagcgacctgttatcctacatttccaaggtcatgtgcatcaaggcaagatcggaggcaacacaagccggcgaggacagcggctgcccagcggacgagtgccgcgtctgcctgtccaagattcggctcggcgaggctacccgccgactgccgtgtcgccatgtgttccaccgggactgcgtcgaccggtggctctcgtcctgcaagcgaacctgtccgctgtgccgagtttatgtggccgatgggaacaagcagccggtggcggcaaagcacaccagccgtgaagcacaggcactcgccgacgaccttgttatctggttctccaccgtgcttgttcccggtttctgatgccaaattccttcgtctgttcgttcgtttgaaaaagcttgattggtgtgtattttttttattgcatgcatgatacatgtacgtactacgttactgttaattgtccttagaacagtttctagaaaatctgtgtgtatgtagcatcttgttgcatgaactgattggaacttctgtgtttgcagctgattactgaaaataagaagttcgagcaaaaaaaaaaaaaaaaaagcggcc

SEQ ID NO: 4204 - DNA, 1161 bp, Zea mays
  Clone ID: TF_ZmC8390_2
caatcatccatccccgcatttctccactcaacccacaccccaaagagaggggaatcagtctctcccatcccatcaccaaccctcctcctccttgcctaggtactcgcagcagcgtcggcaagcaaggttctcttctcgcgccgcccagatctgagcgctcccatggccatgccgtcctcccgctccccggcgccgccgccaacggcctcctcctcctactggtgctacatgtgcgaccgcttcgttcgcgccgccgcttcctcctcctcctcacccacttcgccgtcctcctcctcccccgcctgcccgtcctgcggcgggggcttcctcgaggagatgggcgcgccgccgccccgcgcccgccggccccgccgcgccgcccgccgcggcgccgactcccgcgcctcgcccttcaaccccgtcatcgttctccgccgctccccgcccgccgacgccgacgccgatggctcctcctctcccgccgccgccaccggcagcagcttcgagctgttctacgacgacggggcggggtcgcgtgggcgcccgctcccggagagcatgtcggacttcctcatgggctccggcttcgagcggctgctggagcagctggcccagatggaggccggcggcggtctggcggcgcgcgcccgtgacgcgccgccggcgtccaaggccgccgtggactccatgcccgcgctccgcgtcggcgccgcccacgtcgcggccgacgcgcactgcgccgtctgcaaggaggccttcgagctgggcgccgaggccagggagatgccctgcgcccacatctaccatgccgactgcatcctgccctggctcgcgctccgcaactcctgccccgtctgccgccacgagatgcccgccgacaacgccgccccgcgcgctgccgccgccgccgccgcggacgaggacgccagggtcggcctcaccatctggaggctccccggcggcgggttcgcggtcgggaggttcgccggcgggccgaggcccgacgagagggagctccccgtggtgtacacggagatggaaagcgggttcaacttcaacagcggccacgcgcccaggcggatctcgtggggcgccaggcaggccgcggccacggacaggggcaccgtccgccgcttcctccgcagcgtcttcgcctgcttt

SEQ ID NO: 4205 - DNA, 574 bp, Zea mays
  Clone ID: TF_LIB4172-009-Q1-L1-C10
aattcggcacgaggccaccgctctgcaatggcggctccgcttcccccacttctccttctcctctccatctcccccgcaatcttcctctcgtagtgctgctctcattcttccaccaaccgaaggttctgcggccgcgagagtgctggggggcgaacaatggaggcggcgtggaggaaggccaagagggcgctgggctccagcctctgcgtgcaccaccccgccgtcgccggcgaccgcgaggacggcgccagcgagcgccgcgcctcggatgcgctctccctcgacactaccgcggcggcgcacgcatcgacgcccaacgcgccggcgccgccggaggccggcgcgctgcggaggtccaagtccggaggcaagtccaccaatagaatgtgtgcaatatgttttgattccatgaagccaggtcgtggacaagctctattcactgctgaatgttctcatatgtttcacttccactgcatctcctctagtgtgaaacacggcaaccatgtatgcccagtttgccgggcaaaatggaaagagatccccttcaatcgctcattatcttctatagttccat

SEQ ID NO: 4206 - DNA, 1540 bp, Zea mays
  Clone ID: TF_ZmC299_2
tttcctctccccgccaatccgcctttatttttatgttccgaccgacctcgaaaccctagcccccagaccatgcgactcggaaccgccatgccggacctcccctgcgacggcgatggcgtctgtatggtctgccgcgtcgcatccccgccggaggtcgacctcctcacctgctccacctgcaccacgccctggcactctccgtgcctctccaagcctgttctatctggggatcctgagaccgacaagcaaatccgtagagcaacaaagcgtgctcatttatctgttgctgaaaggctgcttaaagagtttggttgttctatctgccgggcggtgattaaagagccacttacaacaccatgtgctcacaacttctgcaagacttgtttgcttggtgcatatgatagccagtcctctatgagggaaagaagccgtggtggtcggactctaagggcacagaagattgtgaagacgtgcccttcctgccctactgacatctgcgacttcttagaaaatccccagatcaaccgagaaatgatggagttgattgagtccttgcaacgcaaggctgttgaagaaggcaagatggctgcaggtgatgccgaggaatctggtgatggtgactcggaggaaaatggtggtgctttggtgaagggagaagatgatagcaatttgaacgaggaaggtcaagacggtgtagacgctgatggttctgtgaagattgtggttgaaatggagggtgcaaaagatgataaaaagtcaaagatgggcgcggctgaagtggtggatgtgttagttgaagatgctgctgcgaaacagccgaagaagcgcacggctgatgaagatgctgctgcgaaacagacgaagcacaaggctgatgctgagactggtggcaagagggtgaagagcagtgctgcagtggaagaggttgatgtgtgcgtcactcctatgaaacggaccaggaagagtggtgatatgcatgatgacggcaacggcagccctgctgtgagcagcggccgcagggtgactcggagcagtgtgaatgccacgggagctgatgacagtccagcgaggaggaccagaagccgtggcagagcatgctgaaggtagtgggtgctgggcgccctcttttttgggtgtggaacctttgctgtgcgcagtgttgcagccatttcttttggtttgggggagaccgacctgctacaggtattccccatgcttctttcttccaggatgcaattcctatttaatttcaaggtagctgctgcactcgatctgcgagatgcaattttgttaactggcagccaggtgttggcttacgccatgattttggcacaacaggttcctagagagaaacaagatagctgatgttcttgcaaaaaaaaaagcaagacgggcaactaccccaaatccatgccttttctctaggggcttcattctccaacctgtaatatctagcatgtgttttgaaacttggattgttcggggcaacatgaccccccatctttgtaacatgtttatgatgtaataaatcttgaatttg

SEQ ID NO: 4207 - DNA, 667 bp, Zea mays
  Clone ID: TF_ZmC8696_1
gtgagcgagcggcagcggtgtgtgccgaacaatggcagcgcaggaggccgcagcaggcggcgggagcccgcaggtggtgatgcggtggcggtacggggacgtgggcgacagcaacttcgcggtgcacgggcgcgcggtgccgctgctggtggggctgctgtgcgccgtcgtcttcttcgtcgcgctgtgcctgtacctccgctggaggtgccaccgccacgcgcccgacgacccggaggcggacgccagctccccgtcgtcggccgcagcggcgtcgctccccggcctcgacgccgacgccatccgcgggctgcccgtgacgctgtaccgcccgcccgcgtcgccgcgcctccgaggggaggccggcgacgacgacccggcggcggcgctgtgctccatctgcatcagcgcgctggtggccggcgagaaggtgaaggtgctcccgccgtgcggccactgcttccacccggactgcgtcgacgcctggctccggtcccagcccagctgcccgctctgccggtgcctcctcgccgccgctgccaaggacgccgtgtgagtgccaacgccaacggcaggcgcttcgatcgtcgcatgacaagcgggcccagctaccagcgtccctcgagacccgcggccttttaaatcagcgcactagttaatgatagcg

SEQ ID NO: 4208 - DNA, 774 bp, Zea mays
  Clone ID: TF_LIB4738-004-R1-K1-A5
ggccgggctgcagttcccgccccgtcgccttcggcccttcgctgtcgccttgactcggaatagaacgcactcgtactgggttggaacctttggttattgctgcaattcctactatgaagtacaattgtgaggctttcaactctaaagacgatgtccagtgctcaatatgtttaggcgaatacagggagaaagagatactacgaatcataccaacatgccgccacagctttcaccttgcctgcttagatttatggttggaaaagcagacgacttgcccaatatgccgggtctcactggaagagctgcaggctgccatgccatcggtatgtagcatcagcaactcccgcccgagcccgaccccgaccccgacccagagaattctgataacccagcacctcagtgtttccaacctgctcgtcaacatcccagagatcaaaataatagccaggagacgcacgaatcagtagaagtgattattgaaattcgacgatgaatagaaacattgacatgaatgtagaaagctaagcgacggaggcaaatatggaacatttcctgcaaccaagcaccggcgttttctttagggctactgctaatcaattagtcatgtcgcccgcagcattgtctcggtatcatgacgtttcatctcccaattcctttgtagaggaaaaagaaaagtttatgtacgattcacgtagtaggtcatcatgttatattattgagaatctgaggcctttgagatcattttgatgttgtaaatatacattgtatcaatat

SEQ ID NO: 4209 - DNA, 1351 bp, Zea mays
  unsure (1)..(1351): unsure at all n locations
  Clone ID: TF_ZmC188828_1
ttttttttttttttttggcgaaaaaaattgntaagttccatatgcaaataaatactaggatcatgtgtgtacagcaagcgtgcgtgtactagatactgtactcaacaagcgtgcgtgcagacggctgctggactgtacagcaacaatagaactaatcttttgcatttcaattggattataaaaaaataaagtgtgccatatgcaaataaaaaaatagatcatgtaggtcttcgagacagtggtcttctaaaccggacaagcgttcatcctacttgcagacggctgctggactgtacagcaacaatagaactaatcttttgtatttcaattggattatacttaatgaaagtgtggttcagacactagaaagaataggaacttcatgtcttcgagacagtggtcttgcaaaccggacaagcgttcttccgagaaagccactgctttatgcagtgcacgtgatagctgtggccacagctcagcttcccagtttcctcgtgtacttcgaactcttcttgacagatgctacatctcctgtccatttccgtagaaaaatgtctggggttgaacgcggagtactttaccatcctaaggctttgaatgatctcgtcctcacgaagccctgtacttacatatccaatccggtcctcaagatcgagcaactcctcatatgtcatgttgtcgacatcgaggcgccaatcctgatactgatcataaatacccattcttcccaataacatccttgtctggaacatcatctcttcctcaacccgtgcgtgggagtgccggcggccactcacatgtcggatgcgtccggaaggtgcacggtcgacatcaacgaacggcatgacatggtgcggcggtgaactcagaggggacgaggacatgtgctcccgcatggtgaccctcctggccggaggtgcgccaggcctctctctccgcggcctgtcggcctcggcgcggcggcgcgcggccaccgtatggtgcggcgccaccacgcagtccaccgaagaggcctcggcggcgaacggtatgcccggcgtgcaccagacgtccccgccgacgcccatcccggcactggccccaccaccaccactgacgccgccagccctcgccttccgcctctccctctcgttcctccgccgcctcacgcgccactcctcggaacgccggggcgcttgagcctggaccgccggtgccgctccagccgcgcacccaagcctgcgccagtccgccgtgggccgggccgcttccaccgcggcagccggcgcgtgcgcctgggccgccgcggcgcaaccgagtccgcgccagtccgccggaggccgcgggattnccggcgcgatagcctcccgat

SEQ ID NO: 4210 - DNA, 648 bp, Zea mays
  Clone ID: TF_ZmC188828_2
ggcgtgaatatatgctgtccattgaaccaccaatgcaagctggactgctttgggccaagtccgactgccatgcgttcagtaatacaacaaacacatggaagaactcatgcagtaagtccgactgtcatgcgttgagtaaggcagccagtactagatactgtactcagtaggccatggtgaaaaaaattgtaagttccatatgcaaataaatactaggatcatgtgtgtacagcaagcgtgcgtgtactagatactgtactcaacaagcgtgcgtgcagacggctgctggactgtacagcaacaatagaactaatcttttgcatttcaattggattatacttaatgaaagtgtggttcagacactagaaagaatagggacttcaggtcttcgagacagtggtcttgcaaaccggacaagcgttcttccgagaaagccactgctttatgcagtgcacgtgatagctgtggccacagctcagcttcccagtttcctcgtgtacttcgaactcttcttgacagatgctacatctcctgtccatttccgtagaaaaatgtctggggttgaacgcggagtactttaccatcctaaggctttgaatgatctcgtcctcacgaagccctgtacttacccggggattccgtgaccgg

SEQ ID NO: 4211 - DNA, 1304 bp, Zea mays
  Clone ID: TF_ZmC366351_1
ggccgcttttttttttttttttttgcagctctgaccctttatgttattcaatattgatacaatgtatatttacaacatcaaaatgatctcaaaggcctcagattctcaataatataacatgatgacctactacgtgaatcgtacataaacttttctttttcctctacaaaggaattgggagatgaaacgtcatgataccgagacaatgctgcgggcgacatgactaattgattagcagtagccctaaagaaaacgccggtgcttggttgcaggaaatgttccatatttgcctccgtcgcttagctttctacattcatgtcaatgtttctattcatcgtcgaatttcaataatcacttctactgattcgtgcgtctcctggctattattttgatctctgggatgttgacgagcaggttggaaacactgaggtgctgggttatcagaattctctgggtcggggtcggggtcgggctcgggcgggagttgctggatgctacataccgatggcatggcagcctgcagctcttccagtgagacccggcatattgggcaagtcgtctgcttttccaaccataaatctaagcaggcaaggtgaaagctgtggcggcatgttggtatgattcgtagtatctctttctccctgtattcgcctaaacatattgagcactggacatcgtctttagagttgaaagcctcacaattgtacttcatagtaggaattgcagcaataaccaaaggttccaacccagtacgagtgcgttctatcgggccatcgagttccgcggcgaaatccggcgatggcggcgcacgggtgtcaccacggcgttcgcggcagcagatgaacctcacacagacgaacgccgcgaaggctgcggtcatgccgaagccgagcgccgcgctgactaggttcagccccgacccaaacatgcccgctgatgtgcttcacaccgagtttgccccacctcccctccgcctccgtcctcacactgaatcactgataccacctaccagacactgaaaggcgatagcctaccgcttgaacagacgggctgccgctgccgcggatagataggagagcggtgaggtcgcggcccggggcgcccatttggtggggcacgatgcggagctagccggttgaggccaaccgggtgcgatgcgatggggccgcgaagaaaggggcgaccggtgcggcagcggccggtggcgaggtgcggaggaagggagcggacgagcgccagatgatggaggctgaaggggcggctgctacagtggctcgccccggccggcctcgaggtacccaatg

SEQ ID NO: 4212 - DNA, 1874 bp, Zea mays
  Clone ID: TF_ZmC4447_6
gccggtagaagttcccttgtacattatcagtcattagatacgcaccaccattcacgcttggttaaacaaaaaagcaagtgtttgtgtttgcgaagagaattaaagggaggccggcacaaaagcttccccgacgatgacgagggggcattggcgtcggtccttctttgggtcacctttggtgccaagatgacgccatagtccttgatatagtagtcgtcgaacgtgcaccacatggggaagttgaaaacattattcaaacaaaagaaattgcatgcaaggctcttctttaaatactactcccttcatccaaaaatataattcaagaatctcggtgatatttatctaatactacgcattgtgcaagggtagtaggtgggcttggagagagatatcgatgtagtagatgtgttttctattatagatgtagacacatgtggtgtagtggtagctattggtagtatttgtttgagaggtcgtgggttcaaatccctttggggtcatgtttatttttttaatttagctaggcgttggctgtacgagggaataagaatgggaacatgagaatggcctgtgtggaatggccgactactattgcagccttataagtagtagagatttctaaatggttttgtgaaagcacgaacgccattgcagtgcaggcgatgcaagccaggaacgggccacggacacgccagtacgcgcactttggtcgtcgtctccgatcctcgcattggagggtccttctagaagaccaccatgcctgtggattttttccaacctcaccatccctgcttcccgcctaccttcccaatgcaagaccccgacactgctgcgctgcattcccctacgttacatatatggacaatggggatgcgagggccacgccaccatcgtccccgacaccgttctcactctgctagctgtctgcctgcctgcatccgatggacgcgggccggggcagcagcgccaccatcttcccggtgccgcaggtcccggcgctagctctgctcttccccccgccgccgccggcggcggcggcattgccatcttcttccctctccctttcctcctcctcctcctcgcgccacgcgccatccatcaccagcttcccgatcctcgtgctcacggtgctgggcatcctcgccgcctgcgtcctcatccttgcctactacgtcttcgtcatccgctgctgcctcacctggcaccgcgaccgtagcgcgtccgacgccgtctcccgccgcccccagcgcgcccgcgcccgcgtccgcaccagcactggcggcaccccggcctccagcgccgagccgcgcggcctcgaggacgccgtcatccgggcgctgccggcgttcacttacaggaagaagcccgccgacttaccgccgtccgcacccgcgcccgcgagcgagtgcgcggtgtgcctcggcgagttcgaggagggagacagcgtgaggatgctgcccgcctgcctccacgtcttccacgtcggctgcgtcgacgcctggctccagggcaacgccagctgcccgctctgcagggccagggcggacgtcgatgccgccagctgctgccgcctgctcccgccgccgccacccgaggaggaggaggacgtagcggccatccaggtcgtcgtcgtcgtccccggcgcagaggaagacgaccgccaaggcacggtgccacagcggcagcgagaaaccaccgtggctcctgctgctgctgccgaggttgaaggagaagatcctcctcaggtcggtggtgaaaaggagaggaggaaggatggagatgttgcaccgaggacgaggtccttctccacggacggtgacggtggcgaggaggttcagagcatcttgcagaggaacggacagggactcccgtag

SEQ ID NO: 4213 - DNA, 613 bp, Zea mays
  Clone ID: TF_ZmC54317_2
cctcgaggccggccgggatctccttcctcatccgaaacaactgacatcgccccgcagccaagaagctcggctcagctcagctcagttggttcctccattttgagtggaggactgactgtctcgcgatgctgatggggttccccgtggggtactcggagacgcccaagctgctgctgcacctcctcttcctcctcgaccacctgcgccgcctctcctcctggctgctccgcctcgcgggcgccgccgacgccgacgccgacaccgacgccggccaccctcgccacccctgcgccgccgcccagcgcctggaggagcactcccccgcgttgcgcttcgactcgctgtcgtgcggaagcggaggaggggtgacggcgccgcgcccgctgcccgagggctgctgcgtctgcctgggcgacttccacgccgccgccgaggtgcgccgcgcccggggctgccgccacgtcttccaccgcgcctgcctcgaccgctgggccgcgcacggccaccgcacctgcccgctctgccggacgccgctcctcccgccgctgccgctgcccctgcccctgcccctcccgctgccgccgtcgtagcgatccggattacctcctacctg

SEQ ID NO: 4214 - DNA, 1263 bp, Zea mays
  Clone ID: TF_ZmC25614_1
ccatttcagccaaagcggtgggccgcgcttccttcctcagtcctcactactcactcgtccccttccagttccgcttccgatctgcgcttcgatctccctcttcgcagaggtgcttgtgagcatgtatctgctaggcaacaaaagtggaaagaagaaagtgtatgtcgattatatgaatgtccctctaccgtatgccatcgaagagaattacggtgggcgcttctttgacgacgacgacgatcttgcccaagttcttcaagatcaggaaatattgtatcatttaattcaaggaagtaatggtggtggttcatctagaactcattcgattccaagttctagctatggccatgatcggacatcaaatgcacaaaaattgtcaggagatgtaaactgtgagtgtgagttgcaactagcagttgatgaagctttagctagagagttgcatgaaatggagagcaaactagccaacacttcacttaatgacaataatggaagaaagacaacatcatcttcagcatttgatagaggcaataattctgcaagtagacctcctcaggtattggaggaggatgtgattgatccagataatatgacgtacgaggaactgcaacagctaggggaagccattggtacccaaagcaaagggctgcctgaaagtgtcatagcactcttgccaacttcaacttacaaaactgggatattctccagaaaggaaaaacatgatgaatgtgtgatctgttgtatggcatacaagaaccgagataggctgactaaattgccatgtggacatcactaccatcaagcttgtgttgctaaatggttacagatcaataaggtatgccctgtttgcaataaggaggttttcagctagcagtatcaaacagtgcagattcgtctgatggccaactccagcaaccgtctgtagtactgcatagatgtgcattatttgtataagcatgctgccctgttgctggcaggtaatgcgccgcattgctcaaggaccatatcacggccaaattagtgatatctccagcgaaagcaataagatctctgcttttgaactttttgacattcagagtttcagacttggtgccacactacagtcctttttatcatcgcctgtatactattcatttcagtatcttgtctccagtccattcagcatactttctggaatgttgcaacttggattgaaacagcgagaaatgttgaaatttaggcactggtatttttttaaagtaaaaaaaaaaaaaaaaaaaaaaa

SEQ ID NO: 4215 - DNA, 462 bp, Zea mays
  Clone ID: TF_cC-zmle18900088d08a1
acaacacaagatttccttttctggggtaaagtgatacaaaaatgagtgctttgagtaagaaaaaggaaggaaaagaattccaaaagggaaaatgtgagaggtgcggaggggataaaggatatgaagaatctataaagaaacatgaaacacgttgctacttggttttcagggcaacagatttgcatataggacaccggttcttctgccgaagccagtgctctatgcaggaaaggtggtagtagtgtttacacgccatcttgcccacatcctcacccgataaatactcctcctggcatatgctgcattttgtttcacaatcttcatgagaccctggagctgtgggcatgtagaggctcctatttaggcacgtggacaatgcatcgtctgaaagacctgtttttacagtaccaatccgctctcccaaagcaagcaactcttcgtaggacatgccgtcgatatcca

SEQ ID NO: 4216 - DNA, 1366 bp, Zea mays
  Clone ID: TF_ZmC47563_1
ctcgtgggatcatcactgccatctctctctgactctgtgtccgtctctaaactctagtctgtgcgaatctgctgccagcagcgaggaacagaacagtagccaatttgccatctcacagttgcgttcctccgattccccgtcccccgatggacctgtctcccagctcgtcggcgccatccgcgccgccggtgccgtgcgagtggtccggcgccgggctcggctccgcggcgtgcggcctcgcctgcagggtgctctgcgccgtcgccacctgcgtcttcgcggccgtggggtcgctggtcggggcggtgacggggtccatggtggggctggcgaccgagagcgggatgctgcgcggcgccggcatcggggccatctccggcgccgtcttctccatcgaggtcgccgagtcgtcccgcgacctctggcactcgggcgactccggcgtctggaccctcctctacatggtggacatcatctccagtctcttgagcggcaggctggtccgggagaaggtggggccggctgttcagagcgccgtgcagagccagatcagcgccatcagctcgccgttcgaggagacgagcgacctgttcgagaccggcagcgtgaggggcctccccgaggccgcggtgcgccggctgccggagacggtggtcgcggaggacggcgccgtggacgcggccggccaggcgctgtgctgctcggtgtgcctgcaggacttccgggtgggcgaccgcgcgcggaggctgcccgggtgccgccacctgttccacgtgccctgcatcgactgctggctcctcaggcacggctcctgcccgctgtgccggcgagacatctgaaactgtgaatccatcgcccgcggtcgtctactctgtgactgtgaaccgccatccacgtcgccggaaaccgggtgtagtgttgctgctttggacgagatggtcagttagttgagtagggttcctactttgtaggacggcaccccgatgcccgtaagggaaatggtgcgctctgacgctctgttaactaaaaaaaagaagagagaaaacagcccctcagcttcaaagaatcaaaaggggaaaaaaatcataatagtgaacaaacgttcaacgacaaaacggcacaactgacggtcgcatgcaggttcaggccgagcttatctgcggattcagaattattcgtagttagctatagttggagaatgaaaccctaatcagggtgattagggttgatagtgaatatatatagctgagtgttatgggtcaaagctaattaacgaaggtatatacagagacgtaaaccatactctaaaaccccgtagtctcattatatcatgtacaagtgtcgataccggagcgaaactcacgaa

SEQ ID NO: 4217 - DNA, 709 bp, Zea mays
  Clone ID: TF_ZmC47563_3
agtgccagcaacgcaggagagaagctcatggtcagcgtcagcctgctgtaagcatgtaactgacctgtttcttccgtctgtttgtcgtggacgcacgcagatcagcgccatcagctcgccgttcgaggagacgagcgacctgttcgagaccggcagcgtgaggggcctccccgaggccgcggtgcgccggctgccggagacagtggtcgcggaggacggcgccgtggacgcggcgggccaggcgctgtgctgctcggtgtgcctgcaggacttccgggtgggcgaccgcgcgcggaggctgcccggttgccgccacctgttccacgtgccctgcatcgactgctggctcctcaggcacggctcctgcccgctgtgccggcgagacatctgaaactcggtcgtctgctctgtgaaccgccacccacgtcgccggaaacgtggtgtagtgttgctgctttggacgagatggtcagttagttgagtagggttcctactttgtaggacggcaccctgatgcccgtaagggaaatggtgcgctctgacgctctgttaactaaaaaagaagaagagagaaaacagcccctcagcttcaaagaatcaaaaggggaaaaaaaccataatagtgaacatacgttcaacgacaaaacggctcatctgacggtcgcgtgccggttcaggccgcgcttatttgcgggttcggtatttttcg

SEQ ID NO: 4218 - DNA, 1030 bp, Zea mays
  Clone ID: TF_ZmC10261_5
tcccgcgttcaggaggtccttaagttctgctgccatttctcattctacttgttcatgcgtcccattgcagcaccgggggaattcattctcatcacatgagattaggaatcatcagcccggatcacgctttcgtcctcctgccaccctccccggatcatctaccgccgcctgtgcatctgccacctccggttcacctgccacctccggtgcatctcccaccgccatagcttcaagggaaggaggcagaccaatgtcagagatccgcaatgtcttcgatcagattcgtcaggggagaaatgcaagattggaggatttgcttctcattgatcggtcacttattatgagacgcgcaaatttgattgatagacatcgggatatgcggcttgatgtggataatatgtcctatgaggaattgctcgcactaggtgaacgcattgggtacgtaaacacaggacttagtgaggaaaaaatcctaagtaacttaaaacaacggaaatatgtcttaatatcattggaagatcctccaacaggtgttgaaccatgttgtatttgccaggaagactacgcggaaggcgaggacttgggcagactggactgtggtcacgacttccacaccgcatgcatcaaacaatggctggttataaaaaatgtgtgcccaatctgcaagaaaacagcactggacgcctaagacatggctgcattttccctccctagggaaaatccggtagccggcactaagggcaagtggttgtcatctaaccacaccatgcacccaaagactagcaactggttacaagcatgttacaccttcccattatcaacacacatgtgggaatttatactataggtggtacatggcacttacctgaagccaatggctgtagaccccggagtttcatccttgttttgtttaaacctagatttgggatttataatttattgaatgacattcgatttacttgggcaaaaaaaaaaaaaaaaaaggcccctacagcaatacctgctatcatcattggtggctaaatcaaaa

SEQ ID NO: 4219 - DNA, 1678 bp, Zea mays
  unsure (1)..(1678): unsure at all n locations
  Clone ID: TF_ZmC22858_2
cggacgcgtgggttccacttcacggctgatgagtgatgaccctaccagaaatcgacccgatacggctcaatagcccgaatcacactcatcacaagcctcaaacttttccaaaccaatttagatgcggcgtgagtgctaaagcgctctctggactctgtttcgcagtggccgcagctgcagcgtcccttccctttttgccatccagcatcacctgtgccgccggcgcgtaattgcaccgcggtcactggttagtaggaagaagggaaggaggaggggggagcggtgtcngggtatcgtctcgtgcccatgggcgtgcacgccaggtcgatgagcttccaaatcttcggggcttgcattgcattgtccgcctgcctaagcacgcaacgcaaggaaggtatagtattctctacttcatcttccagtcctcctgctagctagctttgcctacaaagcaaccaaaaagcgagcgggcggcaccacacgtcggtcgagtgcctatcccttgaagcccttcgacaacaccgagaggaacggaacggaacggatcgcccccctttatacaagcacactcgccgcgcaacactcccgaaacgtgcatcgcgactagttagcagttactgccgcggacagagcacggcaggaaggagcgagcattcgtgcgggagagctggtggcacatggaccgccgggactcctccgaggcgccggggccggccgtgaacggcactggcggcgtcggaggcgcgggcgcggcggcgcccggggtcgtcgacgcgaccttcgacaccaacacggtgatcctgctggcggcgctgttcctggcgctgctgctcgccatcgcgctcaactcgctggccaggttcgcgctctggtgcggaggccgggccgcggccgggggcggcgaggtggcggcgtcgccgagcgtcgccgcgtcgtcctgcgcgggcgtccggggcgggatcaagaagcgcgcgctgcggagcatccccgtggaggtttacgtcggcggggatgcgaaagacgacgaggaggagggggccgggagcggggacgtgtgcgccatctgcctcggcgagttcgcggacggcgagaaggtgcgcgtgctgccgcggtgcggccacgcgttccacgtcccgtgcgtcgacgcctggctgctgtcccgcggctcgtgcccgacgtgccgccgccccgtcatggacgccaagcctgccagtgccagtgccacaggcggcaggggagtggcccagcagagcgcccgccgcccggacagcgacaccgtcgccgtggtcattgcgtgagggacgacggaggggagcatgggcgtggccatgggcccatggccatcgcaagcagcagagacctagtggtaggagcgagcacacgcaacgaagcaaggtatagagtagcgctctgtactgttccggcgtcgctgtggataagttcatgtaaaaaatatctccgtagcctgccctgctctggtagccgcatcgtccgatattatccggcgacggctggcccacttgcactagatgacgctacatgcttggagtgtactgctcgctagtgtagcatcttcttgccgttgccgttgccgtcaaatgtagtgcacgagtagctgcccagttgctctgtcacagttttcagtttcggtggtgccgtgcaacaatttgttacagat

SEQ ID NO: 4220 - DNA, 1315 bp, Zea mays
  Clone ID: TF_ZmC2009_1
attgggtacctcgggtttctttttagagttattgcatctcctcagttgtagtttatctcggttgtgtatccacgagtgctgtgtacaccaattcctgtagaaaagatgggtgaacatgttttcattgttcaagaatgttgttatatgtttttaaatcatgtaagacatgttttagttttaccatggggtctcgagaacaatattgtttatttcctcattctgttttgaagccgtcggaattatgcttgtaatcattgctgaagtttttgtgaacatatattttttttcaatcgattttgctcgagccagtatcttttattgcaacaccatgaactcccatggtgctggttcgcattcacggcttttggacctcaactatccccctgctgaaggggctggtgagggggcttcacgtttcagcagtatccctgtctctcatagagagggttcaagcagcatgcctgtacaacacatccaggcttcgagtagtacaccaccggctactggtgagcctcgcattggtatgcgtagttgccccatcgatgtggaagccatcgatgatgatgccgttatctattcttcaagaccactgcctcgagcaagacagcagttgacacgacagaaagtattactatcataatagatgatgattccgaaacaaacctagaaacagcaggcgatgctcttgacgagcatgtgaacttactgctatctctgggcatagaacgctcgcatgagcctacaagtgcaaccaacaccttccctggaataagcatggtggacacaccaaaagtaaacaccttcaagtggatccaggtgcctcctgaacctgtgaaggaggttccgaaggaaccgaagctcagctgcccgatctgtatgaacgagataaccgaagcggcgtcgaccgtatgcggtcacattttctgccagccgtgcatcaaggctgccattaaggcccagaagaagtgccctacctgccggaggaagctcactccaagacagcaacaccgggtgtacctcccatcgccttagtagcccagtgcagagtcattttgctacaagttctgccgtgccgggggctgtatgttggaggcaactgggggggggggggggggagcatagaggtcctgtttggttcgttcatttagtgtcataatcagttaacagggtaatctattaccattgctttatgtttggttagactatactgtaaacgattgcagtgggatgcaataccagccaatacaaaattattgccgctgctttttgactgtttaaaaaaaaaaaagaagggcggccgccgacaagagagctc

SEQ ID NO: 4221 - DNA, 1289 bp, Zea mays
  Clone ID: TF_ZmC21544_1
cattgggtacctcgaagccggccgggaaagccttttgccctgtcgtcacgcgcgaggtttcatcaacctcagcgggaactccccacgtacctcaccctcctctcccggagagcctctcgcctccgctccgctcctctgccctgccctgcccttccccgccacaccaaccaaggcgccaaaaataaacgccgcgccactgcgtggcgagggagcctgtcacattgcttgccgctgcgccctgccgcctcgtcttcgcggaggcctcgtcgcgcgacgatatggagctcgccgaggcgccggcgcccgtgcccgacgaggacgggctggacgaacgcggcgtggcgctgcacctcccgaggctgctggccggcgtcgtctccggcgccctcactggcatcttcgctctcgctggagctctgaccggggcagtcaccggcgcggtggcgggcagggcttccgacagcggcggcgtcctgcggggagctggactgggggcggtcgccggagctgtcctctccattgaggtccttgaggcttctcgcgcttactggtgctcgtcggaccggctgggctcgcacggcggagcatcgtccatggctgatttcattgagcagcttcttcgtgcccggtttgtgcaagagcaacttactgcttcaggatatgcatcatatcgctggcaggatgacctatacgacatctttggggacatttcatctgaagggctctcgcaagagtcactgaagaaactaccacatcatgtggtcagtgaccaccagacgcgggacttactcggcgaaatcctgtgttgtcctatctgtctacaggacattgtggccggtgagacagcgaggaggctgcccggctgctctcacgccttccaccagccttgcgtggacagatggctcgtcggccatggctcgtgccccgtctgcaggcaacgcgtgtaaaagatatataggcgacctgtgtctgtgtacgtagatagacgtggagtgaagagaaacgaccgtgcgcatctggcaatctcacttcgtttcttgcaccccggttcccaacatgtaatggcaatggaataagattgctgtcggagcagttcctgtttctgtaacaatcgtgcgtatacggcaatgtgaatttgacttggtttcttccaccccgtcaccaacgtgtaatgaaataagaacgctgccgttgcgattctgtaataacaaaaaaaaaaaatggtcggcacttagcctagctcccggcgctgcttccattccaccaaaaaaaaaaaaaaaaaagggtta

SEQ ID NO: 4222 - DNA, 1112 bp, Zea mays
  Clone ID: TF_ZmC21544_2
cattgcgtcaggggcgaggtttcatcaacctcagtacctcaccctcctctcccggagagcctctcgcctccgctccgctcttctgccctgcccttccccgccacaccaaccaaggcgccaaaaataaacgccgttgccgctgcgccctgccgcctcgtcttcgcggaggcctcgtcgcgcgacgatatggagctcgccgaggcgccggcgcccgtgcccgacgaggacgggctggacgaacgcggcgtggcgctgcacctcccgaggctgctggccggcgtcgtctccggcgccctcactggcctcttcgctctcgctggagctctgaccggggcagtcaccggcgcggtggcgggcagggcttccgacagcggcggcgtcctgcggggagctggactgggggcggtcgccggagctgtcctctccattgaggtccttgaggcttctcgcgcttactggtgctcgtcggaccggctgggctcgcacggcggagcatcgtccatggctgatttcattgagcagcttcttcgtgcccggtttgtgcaagagcaatttactgcttcaggatatgcatcatatcgctggcagctcagcatatcatattttggtcaggatgacctatacgacatctttggggacatttcatctgaagggctctcgcaagagtcactgaagaaactaccacatcatgtggtcagtgaccaccagacgcgggacttactcggcgaaatcctgtgttgtcctatctgtctacaggacattgtggccggtgagacagcgaggaggctgcccggctgctctcacgccttccaccagccttgcgtggacagatggctcgtcggccatggctcgtgccccgtctgcaggcaacgcgtgtaaaagatatataggcgacctgcgtacgtacgtagacgaagaaatagctgggtggagtgaagagaaatgtttgctcgggcacttcgtattagaggtacatacgaatctgcctgttttcactaccggcggaaacggccgtgcgcatctggcaatctcacttcgtttcttgcaccccggttccaacgtgtaatggcaatggaataagattgctgtcggagcagttcctgtttctgtag

SEQ ID NO: 4223 - DNA, 1235 bp, Zea mays
  Clone ID: TF_ZmC21544_7
agagcctctcgcctccgctccgctcctctgccctgccctgcccttccccgccacaccaaccaaggcgccaaaaataaacgccgcgccactgcgtggcgagggagcctgtcacattgcttgccgctgcgccctgccgcctcgtcttcgcggaggcctcgtcgcgcgacgatatggagctcgccgaggcgccggcgcccgtgcccgacgaggacgggctggacgaacgcggcgtggcgctgcacctcccgaggctgctggccggcgtcgtctccggcgccctcactggcatcttcgctctcggtacttgcacagttgcacttacttgcgcaagctcctttcgcctcccttttgccctgttgttagctgtcctgaggtcgagctcgatcgcagatggctctgtgtggtgcgtgcgtgcatgtgccgcgtacgtccgcgtgtaaagctggagctctgaccggggcagtcaccggcgcggtggcgggcagggcttccgacagcggcggcgtcctgcggggagctggactgggggcggtcgccggagctatcctctccattgaggtccttgaggcttctcgcgcttactggtgctcgtcggaccggctgggctcgcacggcggagcatcgtccatggctgatttcattgagcagcttcttcgtgcccggtttgtgcaagagcaatttactgcttcaggatatgcatcatatcgctggcagctcagcatatcatattttggtcaggatgacctatacgacatctttggggacatttcatctgaagggctctcgcaagagtcactgaagaaactaccacatcatgtggtcagtgaccagacgcgggacttactcggcgaaatcctgtgttgtcctatctgtctacaggacattgtggccggtgagacagcgaggaggctgcccggctgctctcacgccttccaccagccttgcgtggacagatggctcgtcggccatggctcgtgccccgtctgcaggcaacgcgtgtaaaagatatataggcgacctgcgtacgtacgtagacgaagaaatagctgggtggagtgaagagaaatgtttgctcgggcacttcgtattagaggtacatacgaatctgcctgttttcactaccggcggaaacggccgtgcgcatctggcaatctcacttcgtttcttgcaccccggttccaacgtgtaatggcaatggaataagattgctgtcggagcagttcctgtttctgtag

SEQ ID NO: 4224 - DNA, 1509 bp, Zea mays
  Clone ID: TF_ZmC8011_2
cattgggtacctcgaggccggccgggagcctgctccttatcgccggctgccgtgccgccgcgtcctgctccccgctcccgtgttcgtcgtccgaagcaccgccgagcgccgcggcctcgcgccagcgccaccgcccagaaaccatctttccctcccgcgccgctgagcccatagcccatatcggggcctcgttcgacttcgaccgaagcgcgctgtgtcaaatttctgcgaccttgccgccgccttcatcattctggagctcggattgatttcttcctttgctgtgctgtcattaccgaactaaaaacagtttctgagagcaagcgtcacaattgccatggaagctgggagaatggatcagccttgcatggcttctatcaatagccagcctttcgtggctgatactgagccagtgaagaaagccagtggggacatgcctgcggcgccgacaggaagcgggtgcttcgactgcaacatctgccttgattttgcagcagaaccagtggttaccctctgtggtcatctctactgctggccttgcatctacgagtggctgcgccctggggtggagtcaaccgccagcgacaacggcagttcggcaaggcggcaatgccctgtatgcaaggcaacactctcaccggacacccttgtgccgctatacggccgcggagggaactcaaagaagtcactggatggcatggccatcccgcgccgccccatggtacaccgggaggctgttgagcaacagaatgcacggagcaacgtcaatgaccagcactaccaccagagcacgggagacagccctcagcaccagccattgatgcaggcgcaccaccatcccgttccccctgggttcgacttcatctaccctccagcgccggtagggcgtggtttgatccactcgactgccggaggggtgctcggagggatggcagaggttgtgctcccgtgggtgctccgtggccagctgccagccagcttgcactacacgagcccataccatgttgcggcacagaacgtgaaccccaggctgaggcgtcatcagatggaaatagagaggtccctgcaccagatctggttcttcctctttgtgtttgtgctgctgtgcctgctcttgttctgagacggaggactgttctatatgcctctttgtagatattgaagagggggagagagggatactaatggatgatgcgtatagtagacagggtaatggtctgtatcgacaagcatgtgtctaaagcatgctgatatagagttgtaatatgatgagacatgggaggtgaaatgtatatttcattcttctcgtcataacgtcagcggtttcctgatctatcgctgttggcctgttaggtaggttgcctacctgacatgtcttcatgtcagggccttcgatttgctcatttgcatatgtaaatcgaaaatgatgttttggctaccaaaaaaaaaaaaaaaaaagcggccgcgtcctcttcaatccctgttccgaaattgatacggcaattttgt

SEQ ID NO: 4225 - DNA, 2478 bp, Zea mays
  Clone ID: TF_ZmC886_2
ttgggtccctcgaggccggtttgcttccaaattaactgcgaaggcaaagccgtgccgaaggcctcgccgcgccgctcccacacactacaccctcgccgccgctgagactcggcaaactgcctcccgttccatgggctgcgtaggatccaccccggccaccaaagatgccgggggaagtagcgatgtcaatcatggcactaagagagtgaggaaacccaaagcttggaagcatccccaaccgataaccatggcccagctcaggcagatgcgtgaggagttttgggacaccgctcctcactacggtggtcagaaagaaatctgggatgcccttcgagttgcatcagagtctgaggtatcccatgcacaggctgttgtggaaagtgcaggcataattgtttctaatgccgatctgactctctgctacgatgaaaggggtgctaagtatgaattgcccaagtatgttttgagtgaaccaaccaacctgatccgagacagctgaacggcagccggccgtaggaagacccaccgatgtaaaaactgtaaatgactgcagatgccgccaaattggtcccttgcttgtggtaactggagtgcctcgagtaaccttcagatttgctttggcaactttcggcaatagggttttccagttctagtgttcagataaaaaaaaacttttgcgtaccctcgtctattgttcttggttctactgtaaacatgagtctgcttagaattctttggagcgagaatgctgctgagattgttctcgtccactatcatgatacaagctggagcatacgttttagaaacttgtcacatctcgtgcaactaattatattattatgtggtctggtctgacatttgaaatgaaatgcatgataaggagcaaatcgcaatctaatttttacattatcgcaacatatccgatgatactggagttttacattattatcatgagaatgatgctgattcatctagtggtagtgttgcgtggagtctgagaacctgaaccggctgaatgcctcctccatcgccatcaccatcgccagcaggtccagatccatccctcctccgtcttcgtcggcgacgctcctctcgcagagcgcgaaccggcacaccgggcagctgccgtgcccctgcacccagggagcgatgcacccctggtgaaacgtgtggttgcagggcgtgaccgcaacctgctctccaggcaggaacgtctccaggcatatggtgcagaccttctcctcttcactggtttccttccctgtccggaggttacctctgccgccgccgccatgcttctgctgctgcctgtattcgtccttcctcagctgatccatggcctctctgaactcctcgttggtcagtccagcgtctcctcgcctgtgtctcgggtttaggggcgcgccactgccgctgctgccatggacacggtggatatggaatggtggctgcaacgggtgccaggaactggagcgctcgaaaggtggtcttctgaacctgtgctccgaaagcctccaagggtaatccccatgatgcagaggccacggggacctcctcctggtcctggatggcaactgagggtaccaggcgtgctgaaactcacgagggacggggccgtactccggcccgtagctcccgtctgcccgccggccgtcactcatctcatctcccattgtggtgaccaccggggagggtgatgaccgatgagttctttgagggtgtcgctatgtgtagtataaccaaccatcgatccatccattccctatctctgagtctggaaggcgcatctcgagtgatccatggcggaatctgttcacaaactctccgagatggtactccccaacgacctcaagcttgcgcctttagtcatctgtggcagcatctcgattcttgcgcacgctgaataagattatagccattgtcgttctgcggcatagcgttgatccatcaagcctctcgttctgcagtcatccagttcacggggggcggcctcgcggagttgtcggcggagctgaagatatgctcccggatgtcctagaagccgtggccggggtcggagtctacgtagccgacctcgtcggtgacgaagatctccggcgaggcggggtcggaggcgttgaggcggttcgactcgcggcccgtgaggccgtcgatgtcggggcgggtgcggcggagccagccgaggatgtggtcgaagctgcggttctccatcaccaccaccaccaccgtcttgaccggggaatggatctcgtgcttccgccgccggcgcttcagcccgcggtggtgcgcgtccaggcagtgcccggagacgaccagcgccagcaggaggagcgccgcgaggaggcgcgccccgggtccgcggcgggccacggcagccatcgcgacggaccgggaactaggtcttcgccttcgacggcgggcggtgcgcttgcaggtagggtaggtgcgcttgcggttcagtcgaattgggaactctct

SEQ ID NO: 4226 - DNA, 765 bp, Zea mays
  Clone ID: TF_LIB4746-060-Q1-K1-B7
cattgggtacctcgaggccggccggggccgttcctattccattcccgtcttctctccaccgatccccgcagaatattccattccagccaaggacgacgatcgcctcatccatccaaatggccacgcctgctccagccggcgccgccatgcccgagctcgccccggggcagggaagagaagccaagcacgggcgcgccggcggcgggccacgccagagcgccggcgcgcgcctcctatcgctctccgtgcaggcggccgtgatggcggccacgctcgcggtcctcctcgtctttgccgccgcgtccgccttactcctcctcgtcctcgtcctcgccgcgcgcgccttccgccaccaccgcgtcacgtcgctcgaccttgccccttcgtcgccgccgccgcctctccgcgcggggctctcgcccgtcgacatccgccgcctgccgagcttcgccttcccctccacgcgtggcggcgccggcgacgataccgccgccgcctccccctcatgcgtcgtgtgcctcgatgccgcgcgcggcggggagcggtggcgcgcgatgccggcctgcacgcacgcgttccacgccgcctgcgtcgaccggtgggtcgccaggacgcctgtctgccccgtctgccgcgctgccgtcgccgtcccgatatgagctaaggccgacgccgcgaacttgcccaccggggcccttcgtcctggtcgggaagtcatgggaggccgatatgaaccggggctggtggaaagaaaaatgcggggga

SEQ ID NO: 4227 - DNA, 1398 bp, Zea mays
  Clone ID: TF_ZmC38662_1
cctcgaggccggccgggtttgagccacttgacagcaacgagttctttgagccacttagtattgcctttgatacactgcagtctactatggtgcatgggtttcagttatttgacatctggcagcgtcatctaatggaaagtggtgcagacttccttgatttacagaaatcttataagcaagcagcaggatctttttctgaatggaggggcaagcttactagggactttggttttgccattgatttgataagcttgttgatgtcacttggtcattactcgatgatattttggcttcgtggtatggcgtttcatctggttgatgcagttctcttattgaactcgcgtgctcttatagtttcctttttgaagaggattaaagctcacatcaagttacggaaggcacttagttcactcgatggagcacttccagatgctacgtatgatgaaatttgtgcatatgatgatgagtgtgccatctgcaggggaccaatgggtcgagctaaaaagttgtcatgcaaccatctatttcatctagcttgtttgcggtcatggttggatcaaggactaatggaaggttactcctgtccaacttgtcggagaccgctcttattgtcatctgaagggcaaagaaggtctacaactgcggaggtagcaaatgttcagcgaattgcggaacaacttactatggggatgaatcagcagagagttcctggtaatgaacatcctgttgaacagcagaacccttcagatgctgtttggagaggtgctggtctggatgctagctggattccaccgtggtcaagccctgtgatggaccatccgagttcctccagtgcagtgaggtcagtaggtcttactggagttcagatgatgatgacgcagttggcttctgtcaccgacaattatgggcatgctgatggtacctggaacctatggcctgaaccgatggcagggtcctctcttgttccttccacttcctcgatttccggcactgcatctgcttctggattgcggctccgtggtagtgcaggcataagcaacgggagtctttcggaggtactcactatggtagatagagtgcgggaagttctacctcatatccctgatgagctaatcttagaggatttgatgaggacaaacaacataaacgcgactgtgaataatcttctgctgatgcaatagtagatacgtcaatacaacatataagtgtgacgtttactggctataaaagcttataagaaaagtatgtgtatagctaagggcgagcctgggtgtaacacgtctttggttctgtaataaaagcccttttttctttatttttgtctgcagaggtctgtatagcaaccaatattatcggaataaaatttgttttgctaataaaaaaaaaaaaaaagcggcc

SEQ ID NO: 4228 - DNA, 945 bp, Zea mays
  Clone ID: TF_ZmC12601_1
cgcggacgcgtgggcggacgcgtgggcggttccacctctcccctccctctcgtgctcgatccatcgccgctgcctaatccccatggcctcagcgaacaacgacaaccgcgaggcggcgggcatcctgcggctgctgatggggatggcggcggcggcgcccgcctcggcattgcctcgggggggcggcggcggcggcggcggcggcctgatggtggtgcagcacgtcatcctcgacgtcgacggggaattgttctcgggcggggtcggcggcggcggcgtgccgccggcgtcgaaggccgcgatcgccgcgctgaaggaggtgaaggccggggagggcgagggcgagggcgaggacgcgctgggcgagtgcgccatctgcctggacgcggtggagggcaccggcaaggagatgccgtgcgggcaccgcttccacgggcgctgcctggagcggtggctcggcgtgcacggcaactgccccgtctgccgccgcgagctgccagcgccggccaaggaggaggaggaggacagcgcggcgtcggcggagggcggcgaggaggaaaggcggaggcccagggccgcggtcgtcgtcagctacctcgtgttcggaggcgggcgggcggaggcgcagcaggagccggagagggaggagccgtggaacattagaatagaggatgtggattagcattggtcgccttcccattggttttcagattggtttgatggcggaggaggttatgtacatactagtaatgtcatgaacgctggaaatgggcgaagggggaatttgtgaatatttcgggagttcaatctgttgatcaatgcttatattgccattaagcactattcttttgaaaatgagcagcggtttgcttctcagctgttttgatgctattctagaaagtctcgaagatgggcaggagtttgttcttctgccgttttgattgt

SEQ ID NO: 4229 - DNA, 1577 bp, Zea mays
  Clone ID: TF_ZmC3294_1
gggtagctcgccgccggccgggccgggacgcgagggggagaaagaggctacacggaaccacgcgctcacggagtcacggctcatcttcggaccttccccagttccccgcgatatcgctagggtttccgcgatggcgacacttcgctccccgagcccccgcggagacgttctcctcgactcggcgccgctcctcggtggtgtcgggcggcgccgcgcgggcgcgctgcgccggccgtctctccggggcgcggcgcggctgctgcggcgtggcgggcgccgagcgatgcgggagccgtcactgctggtgcgggaggccgcggcggagcagctggaggaacggcaggcggattgggcctactcccgccccgtggtggcgctcgacttcctttggaacctcgccttcatcctcgtctccgccgtcgtgctcgtgctcagccaccacgagagcccctccatgccgcttcgtttctggatcgctgggtacaccgcccagtgcgtcgtccacatggtctgcgttgccatcgagtatcgtttgcgatacggccagctcggcgggtcgccaattcctgtcgacgaggagagcggaagtggtagtgcatcatcgtcctccagcgacgacgacagagagcacggctcccatagtcgaagtggtgactgcctcagtatagctaaacatctggagtctgctaacacaatgttctcatttgtgtggtggataattggattttattgggtatctgctggtggagaagttcttacccgtgatgcgcctcaactttactggctttgcatcgtatttttggcgtttgatgttttctttgtcgtcttctgtgtggctttggcctgcatcattggtattgctgtttgttgctgccttccttgtatcatagcaattttatatgcagtgtcggatcaggagggagcatctgaagatgacattcgtcaaattccaaaatacaaatttcggaagatggaagagcctgaaaagcagtctgttggtgtgcctggatcttctggtggaataatgatagaatgtggaaccaatcaacctattgaaaaagtacttgcagctgaagatgcggagtgctgcatttgcctctcagcttatgatgatggcgcagagctccgtgaactcccttgtggccaccattttcattgtgtttgcatcgataaatggctgcacatcaatgccacgtgccccctatgcaagtacaatgttcgaaaaaacagcagcagcagtggcagcgaagaagtataaatctctatatgagaatattgagaattcatacccaacagttctggcttctcgcagcaaattttttatcccataatcccatgagttcgcattcgtatctgtggcagtgtgatgaagaaaatgatccatgtaaattctcttgttcgtaatacggctatagcaataattctgtgtcaactttgctcgtgctgttctcggtgtgtttagatttttatagtatgtgtacttgttatagaatttctgtagagcagcttgtttgtgtagtctaatgttttataataatcatactagcagtacatgttcttgctcaggtcaggttttc

SEQ ID NO: 4230 - DNA, 1089 bp, Zea mays
  Clone ID: TF_ZmC3532_1
ccccgcgtccgaaactgcaaaccagcaacgcatcccgagccaagcggcagatcgttatcaggcggcgtcacgcgctcacgcctgtctcctcgcccccttcggccctccctcctcccggcgagctcctctaccacgggtgtaccaaccaaccaccagtccaccaagcgcgcgggcgccatcaggtagaccggcccctgcgttagacccaacccaaccctatctaccgtgacgctcgatcggcttcgggttagtttgcgccgtgaggctgagtcatggaagtgccgccactgccaacggcgtcggaaggggagcgccgaagcgtagcgacggggtcgtgcctccccaggctggtctccggcgtcctctcgggggccctcaccggcatcttcgccgttgctggaggcctgacgggggcgttcaccggcgcattggccggccgagcttccgacagcggcgtcctccggggagccggcctgggggcctttgcgggggcggtactatccatcgaggttctcgaggcttcgcgcgcctactggagcgcggaccgatcgagcccgcagagcacgtcctccatgggggatttcatagaacagctccttcatgctcgatttgtgcaagaccagtatgagccatcggcatatatggcctatcgttggcaggttggcattgccgacaatgatgatatgtttgatgtccttgaagatgttttatccgaagggctctcacaagatactctaaagaagttgccacatcatgtggttcctgcaccaattggtgaaagcttgtcttgcgctatttgcctgcaggatgttattagcggagagacagcgaggaagttgccaaagtgctctcacaccttccatcagccttgtgtggacagatggttcattgaccatggttcatgcccagtatgtagacaggatgtgtaggtagatcatgatcgattctgggttatcatgcctttgtaaagttgctaccctcgtcatatagaagaaagatacagtacgtagcatgtaaaaagtcctgcacttgttcctattatgaaaaatggtttacacatcagtaattgagttcaaaaaaaaaaaaaaa

SEQ ID NO: 4231 - DNA, 596 bp, Zea mays
  Clone ID: TF_ZmC779404_1
acggcctcgaccgatcgcctgctgctgcgagaggaggcgatggagccggcgcggcggctcctgctgtcggactacgacggcgcgatcgagtcgccgctgccgtcgccgccgccctcctcggccacgccgttccgccccggggtggccgtcgtcgtcggcatcctcaccagcgtcttctccatcacgttcctgctccttctctacgccaagcactgcaagcgcagcgctgcggagtcgtcggggccctacgggagcgccggctcgggcggtgggttcgggtcctccggcaacggcgcgggcggggaccggaggaactccggcgtcgaccgcgccgtcgtggagtccctccccgtcttccgcttcggcgcgctgcgcgggcagaaggaaggcctcgagtgcgccgtctgcctcggccggttcgagcccacggaggcgctccgcctgctgcccaagtgccgccacggcttccacgtcgagtgcgtggacacgtggctcgacgcgcactccacctgcccgctctgccgctcccgcgtcgacccggaggacgtcctcctcctcccggagccgcccaagccgtctaccacgggccctcctga

SEQ ID NO: 4232 - DNA, 972 bp, Zea mays
  Clone ID: TF_ZmC2722_1
gcagcgccggccatgatcgagacaggatgacgtccccgccgacgccgctgccggcgcttgcgcgccaggccatgcagtcgccgtcgccgccgacgaaggtgggaccaccgccgctgccaccgccgccgctgccggccgtggacgcggccgtcatcatgggcgtgctcacggccgtgctgctggcgctcttcctcttcctcatctacgccaagcactgcaagcagcgcggccccggcgagcggcccggcggcctgggcctcggcttcgcgccctcctcgtgcgaccgctgccgctcggggctcagcagctccgcggtgggcgcgcttccggcggtccggttcggcgacggtgacgtcgacgtgggccgcgccaccgagtgcgcggtgtgcctgggcgccttcgacgccgccgagctgctccgcgtcctgcccgcctgtcgccacgccttccacgccgagtgcatcgacacctggctgctggcgcactccacgtgccccgtctgccgccgccgcgtcaccgggggccacgtggacgactccgagccggaggactcggcggcgacgcggcagcacggccggcgctcggcggacgacgcggaggtgcaagtggttgtgcaccgcgcgtgggaccagcggtagtccaccgaaggcttggtgggccgggccgcgtacctcgaggccgccaggcatcggagcgacgacctcggcgtcctggtggtcaccgccgacgggtcctgctaggtagctggatgcgctcgtctgctgctccgagatcgatggagcttctgaatcctaggtagctcacgctcgttcacctatcggtcccgtgcatgtacatagttggggacacacgtcgctaggacgatgagagagagagcatggtagggtgaagactggaagatgcttgtaaactgtaatttgatcttggctagagattgggccacctgaagtttaatattaaaaaaagcctgcc

SEQ ID NO: 4233 - DNA, 821 bp, Zea mays
  unsure (1)..(821): unsure at all n locations
  Clone ID: TF_ZmC54753_1
aggccggccgggccgggaattcccctcgattccatgcggcatccatgaacgccctcgcgatgcccctgtctgccttcaaatatatagctcagtcgccgcttggtccggtacggcttcatgtgtgcgtgcgtgattgaagacggaggcccggaggtgcgctgtcggcactggccatgtcgctggctcgttacgacgccaacgtcctgctggccgcggtgaccgcgctctcggcggctgtcgctttcgtcgcggcgcttcacctctacgcgcggtgcctcctgcagcggcgcgtcgccctcgcggaaggcagccctcgcgtggtcgcgctgcagcggcagcgcccgccggacggctacgtggtggaggtcgtccgcatcgtcgaagacgcaagcgtgtgcggccagcaggctgcggggctggacgccaaggcgctgcgcgcgctgccggtgttcacgttggagtccgagcaggccaatgaagaaggcggcgtcgctgccgagctgcacgggcagtgcgtggtgtgcctcggggagatggaggatggcgagctggggaggctgctcccggggtgccgccacgtgttccacgttgagtgcatcgacacgtggctcggggtgagctcgacctgcccggtgtgccggacggcagctacgcctgccgctccgtcggccgtcggcgtggaccacggtggcggggaagagtccatagctgttgagtgctagtgtgatgtacaaaaaaaggaaggttaatcataaataaatggatgcaaggctgaaatcttttgtgctaaaaaaaaaaaaaaaaagcccctagggccctcn

SEQ ID NO: 4234 - DNA, 1915 bp, Zea mays
  unsure (1)..(1915): unsure at all n locations
  Clone ID: TF_ZmC1258_1
acgacatgatgagcattttctcaaatgacggtgtaggacgctctatagattcaagcagcagtgaaacaaggaggagtcacagaaggatcctgtgggatgcattttccaggcgtggctcaagaggttatccagaatctgatgctgatgaaatgggattttttagtacatggctagaccttggtgatgatatttttgaagagttgggggaatcaagatattttcatcgcaggcgacatggttcaatcagagtaagccagtattcaagatcccggattagggagcatcgccgtgctgtttttgatagtggtaatgaacaaaacactgctgcatgtcctttggggattcatcaaattggccgatgcacctgtaattctttctttattggtgaagaatctagcgccccatatattccttaaagaattggcggattgactgaggcgctatttgaggtgttggatgaaattcaccgtcaacctgcatcactttcactttccatggtctctgttcaggctcctgaatctgtagttgattcgttgccatgtaagagctacagaaagcttgagacaccccaatgcagtgatgatatggaacagtgccatatctgcctaaccgaatatgaggacggagaccagataagaacccttccgtgcaagcacgagttccacctgcaatgcgttgacaagtggctgaaagaaatacacagggtgtgccctctgtgccgtggagacgtctgcgaagtcgcctcgtgaagaccttggcgctgccatccttccgatgtggcgccggtggatagggcaccaccgccaggcgccagctgttccgtggttgaagctggttcggtcaggcaatggtgatcttgtcaacttggacagttgacaccgcaagagcacgtcaactttgactgtctccctgccgaagagaatggccaaaccaaccctgcgaccgatgagtcgctgttcctgtcatcaacttttaagataccgagactttgtatacagtagcttttgtagcctcccgcctcgtgtatgacagcctgtacatatttgtaaattctggaatcaaatgtcacaatcccctgttctcgtgaaaaaaaaaaaaaaaaaagagcacttggctagaccttggtgatgacatttttgaagagttgggggaatcaagatattttcatcgcaggcgacatggttcgatcagagtaagccagtattcaagatcccggattagggagcatcgccgtgctgtttttgatagtggtaatgaacaaagcactgctgcatgtcctttggggattcatcaaactggccgatgcacctgtgattctttcttggttgctgaagaatctagtgcccgagcaagtatatcaagaattgtcatgttaactgaagcgttatttgaggtgttggatgaaattcaccgtcaacctgcatcactttcactttccatggtctctgttcaggctcctgaatctgtagtcaattcgttgccgtgcaagagctacaaaaagcttgaggcaccccaacgcagtgatgatatggaacagtgccatatctgcctaaatgaatatgaggatggagaccagataagaactcttccttgcaagcacgagttccacctgcaatgtgttgacaaatggctgaaagaaatacacagggtgtgccctctgtgccgcggagacgtctgcgaagtcgcctcgtgaagaccttggcgctgccatcccttcctcacggcaccggcagatagcgcatccttcctgccatcaactttttaagataccgagactgtatatagctcttgtagcctctccgtgtatgacaacctgtaatatatgtaatttctagattccaatgtcccattattctgtcctacattcagatcttattctcgcagccctgatgctcaaactagctttaccagantc

SEQ ID NO: 4235 - DNA, 2044 bp, Zea mays
  unsure (1)..(2044): unsure at all n locations
  Clone ID: TF_ZmC17651_1
gcgctagccggccgcgctcgcaccgtcgcgtgtcccattctcctcgtcgttcgaaactggcccctgcctcaccgtgtcgtgggcaccggcggctccacacgggatgtggccacgcctgacacctncacctccatggctgagtgacggatgagcggctgggaggtctcccgcggagcggctccactagccgcctcaacgtgcaggcgcaggagttcgtgccgcgcgctgccgcggtgcccctcccccttcgcaacagaagcggttgccattggtagggttggcaagttcggtccccaccgctgctgcagcgcaggtgcgaaacgaagctcccctggacggagctctatcgcgtagtacggagtccacagggcgaggaaagatgctagcaggcgcccccaccggcgatgcgggccccagctccggcgctgggagcaacccacccactcggccacggaggttccccggggcggcgcagccggagatcatgcgggcggcggagaaggacgatagctacgcagcccacgtcacggaggcatgccgcgacgcatttcggcacctcttcggtaccagggttgctgttgcttaccagaatgagataaaattgcttggtcagtccctttactacttgctaacaactggttcaggccagcaaacacttggtgaagaatattgtgatatatctcaggttgcaaccttgcatggacttccacctactcctgctaggcggattctattcattttgtaccaaactactgtgccctaccttgctgaacggatcagctccagaattgttgcccgtagtattgtactcaacgaatctcagtttgatgaccatcctgaaagtgataattctagtagtgacattgcacaatccaccacaaatagtgacattccttcaagaagcttaagtgtttctgctctgtcagggttcagaggccgagttcatgccttgtggcaatgggttcttcagaaatggccttcaatgctgccatatgctcaagattttatacagttggctatccggacaaatctaatgttcttctattttgaaggtctgtattatcatttgccaaagcgagcagctggtattcgctatgtattcattggcaagccaatgaatcagagacctaggtatcagatcttgggtatttttctgttgattcagttgtgtattcttggagctgaaagactccgaagaagtaatatatcgtcaatagctagttccattaatcaaatatcatctggaggctatccatcgactacaggtcggggcatccctgttctaaatgaagatggaaatatcatcagtgacatccgcagtggtaaagctgcagatatagcttctcattcagagacctccaatggcaagagcaaatgcaccctttgtctcagcatccggcaaaatcctactgccacaacctgtggacatgttttctgctggaattgcataatggagtggtgcaatgagaagcctgagtgccccctatgcagaactccgattacccattcgagtttgatttgtatatatcattcagatttctagcaaatcatttcgcacagtaggagtccatatcatacttcactggcgtcaaaatttccagaccatatttcggcaagaaaactgcatgccaaaatggtttcgtatacttaagtgggagaagagtacgagaccatttcaagaggttaaagatcagagagttgcatacgataatttgttgtaggttgaaagtttagattgaattagggaccacaggtagtagaaattatttattggcagttcggatagtagataacttgtattggacaccgatgtgaattttattggttagaacaatgtccgactcgaatcatcgagctatttagcaatatgttgtgtccattttcgtcgcacttataccagcttgtatgttttgactaagttaggtgcaggtatgttactataattttcatttatgtttgagtatagaatataaaatagctgggtggaaaaaaaaaaaaaaaaaaaaaaaaaaaaaaaaaaaaaaaaaaaaaaaaaaaaaaaaaa

SEQ ID NO: 4236 - DNA, 524 bp, Zea mays
  unsure (1)..(524): unsure at all n locations
  Clone ID: TF_21217091
cacgagcagctagcatagcagtcttgtaaaacccatgtctgaaactgcaactgcaggagtgctgcatctgccttgcgcagtacggggagaaggaggaggttcggcagctgccgtgcgcgcacgtgttccacctcaagtgcgtggacaggtggctcaggatcatctcctcttgccctctctgcaatcaagagctcaagtgactgatgcctactccgctcctgcagagagatgtgggtgtattctgactgcgcctgccgatcagccacacctactacatatataccacgacgacccgccggacgatgcgtgcgtcgcacctctcgcgaggatctcggcgggcccgtgctgacctctagtagacgctgacaaaacgatgtgcagcaggtgaattcggtactcnnnnnnnnnagtctagactagatcaaatgggaaatgtgtaaacnnnnnnnnctnnnnnnnnnnnnnnnnnnnnnnnnncnnncaatgtgatgtgcgcccttgcttcattcaagactgaatgcatc

SEQ ID NO: 4237 - DNA, 532 bp, Zea mays
  unsure (1)..(532): unsure at all n locations
  Clone ID: TF_LIB3594-030-Q6-N6-A1
caaaatcaacacataatgaattaaatctgcttcttaattaattacaaagggtggactggatcatgtagcacagcagaggatgattttgcaaatgcaagaactactacaaacttgtatgtatctatgcgactatgcacaagcaggaaggattcaggcagcaacgatctggctcttgaagtctagatgctcgctggctaccgttccgcatttccctccctgtctgcgccgccgccgacctcggcgcggcagacggggcacacacggcttttgcgtagccactggtcgacgcactgcgcgtggaagccgtggtcgcaccgcggcagcacccggcagcggtcccccgcctggaacgcctncaggcacaccgngcactcggcgcccgcgccggccttgcactcgtgggcatggcacggcagctcgttaaggtcctcggcagacagcccctccgcgcgctcctcgtcctgccgcgactccgctgcgcggaggacgactccccgccggagcgcccagacgactatgaggatgtggagca

SEQ ID NO: 4238 - DNA, 724 bp, Zea mays
  Clone ID: TF_ZmC188299_1
gaaatattccgtacttccatatatagtatagtcacagtcccacagcttttataatttacaaactatacaagcgcacagctagctacctccaaacgaaatatcaaatatatcagtgaccaacccttcaaaccggcggtggcaccggctggccggcggcgttgggttcttccacggcagcgcggcagatggggcacgtcgagtgcgagcggagccacatgtcaatgcactccacatggaacagatgctggcacaccggcagccgccgcaccacctcgccgacctgcaccagccccaggcatatgacgcactgcgcccaccccgccgcgtccccgccgcgacccgtagtaccaccctcccgcttgtacgcaaacgccgggatcgcggacaggacaagtgccgctgaagcttccgtccgccgcccatggctccgctcagcgtgcagcagcagggcctctctacggtgcagggcgacgcgctggcgagcctttaggtagcagcaggagagcgcgactgcgcaggcggtaacgacggaggcgcatatcacgccggcgacgaggtagagtagggtgaaggagaagaagatgccgaaggtgaggagcaccgtgaggttgtggtccctgtcgtcgtcggacggagcagctgatgcgccgtcgcctggactgacagctggctgctggtggtacgagagcccagagatgagaacatgctaatagctagctgcagt

SEQ ID NO: 4239 - DNA, 748 bp, Zea mays
  Clone ID: TF_LIB4740-006-R1-K1-F6
ggtacccccggagctcggccgggatcgcaacccctccgcctcgttccttgctcggctcgccccaacttcgctgccggccgccgccgcattcccctcggctactcgctcctcgtcgctccccggtgatgtctggcggtaacgcgtggtcgccactgccttcgcacggatttgggtacgtttcctcaaccgattgtttgtgcaatagtttgatccattgtctgttcggatccctttcgtgtatatgctctccgtgatccacgcatcgcgtattgaacgaatcgcatctagaaatatcctagattagatgactttggcggatttattcagcgttgtttggcacaaactgtacaatcgattgaaatgccggatcggagtcggcgcatgttccccgaaataatatgattcctgattgtggcagcgacgcctcctgcttgtcctatttattttgctcgtgtcgtcgcatcgtggcttgattggtccccgcatcccgcagatccgagtctagcggcatggcgaatcgcgccggcgagcctgtggcgaggaccaacagcgatggcggcggcggcggcagcaaggactcaggcagattcgagtgcaacatctgcctggacctggcgcaagaccccgtcgtcaccctatgcggccacctcttctgctggccctgcctctacgagtggctccacgttcacgcgcactctcaggagtgccccgactgcaaggccgtcgtcgaggaggggaaactcgtccc

SEQ ID NO: 4240 - DNA, 743 bp, Zea mays
  Clone ID: TF_ZmC19309_1
ccacgccgtccgggggaagcagcagcagagagcaggccaggaacaagaacagcaatgaactcgccgccgggcgacgacggcggcggcagcgcgcacggtttattcgggtcgggcggcatccgcgggttcggctacggcgtcggcgtgtccatcggcatcctactcgtggcctccaccatcgcgctcgccatctacttctgcacgcgcacctccatgcccgagtccgccgccgcgctcgcgccgccgcggcagggcggcgacgccgggcggggcatcgacgaggccacgctcgaggcgttcccggcggtggcctacgcggaggcgaggaaggcggcggcgaaccaggcgtgctgctgccccgtctgcctcgactgctacggcgacggcgacgtggtccgggtgctccccgactgcggccacctgttccaccgcgcctgcgtcgacccctggctccggcagcgccccacgtgcccggtctgccgcacgtcgccgctgcccagccccatgcccacgccgctcgccgaggtcacgccgctggcgtccgcgcggccgtcgtgagggctgtttcttttttctctctcgcgcgttcgtgtgtctggcctctgctgctgcactctgattgcttcgtgccttcgtcccttgtgccgtttcatttctacgtacacagcacggtgtgtgatcagcgcgcgaatcagcaagatgttattttgtctctcaagattatgaaattcgatcactttggc

SEQ ID NO: 4241 - DNA, 1444 bp, Zea mays
  Clone ID: TF_ZmC2062_1
cccacgcgtccgctatgagccaaataaagagagaagccgataaactgtgtttcacgtcccggcgatgagcccccgtgtggtcctcctcttcctcgccgccctccgcccctgcgccgccctcgtccgccttcactccaccactttttccttcactttccttgacgccccagcgcgctttggcccccgagtgagcggcgatgggatctgcggctccctgcgtgccgctgacccggccgaggcgtgtgagaccatcaaagaccgcggcggccgccgcggcgcgggcaggaaggctttcgtgctgatcgcgaggggcaactgcagctttgaggagaaggtgcgggcggcgcagcaagcggggttcgacgcctccatcgtgtacgacgatgaggagaaggccagcctttactccatggttggtgaatctgatggcatacacatacctgcgatatttgtttccaagatggctggtgaaacactaaagaagtttgccaggggtgaagatgaagagtgctgtattaactcgtcgatggatgagactgcagggacagtgttggtaatgtcatttgtgtcacttgttgtcatcatgtcagttcttgcttcttttctatttgctcgaaactgccgacttctacgccatggagttgataatcacccaccttacgtcaagaaacaagtggtggaaaagtttccctgctcagcgtacagtgctccctgttctagtgaagataatttccaggaagcttgtgcaatttgcttagaagactacaataatggtgatatgcttagacatctcccatgcaagcatgaatttcacaagatctgtattgattcttggctcacaaaatggggcatcttctgccctatatgcaagctagaagtaacattgggcgggtaggcacacttcattactgcatccaagtgctggcagttctattgaagattgttgatcttttgatccattgcgaggttcaatattcattttaatgattgatctttgagaatgaagtacagatctcagttcctcaggttgggccttgtagtgtgctactagactactgcgttcaggttaatatttcgatcatctgtttgatatccttgtttggtgtgtggaagagctcaaggagctctgctgctgataaatgtcagcacttctgttgcagtgtattgccctgtattcctagagaaattaggtgttgtgtgcaagcaaagtgtaatcgtaagtccaatgtaaaccccttttataccaggttacgttaccttgctcattttattttgtgggcacagataaatgctcgttaattaggcaggggttgatcttactctaaaaaattgtcctaaggctcagaaataacgatgtttgaagatgcatttgttgcaaaaaacgatgttgggatcagattttgatgaatttattttcctaaataaaaaattatacatataaaat

SEQ ID NO: 4242 - DNA, 797 bp, Zea mays
  unsure (1)..(797): unsure at all n locations
  Clone ID: TF_21209483
atgagttattggctcgccaactccaggagcagctctacaatgaatctgctcgttttgccccaacagaagagattgatgcaatcgtagcaatgtcacttcaacatgaagaagatactcatcggacatctaggaccttaaggaggttccaaaaccatactagaggtgctcgggctactcgtttgagttcttatcgaaatgctcttagggctgaattagcaacagcaaacaatatgatttcccgtcagcggaatactgctccaataaatttgggattgagagctgctttagcaagatatcctggtgctttgcacattcaaccaaacattgacttaaatgactatgatgcactgcttgctctggatgaaaataaccaccagcacactggtgcttcagaaagccagatcaataatttgccacagtcagtagttcagtccaatagcattgaagatccatgttctgtctgccttgaaaatccttctgtgggagatactatccgccatttgccttgctttcacaagttccataaagagtgtattgacgagtggcttaggagaaagaaactgtgcccagtctgcaagtttggggattaactgaagtttgccgtaccagtctacagtggagttctacttggtagtggcagcgacgangtgctgcaatttctcatacggggatgccttttcctggcaaaagatttttttttttggtcntaaggttaaaaaaaccaatgtnattgccggtggaaccgcgccttttgggggcancaatttgggtangccccgcncggtttttggcccccc

SEQ ID NO: 4243 - DNA, 1611 bp, Zea mays
  Clone ID: TF_ZmC107_1
cccacgcgtccggtacagtatagttagcttgattgacaaggattacgttgaaacccaactgattgctttagaaggcaattttttttgtccattcgactttgctcagcaaggtaccttatatattattatgaaatgaatactttgtttttctggtcaatatactgttggagaaccaacatgtcttacttctgttatatctgctattgcagggttgatcttagtactgctggaacttatctaaacaaaaacttttctgatataagcacagagcaaggttggagaacaacacacaaccacacaagtaaattacccatttcgtttatgggtaatataactagcagttccggatgggaatctggatcttctaccacacgatctaatcaaaaccatggatctgctggaggcaatcatagctctgttagtggagcaaacataatagttcctgataagatagggaataaaacaataatgcttggtagagaaaggagaaaacaaacctcaacttcttcccatattggtgaaagctctagtgctgctgacgaacctagaggtgatcttcaatcgtcaaaaatatcagctggcccaaaccatagcagtcatcagcataatattcctgtaataaacattgatgacatatcccctgaagctagacctagttcgagtggattcactaatagaactgttgatcctaccatagaagcacaattggagtcggatgagttattggctcgccaactccaggagcagctctacaatgaatctgctcgttttgccccaacagaagagattgatgcaatcgtagcaatgtcacttcaacatgaagaagatactcatcggacatctaggaccttaaggaggttccaaaaccatactagaggtgctcgggctactcgtttgagttcttatcgaaatgctcttagggctgaattagcaacagcaaacaatatgatttcccgtcagcggaatactgctccaataaatttgggattgagagctgctttagcaagatatcctggtgctttgcacattcaaccaaacattgacttaaatgactatgatgcactgcttgctctggatgaaaataaccaccagcacactggtgcttcagaaagccagatcaataatttgccacagtcagtagttcagtccaatagcattgaagatccatgttctgtctgccttgaaaatccttctgtgggagatactatccgccatttgccttgctttcacaagttccataaagagtgtattgacgagtggcttaggagaaagaaactgtgcccagtctgcaagtttgggattaactgaagtttgccgtaccagtctacagtggagttctacttggtagtggcagcgacgaggtgctgcaatttctcatacgggatgctttcctgcagagatttttttttgtctaagataaaaaaaacaatgtattgctgtgatctgcgcttttgggcatcattttgtatgcacgcacgttttgcttgctatttttgttgtcgtaatccaccaattcccatgaattggttaccagcatcttgtcaatcatttatgtcgccgcatatatgatccatcaattggcatcaatttatttttattttacgttcttgt

SEQ ID NO: 4244 - DNA, 513 bp, Zea mays
  Clone ID: TF_ZmC107_2
cccacgcgtccgactagttctagatcgcgatctagaactagtctgaagatccatgttctgtctgccttgaaaatccttctgtgggagatactatccgccatttgccttgctttcacaagttccataaagagtgtattgacgagtggcttaggagaaagaaactgtgcccagtctgcaagtttgggattaactgaagtttgccgtaccagtctacagtggagttctacttggtagtggcagcgacgaggtgctgcaatttctcatacgggatgctttcctgcagagatttttttttgtctaagataaaaaaaacaatgtattgctgtgatctgcgcttttgggcatcattttgtatgcacgcacgttttcttgctatttttgttgtcgtaatccaccaattcccatgaattggttaccagcatcttgtcaatcatttatgtcgccgcataaaaaaaaaaaaaaagggcggcccccgacttatagctcgtcgaccccggaaataattccgggccg

SEQ ID NO: 4245 - DNA, 603 bp, Zea mays
  Clone ID: TF_ZmC238393_1
gaggtggtcatgaccatgtcttggaccaggaaaaagatcacccatcccatgccacaatttcgaatacgcaattcaagaattttaccgtcagaaaacgatgaatgatcacaatagctagccctatacactgtgacgccgagactactcacaaatttacaaggttaaagttagctacacctgcaccgcaatcgaaccacgcacgacgcatgtgtatcatgtcatgaccctccgcctccaccggccggcgcgcgccgcgccaccgcgtcttctctctgctgctcgtctcttatggcctcgatcatcgcgaccacgcgctgcaggacggcctcctgatcgtcgttgtcgtcgtcgaaggcggtcaacgcatcggcgcccctgtcgcggtcggcggcgtagaggctggccacggcgcagcggcacacggggcaggagttgcggacgtcgagccagcggtcgatgcagggcgcgtggtagaggtggccgcacgcggggacgaccctgacgccgtcgtcttcgccgaaggcgtcgaggcagatggggcagtcctctggcaggcccttcttcctggcggccgcggccgcgtacggcagcacgggcggcagc

SEQ ID NO: 4246 - DNA, 522 bp, Zea mays
  Clone ID: TF_cC-zmpo14820003f04a1
gaattcgagcaatgatggcaagcagcttgaaattgcaagctgctatatgaaggttccagtttcaaattacaaagatgtactaggaacaagatttgcattgttagattgaaaatacctcctacgataagccaattatgttccactcaagaatgaagataaacagtacatgctttgaagcatgtaatcaaacaaagaggcatttaaatgaccccaaaaactgtattatgcaccttgtaaaaacagctgcttccaaatggacaagtgccctttccgaagtcaaagtgcttacaatcaatagacctgagcttggccttgtaaccttcaacaatttcttgcttttcttcctttgaggagtaccaagtaatgctaggaactacatagtatgacaatttgcggcaaattggacaagccctgagtgtagagttgacatccatgccagacgtaggagaggtgctacgccaattcctaatgcatgagatacagaaagaatggtcgcagtcagatagcagcccaaacctcctt

SEQ ID NO: 4247 - DNA, 556 bp, Zea mays
  unsure (1)..(556): unsure at all n locations
  Clone ID: TF_ZmC3483_2
attctgatgatgatgattatgaggccctcatagcacttgacgattgcaaccatcacagaggtgcttctgatgaccaaataancagcctgccactatcattgatcgagggtgaaaattgttcagatgaaccctgtaatatatgcttggattgcccttctgctggcgattcactccggcatttgccttgcttgcacaagtttcacaaagagtgcattgacaggtggcttgggatgaagatatggtgtccgatttgcaaattaaatgtattctcccagtaggccctagggggcgcatacttttggggtagcatcgaaggtagattatagctcactaataggaatgatgactgtggagagtttttctggtaccagagaagggcagaaggcacggaaatcctcctgttcccgtctgttatataccttatcgtaggctgatatgcccaacagtatgtcagttttaggcggtgtcataggacatgaggctggatccagtgccatttttcgatcatactttttatctattatactgttccagtgaaaaaaaaataatgtatgtg

SEQ ID NO: 4248 - DNA, 955 bp, Zea mays
  Clone ID: TF_ZmC189769_1
ccggccgggccggcacgcggctctattgatgtgcctgttgcagcttataaagaagcgcctgttgcaagcaagaaacccacgcgtccggcagcacgcggctgcgctcgatcaggcatcagtgatgtgctaccgcctaccgcgtatgtatcgccgatgagcaaccccagcttcgaccacagctacgagctccctctgcggcgaaacctcctgcttctgcgcgacctcctcgacctcctccgcttcatcgccggggtgatcctggaccgcctcggcgtcgcgccgtgccagggcgaggtgcgtctgccaggacaggctttaggcggcgtcggcgagcatgccaacgatgttgacttggaacgcctcctggaggcgaggctgtgggagaccgtgacgcggtcgctcacggctccgcggtacaggcggcggcgggttgcgcctgcgcagccggcggacgtccagctggacgcagaaggcgacgccgagggcgcggccgtctgcgcgatttgcttggcgggtctggaacagggagatttccagacggtcgtggagctgtgcggctgctcgcacgtgctccacgcagcgtgcatcgatgcttgggtccgcagtggcgacgatgcggccacctgcccgctgtgccgcgcgcccatgttgcccacggcgtgggacgacgagcagagttcgttcggcgctcgccggggtgactgaggtctctgtctctctcccgaatagtaattgctgcgctagcacgtctcgacagacagacagatagatagataaacatacgccatcgtctatagcggaaagatgcaataatgtgtatgcatgtattcgcgcggatcgatcgtttccctctgaactaagatgctgtttggtttcggcttacaaaaaaaaaaaaaaaagaaggagacaatggaagagcaacgagacaatgacaagggactacaacatgaccaaa

SEQ ID NO: 4249 - DNA, 860 bp, Zea mays
  Clone ID: TF_ZmC763809_1
atctgcacacacaggctccccattctttcttattgctccccattcttcttattaattcccgcgtgcgcggacgtacggcagcgagcctctcccggactccgattccttccttccttccggcggaggtgtcggctctcctctcccctcccagagagaggaaacccggaggaagcagagacggccggacagatggattttggggcagagcagcacggctgcgagcattacacgaggaggtgcaggatacgggcgccctgctgcggcgaggtcttcggctgccggcattgccacaaccaagctaagaattcgctggaggtggacctcctcgaccggcacgagatcccccgccacgaaatcagcaaggttatctgctctctctgcaacaaagaacaggatgtgcaacagaactgctccggttgcggggcatgcatgggaaaatacttctgtgaaaaatgcaacttctttgacgacgatatctcaaagaagcagtatcactgcgatggatgcggcatctgcagaactggcggcatagacaacttcttccactgcgaaaaatgcgggtgttgctacagcaatgttttgaaggactctcatcattgtgtggaacgagcaatgcatcacaactgccctgtctgcttcgagtacctatttgactcgaccatggacatcagcgtactgcactgcgggcacacgatccatttggaatgcctgaacgagatgagggttcatcaccacttctcgtgcccggtctgctcacggtcggcctgcgacatgacggatgcgtggcagaagctcgaccaggaggtcgccgccacgccgatgccagagttctaccagaagaagatggtatggatcctctg

SEQ ID NO: 4250 - DNA, 658 bp, Zea mays
  Clone ID: TF_ZmC588778_2
ctcgaggccggccggggcaccttctggtcccctttcctacgcgcccaaatgattccagatgatacaacctgttatcatcatcatcttcataaaccatcgcgacccagcctcaaatcctggtccactcgcgagtcgcgatctcagagtccctcaccaatcactcactcgcctcgcctcactggcactgcgagcaaaatagcctcactaatcctgcgtcgctgcactgtgtagctagctagctagtgcaagcagcgatatgatgctggccgtgacagtgagccaggtcgtggcgctgctctcatcggctctctccggcaccgagggtggcagcggtgtggcggttgcggtcggtacggcaaaggcggtgggagccgagcagggcgagcgctggcggcggcgctgcggcgggcacgatgaccacccggcgtcggcggcggggtactgctgcgtgtgcatatcggcgtgccgcgacggggacgacgtccggagcctgccctgcggacacgccttccaccgggactgcgtcgaccgctggctggcgctttgccggcggacgtgcccgctctgccgtctccacgtcggcggacctgccgtcggtttggccgagcagcagcagcagctcagcgaggacctcgtcatctggttctcttcgctcttt

SEQ ID NO: 4251 - DNA, 883 bp, Zea mays
  Clone ID: TF_ZmC146862_1
agcaagcaaatgagatttattattactagtaagataagataaacaacgaatgcctatgaaccaattcatcatcagcggttaaaagggcgagcagacaagctcaatacaagtttggagcacgcaccaccacacacgctttttttgtgtcacgacacgattcacgaatccccgggacttggcctctgccacggcagcctgccgttcatggccggcgagtcatcggacgcgagcacgggaagcttctccttgccgttccgcggccactgccaaatcttggacaccgagaagctgtcgcctttgctgcccgcgccgatcctcttcccctctgtggcgccggcgcggttggagcccacgccgacgcctctgagccccgccccgcccctgccatggccgtcgccgtgcctcctgtggacggacacctggaggctcgcctcggcgaggacgtactggtaggagcccatggagtagcaccgcctggcgtccaggctgctgctgctcgtctcgccggcctccctggtcacaatggccggcgccggcgcgcacggggccaggcgccgccctggccaggttcttgaacttgccgaggcgcacggggagcacggcgtcctcgtgctcccacatgccttcctcgtcgaacagcgcggcagcgtcggcgccgagcgcgcaccggcacagcgggcacgtggagttggagagcagccaggtgtcgatgcagccgatgtggaacgcgtgcccgcacagcggcagcagccgcagccggtcctcgccggcgaactcgcacaggcagaccgcgcagtcgaacggctccttggcgccggcgccggcgccgaccacctcccggtacaggaacaccgggagcgcgtcgatgacgtcctggtccagc

SEQ ID NO: 4252 - DNA, 1766 bp, Zea mays
  Clone ID: TF_ZmC67427_1
aattcggcacgaggaccgcattcacatcgaacaacaacacaaggcgaggccgagtcgagtagcgcgaccacaacttcacacaccgcgtcgagtctcacacggcagggcacgcgtcaaggcgatccgttccatgccgccgccgccgctgccggaggagaagccgcttgcgcggcgaaagccagagccgaagccgcctaagcccaagcccaaggggcctaggccgattgggccgctgcctcagcgggacggggaccccggcggcggcgtcgccacgtcccctccgctcctcttctgcggcgacggctgctccggcccgtgcgcctacttgccccagtgccagccgcctcctccgccgtcccctggtgccaccgtgcgcctccgctcgagccggctcccgaccccgctcgtcgcgctctcggcgtcgctcctcaccgtgtccgcggtcctcctgctcgcgctgctcgtccactgcctggtcgcgcggcggcggcggcgggcgcaaggcgcgccgctggtccaccacgccgaggcgggaggggcccaggttctggctggcgcggtggagcagcaggccggcgagggggaggacgaggaggccgccggcggcggcgtgcaccacgtgtggtacatacgcaccaagggcctcgacgagcgcgccatctcggcgatcgccgcggtcgtgtacgacgccaagaagcgcggcgccggcgccagctccgacggcggcggcagctgcgcggtgtgcctcgcggagttccgccacggcgagacgctgcgcctgctgccgcgctgcgcccacgccttccaccgcgcctgcatcgacacctggctccgcgcccacgtcaactgcccgctctgccgcgcgcccgtgcagggtcgccgccgccgccgctaaccccaaccccgcaccgggaacgtccgggcgccgggaagagggtaaccctgctgctggcgccgtcatcggtggcgttcaaacacaggaccccgcgcgcggcggcggctttcctgaccgggccgtcaggcgggccgcgtcgtccatggcggcgctgccgcggcgggcgtggccggacgtcccgctgcgtgcgccggcgtcgagcagcttccgcgacggcgaggacgacgtgacggggctcggcaagatcaggcggctcctcaagctctcggacgcgctggagatggccggggtcggggtacaccggtccgcctcgttcggcgccgctacctgccagcgcttgccgccaaggccggggccgtcggcgcccggcgtcagcgccgacgagacgtcatagcgaaccgactgaggccgacgacgaggccatcggtggtctggtgaaacttgcagctttgggagctgggagcttggaggagtgaaggttggtgttggtttgccaagtttttgtgtgtgccgggcacgagacatgagaaggtaaaaaatgatatcttttccatgtttcttgtataatcgcttcgtcagcagtaacaagtaaataactcgtgagcctgtgcatgcactgcggagcgtcaggaattgtaagtaagaaagaatccttgaccaaaaaaaaaaaaaaaaaagcggccacagcacgaatacatgtgtaagatacgtgtaaggggcatgttcgttttggagcggaacgaagggaattggaggggctattcaaaattgaataggaaggtatttaatcctctccaatcgacatagcctaagagatcactcatgttcgttatgggtacatgaatgatctgaagttatatgttgctcagcc

SEQ ID NO: 4253 - DNA, 1400 bp, Zea mays
  Clone ID: TF_ZmC13111_2
tgatcctgaacatataaagttgagtttaaacaatatataaatttgaagatcattgcccgccatgttcagcttcatttgaagaggcactcaataggaattgacatgtgtcattcacacctcaaatatcttcaatctcgatgtaacattagaatgcaggcaaggtagaaatggccagatgcattcctgtaactatacctggtgtagtggtgagagttgtctcactgagtcaccaagttgtgggttcgaagcaatatctttgcatttacattttatagagggaagacttgcctcggtttatcccttctccagatcctactcatgtgggagcctctggcctagttaggagtcttgtttgcataaagtaaagaggaatcgcaccgagggataggcattgtgagtatgacgtgtgctttgcatgggccagcacctgactcagttcctgtgaaatcatgaatccaccaacggaggtcaaatacctgactgcagccagccagaatgtttacagccacacatgatgatcctatagctggctagaagaagaagaaatatttacagccatccagcataaccttagagctggtttgaagaggatgcaaccggtgcagctgcacaaatgcacaaggacatggagtacccaagaaggacactgctgcacacccctttctccgggcatccctctggtccaagccagccaatagatggagccacggccacagacggaagcaacttcgacgcgaacgtggtcatgatcctggctgtcctcctgtgcgcgctgatctgcgctctcgggctcaactccatcgtccggtgcgcgctgcggtgctcgagccgggtggtggtgggtcctgaaccgaaccaggtgacgcggcttgtccagagcgggctgaggaggaaggcgctccgagccatgccggtcctggtctactcgcctgggctgaggatcaatgctgccaacccgacatgcgcgatctgcctctcggacttcgaggcaggggagcatgtcagggtcctccccaaatgcaaccacggcttccatgtcaggtgcatcgaccggtggctgctggcgcggtcgacgtgcccgacgtgccggcagtccctgttcggagtgccgcagaaggcctccggctgctccgaggcgagccgggctgccgagccagagcctgcgcctgcgcctgcgcctgctcgctctgtccttgtgccgctcagacctgaaggtttggtcactcattatgatttttagaatgttcggttgcttcttagtcgttgcataaatgatgagagggaggctgagaaaaagtagaaacaaaaactgtgagcattagatcttactgccaatctggtttgtacattgttggttgctagagaaaaaaaagatgtgaaggttttctagtttttttttt

SEQ ID NO: 4254 - DNA, 2293 bp, Zea mays
  Clone ID: TF_ZmC25863_1
gggtaccctcgcaggccggccgggagctccaattcggccctagttttttctgagaccgcttgccgcaaacctcctgaccgcgcgtccgctagaccgctatcccaatcgccgccaccgctcccctcatcgccggcgccgcaccctgcatccctgccgctcggtaattctcgcgacagaggcagctagggcatcccagatcctccgcccatgacccggaccctggcgccgtgtgcgtgcgcctagataggagggtttgcttcttgcggcccccggcctcgctgaggtgcgcgccaagtcggcggggcgggggtgggactgtgggggcgcggctcgccgtcggatggacgccgatgaggccgtggggagcagtgggaggatggatctgaacctttacctcggtcccccccgcgccccgcgcccgcgccgctctgacctcggctccgatctcgccctcagcaccccgatgccttcctctccttcgtcctccgcagcgtccgtcgacgcaccgccgccgccgcctgagtccatgcacccgccgtacacccactcccgcgccgacctctcccctccgccgcttccgctggaggtgtacttcccctacaaccccgaagactcgcctgttccggatgcgcatatgtcgtacatgcagcctccggaactgcttatccccgggccgcggaacatgccgcctccggattcgcttatctcggggctccgagagggaattcgggaacttcggtacgccttccatccgccgccaccgcccccgcccccgcccccgctggtgcgggccaacgaactgctgggctgggaagagcgtccttcctcgtcaacggcctcttcatctttcttcccagacaccgctgctcggtgcgggctgctgctcgagcagactggaagccggtggcttcgcacgaggcggttcaggtctgaccttccacccctcagctccgaggctcgcccttctgggcaggacgccaccgagccagtgccccagcatgagcctgcagctgatgctaatgaattaaacaaggtggctcccaatggcttagaattaggtgccccggagaattcctctgaggaacgcagcaagactgccaccgcattcgagtgtaacatatgctttgagatggctagtgagccggtagtcacttcctgtggccatctcttctgctggtcgtgcttgtatcaatggttgaatgtttactccagccacaaggaatgcccagtctgcaaaggcgaggtaactgaggcaaatattactccaatatatggtcgagggaattctgatgcagagaagactgtggaggactggaagtcaccaggtcctacaatcccgccgaggccacatggacatcgccttgaaagcttctggcagcaattccaccatattcgacctatctcaagaaggcttggtgaggcgcatgggatactgtcatcatggaggcgtcttctggatcagcagatcctgggcagcgtgagtaggcttgaagggccatctgaatcagccacgcaagaaataaatgacattcgtcaacatgatcacctaagtggattggcattggcctcaaggatgagggcaaggcggtttcaaatagaagctttgagccgtcctgatggttcttccactagcccccctgataatggtctgacaggaaacaatccatcagaaattctgacaggaaacaatgcattgttggaacgtctggcaggaagcaattcaagacgacttgaattgttggaacgtcttgcttttggcattgcaaacacagctggtgccatgagtgatgactttagaagaatcgcttcaccaaaccaatatagaggatctgcttcatcatcgaatcttcaaaataatgagccagcagtcgatggagctcgcattgcgggtgcaccttctgcagaccaagcgtctaattcaagcactgttgctgtgatacaaggggatggtggtatctctgaaagtgcaggagagcctagcaatgcaggttcttcgggatccctgaggaggagagggaggagcaatgcatcaggttcattggatgtggatggtggaagcctccaacagaacaagagacacaggatgaactgaatcctctttgacatgtgtgtttgtcccaaaccaaacttggcctctttcgctgcattgtagcatgttgtagtttcgtctcttttatgtgttcactgaaacagtttacagttccttcaggttgcttaaatttggatcttcaaacatattaaaaaaaaaaaaaaaaaaatcattatgatatcggaaatggactgcctttgttgg

SEQ ID NO: 4255 - DNA, 674 bp, Zea mays
  unsure (1)..(674): unsure at all n locations
  Clone ID: TF_LIB3354-087-Q6-K6-D6
ccgggcggcaaaccaccgcgcccgccagccatactgagctccgccctggttccattccacccagagaggctccaagattgacgccgcgaccacgatgggcttccctgtggggtactcggactcggagacgctgctcccgcgcgtgctgctgcaggcgctcctcctcctgggccacctccaccgcttcctcctctgggccttccacgccgtggggctcggcgacctgatcgacctcggctgcaactacccgccgccgccgccctccgcgtccacggcggcggcggcggtggcggcgcaggagggccgcgacgtggctgccccgctgcagcaccggcggccggagttcaggcccgtcccggcggtgcgcatcgaggaggcgctccccgtggtgcggttcgacgagctggccgngcgcggcgcgcggggacggcgactgcgactgcgactgtgactgcgcggtgtgcctcgacggcatcggcggcggcgacgaggtgcggcggctcggcaactgccgccacgccttccaccgcgcctgcctcgaccgctggatggcgcacggccagcgcacctgcccgctctgccgcgcgccgctcgtccccggcgccgcggcggccggngatccctgggccgaagcgccgtggcttgacgcggccgactacgacgtgctgccctac

SEQ ID NO: 4256 - DNA, 710 bp, Zea mays
  Clone ID: TF_700169649_FLI
tactcaagagctaatagatgcattgccaacctacaaattcaaaccaaaacgtgtcaaaaactgggggattgaccatgcttcaagctcagagcatcttgatgagggtggcattcttggcccaggaactaagaaggaaagagttgtttcagctgaagatgctcagtccagctccatgtaccaacttgcgttttggtggaatccagtttatcacaaactgtgaatcagttcatgaattctggtgacagtgagtgtgctgcatctgtcttacgaagtatggagatgatgatgagcttcgtgagcttccttgcacacacttctttcatgttcaatgtgtagataaatggcttaagataaatgcggtgtgcccactctgcaaaacagagattgggggtgtggttcgatctttctttggcttgccatttggccgccgccgtgtcgataggatagcggcaagaggtgtagctagctcaagattcagtgtatagaacaatgctgtttttccgcataaagagctctgctctgttgcaatggtttgattgattgtcaaggaaagcgctgtgtgcatgacttgaagacaatgacacctggtgggagacctgatgcttgtaggggcaaatttctaagaaatgtaacggactgaaggtgctgctatactctgatgaacattttttttccaagtatgtaaataaggaacacgaagttcgcttgcc

SEQ ID NO: 4257 - DNA, 2277 bp, Zea mays
  Clone ID: TF_ZmC1904_1
cgacgtctgggtgaccgccgccgcggacccggctctactcctgggtgccgtgcctaggcattcgccggcgacgagcacccaattttggaggctgaagctgtggggacagatttgaagcagctgatgctactgtgtgctgcatctctcttacgaagtgtgggggttttcaggtgcctttcacccctcgttcgggccatatccttcccgtggagacggtagggagaccgctgccgcagctgtacactaggttcctaggtattcgccgggcccttccccggcgacgagcacccaccatgtacatgagaaatccttcttcaaatttatggcataggctacctctgtggggatcttctgtgaagcaagagaagttacctagcacacaactcaaagttcagtagattattgaggatcaacatttcagccatctgtatgttagttaatatgatggccgatggtaacatctggttagaaagatagaaactcattattgcgctacatatggtagtgcccattcgacataagaactaagctggacattggtagatccaagttattaatggcgcacacttcctgtgatggtgtacatcatgttataagtgtagcacatggggaaactgcatcaacatcaaccagtcatcaagatatgtgcagtgactcggatgaaccacatcaggaaggcgggctgttgtgttggatatgccactccttttataatgtgtgcagcaatatgctgctgctttccatgcttgatttctgttttgcgtcttcaagaaaaattgagtcaaaatagtgagctactcaagagctagtagatgcatttacaacctacaaattcaaaccaaaacacatcaaaaactgggggattgaccatgcttcaagctcagagcaatcttgatgagggtggcattctcctttgttcgcatggataatggatatacttgtttcagctgcatatgctgtcttcctcttatttattggcggtatgttcatcgaaacagacatttggatcaagaacctcagcagccacctacaacatatcctactttgactccttctcagtcatcagaaggacgcaaccatcgtaccagtggtattgttttgcatcttggatgtatctcaatttcttgcccaaggcttagtgtgctggcttatcacttcaagacaggtgttgactgtttctttgctgtatggtttgttgttggcaatgtgtggatttttggtgggcgcagtatttcatcagatgctcaggacgctcccaatatgtacaggttgtgtttggcattccttgcgcttagttgtgttggatatgccattccttttataatgtgtgcagcaatatgctgctgctttccatgcttgatttctgttttgcgtcttcaagaagatttgggtcaaaatagaggagctactcaagagctaatagatgcattgccaacctacaaattcaaaccaaaacgtgtcaaaaactgggggattgaccatgcttcaagctcagagcatcttgatgagggtggcattcttggcccaggaactaagaaggaaagagttgtttcagctgaagatgctgtgtgctgcatctgtcttacgaagtatggagatgatgatgagcttcgtgagcttccttgcacacacttctttcatgttcaatgtgtagataaatggcttaagataaatgcggtgtgcccactctgcaaaacagagattgggggtgtggttcgatctttctttggcttgccatttggccgccgccgtgtcgataggatagcggcaagaggtgtagctagctcaagattcagtgtatagaacaatgctgtttttccgcataaagagctctgctctgttgcaatggtttgattgattgtcaaggaaagcgctgtgtgcatgacttgaagacaatgacacctggtgggagacctgatgcttgtaggggcaaatttctaagaaatgtaacggactgaaggtgctgctatactctgatgaacattttttttccaagtatgtaaataaggaacacgaagttcgcttgccaggtataatgcaactttgcaagcaacttcacaggtgctctagcatcggccttggtgttctttccttccttctggttctgtgattctcttcataacggcaatgcactgcatgcattgtaaggctgtcttcagtagcttactcattctagtttctatcatcatatattctattttaaacttcaccttgtaaacagtgtaatttataatataaaatagttatttataatataaaatggtgttttatgcgatc

SEQ ID NO: 4258 - DNA, 2117 bp, Zea mays
  unsure (1)..(2117): unsure at all n locations
  Clone ID: TF_ZmC1904_2
ggggtacccctcgaggccgccgcgagccggcattcgggtcggtgtcgccgaaacgaaaggaacagctgctctcttcgcctctgccgggctacccttcctccttctccctcgtgaccacgcacgctgagcatccgcgcacctgctcgcccgattgccccggcgttttcttctcccgttcgccctgcgtgcgggcgctatcgttctcgtggcgacgtctgggtgaccgccgccgcggacccggctctactcctgggtgccgtgcctaggcattcgccggcgacgagcacccaactgatccaagttattcatggagcacgcttcctgtgatgatgtacatgagcatgctataagtgtatcacatggggaaactgcatcaacatcaaccaatcatcaagatatgtacagtgactcagatgaaccacatcaggaagataggccatcaacgagcacgcaaaccccgtcatcagagtcttctccatcaacatcaccaactgcttatagctccagaaatttatcttttcctagaagagatagtatatatggtcatggaagaaatccttggaattctggtttgtggatctcatttgaaattgtcatgtacattgctcaggttgtagctgctattgtaatcctcctcttttcaagacatgaacaaccccatgctcctttgttcgcatggataattggatatacagttggctgcattgctagtcttcctcttatttattggcggtatgttcatcgaaacagacatttggatcaagaacctcagcagccacctacaacatatcctactttgactccctctcagtcatcagaagggcgcaaccatcgtaccagtggtattgtcttgtgtcttggatgtgtcacaatttcttgcccaaggcttagtgtgctggcttatcacttcaagacagctgttgactgtttctttgctgtatggtttgttgttggcaatgtgtggatatttgatgggcgcagtatttcatcagatgctcaagccgctcccaatatgtacaggttgtgtttggcattccttgcacttagttgtgttggatatgccattccttttattatgtgtgcagcaatatgctgctgctttccgtgtttgatttccattttgcgccttcaagaagatttgggtcaaaatagaggagctactcaagagctaatagatgcattgccaacctgcaagttcaaaccaaaacgtaacaaaaactgggggattgaccatgcttcaagctcagagcatcttgatgagggtggcatcctcggcctaggaactaagaaggaaagagttgtttcagctgaagatgctgtatgctgcatctgtcttacaaagtatggagatgatgatgagctccgtgagcttccttgcacacacttctttcatgttcaatgcgtagataaatggctcaagataaatgcggtgtgcccactctgcaaacaagagattgggggtgtggttcgatctttcttcggcttgccgtttggccgccgccgtgtggataggatggctggaagaggtgtagctagctcaagattcagtgtatagaacaacgctgctttttctgtggtatcctcttacgcataaagagccctgctcatgttgttggaatggttttgatggattgtcaagcaaagcgctgtgtgcatgactccaagacaattacacctgatggagacctgatatgcttgtagcggcaagtttatgtagaaatgtgaagggctgaaggcgctgctatgctgtaatgtaacatttttttcccaacgatgtaaataaggaacacgaagttcacctgccaggtatattacaactttgcaaacttggcttgccatttggccccccccgtgtcgataggataacggcaaaaggtgtagctagctcaagattcagtgtatagaacaatgctgtttttccgcataaagagctctgctctgttgcaatggtttgattgattgtcaaggaaagccctgtgtgcatgacttgaagacaatggcccctggtgggagaccctaaggcttgtaggggcaaatttctaaaaaatgtaacggactgaaggtgctgctatnctggaaaaaaccggttttttcccccaaagtaacacacggccccg

SEQ ID NO: 4259 - DNA, 617 bp, Zea mays
  Clone ID: TF_ZmC1904_8
ccggccgggtcaaaccaaaacgtgtcaaaaactgggggattgaccatgcttcaagctcagagcatcttgatgagggtggcattcttggcccaggaactaagaaggaaagagttgtttcagctgaagatgctgtgtgctgcatctgtcttacgaagtatggagatgatgatgagcttcgtgagcttccttgcacacacttctttcatgttcaatgtgtagataaatggcttaagataaatgcggtgtgcccactctgcaaaacagagattgggggtgtggttcgatctttctttggcttgccatttggccgccgccgtgtcgataggatagcggcaagaggtgtagctagctcaagattcagtgtatagaacaatgctgtttttccgcataaagagctctgctctgttgcaatggtttgattgattgtcaaggaaagcgctgtgtgcatgacttgaagacaatgacacctggtgggagacctgatgcttgtaggggcaaatttctaagaaatgtaacggactgaaggtgctgctatactctgatgaacattttttttccaagtatgtaaataaggaacacgaagttcgcttgctaaaaaaaaaaaaaaaaaagcggcc

SEQ ID NO: 4260 - DNA, 1231 bp, Zea mays
  Clone ID: TF_ZmC21265_2
cattgggtacctcgaggccggccgggattaccaagcacccatcccttcaacaaacctcgagtcgagagagagaaagagagcagacaacaagagacaccaacgaacagaggcaaaccggctcacgcctgtctcggtgcggtggccggctaatcatggccaccgtggggcagtccggggccctgagaagggtcaccgtgcactacgccagctcgcccacgcgcggcgcggtggtagaggtgagcctcgacgacctcgacgacgagctgctccagtttgtgctcgccgatcttcttcccggccaggagggtttacaccagtcgatcttggaaggagcacacggcagcaaccaggagaactatatgagaggcgcaggatccagtgcgccgtcacaggaataccatgcacagagcagcaccgctgctgcggcagcagctgcttcgtccaggaggaatccaggcacggatgacgcccagatcgcctcggacttcgagtacgccacgaagctgcagcaggagatggagggcctcagcgtcgacgacgacggcgacggtatcagctgcgtgccgtctccgtccgactctgacgacgggcacgaccatcacgacgaagaggacgaggatgaggaggatggtaatggtggtggtgatgatgatgatgatccagacaacatgacttatgagcaaagacaggcacttgtagagtctgtggggtctgaggacagaggcttatccgacgagctcatctcctacctgcagccatggaagtacaaggcatcagggtttttctcccggaaaacaaaccatgacgactgccctatctgcctgtcaactttcaggaaccgagagactatgataacgttgccgtgcatgcatcactaccacgcagcttgcgtcaccaaatggctcagggtcaacaagacatgccctgtatgcaaatatgaactgttcggaccttgctagcatccgacaatgggctgataagacaaggtgatggggcgtcacactcacacccagctggttgcatcatctacttttttttgcaccaagaaaaaagaaaatgaaaaacaatccaaaaagagaagggaaaaaagttaggaagtgtagatcttgatcacacaagaaaaagaagaaaaaaaactgaaatttatgtcttttttatctttcctttggcttgtggaaatgtacgtaagtcacggtcttatatttgtttagaagcttgtttttttttcttc

SEQ ID NO: 4261 - DNA, 1230 bp, Zea mays
  Clone ID: TF_ZmC4695_1
ggtaccctcgattcggctcgagcggcaacggacgggtcgcaccaccagtccaccgccaccccatccaatcccatccccacaaccgggtgccgccgccttctatggcggacttcggcgacgagctctttctcgacgtcggggacgatggtttcggagacctctcctacgtctccttctccgagtccatcgagttggatctcgcctgcccacgcgacgtcttttccgcggggtttgatcccgaaaccctaacccacatcccggggtccccaatctccttcgactccgaccccgacctccgccacctctctccctcgctgacctgctccccgcccttctggggctgcctcgatgacgccgctagcttcgagtgggaggagatcgcggacgctgccctcggcgtcggcggtggcgctggcggcgccggagggggaggacaaggactagaaggagacgccgatgccgacgccgacgtgttcgggttcctcgacgagcgggagatgctgggcgtgatggagggcatcgacagcggtgacgacgactcgatcttctccgatgagcctccgtttgacttcggcgatggcgacacggagcttgaaggcatcttccggagcggtgtcgggtgggagctgctcccggtgcctctggacgaggacgagttcgaggtgctgccggggcacgtcgtggaagtgggcggcgccccgccggcggcgcttgcagtggtggagcggctccaggtggtggccgtcagaggcgaggaggttgtgcaggagtgcgctgtttgcaaggaagggatggaacagggggagctcaccactgggctgccgtgtgggcatttctaccacggggcgtgcattggtccatggcttgccatccggaacacgtgcccggtgtgccggtatgagctgcctactgatgaccctgagtatgagaagcggaggacgaggcgccattctgctggtggttcaacaccacagttgggtgcaccgatgcaggtttgagctagggctgattggtgctatgtcttggatgcaattccatcattccacggaagttagaaacctcactcattgaattggcgctaggatgtttacatgccagtagaattatacttctatgatcttgattttttcaggatttagcttttgtgctcgagagttgaatggtaagaacaattatcttaacaatttgtacatacatcttgtttcaatcaaattcttccttgcttttcag

SEQ ID NO: 4262 - DNA, 1038 bp, Zea mays
  Clone ID: TF_ZmC28548_1
tatgagccaaccagggactgctcccagggcctgtgcagcatgtactgcccgcagtggtgctacttcgtcttcccgcccccgcccccggccttcgacatcgccggccccggcggcggcggcggcgacgacgactcctccggccccaccttctcgcccctcgtcatcgccatcatcggcctgctcgccagcgccttcctcctcgtcagctactacaccgtcatctccaagtactgtggcaccttcagctccctgcggaacatggtcttcggttcccgcaggggccgcggccgcggccgtggcggcggcggcggcggcggcggcggcggcgattcaggggctcaggtgccgtggggcgccatgccgccggacgggctggacgagaccctgatcaacaagatcacgatctgcaagtacaagcgcggcgacgggttcgtggacagcaccgactgctccgtctgcctcggcgagttccgagacggcgagagcctccggctgctgcccaagtgcagccacgcgttccacctgccgtgcatcgacacgtggctcaagtcgcactccagctgcccgctctgccgctgcaacatcgccttcgtcaccgtcggcgtcggggcggtgtcgccggagccggagccggagcgccgcgccccgcgggaggaccgcgactggaggagagacaaccccgagctggtcctgacggtgggcggcccctcctcggacccagtgcgtggcgcaccgcagagccagagccagaatgcggtcagcggcagcggcggtgacgacggccaggatgcactggcgcggaaggattgcccggagagatcggaggagggcagcggcaatgcggagataaaggaagactgcgcgctgccggcggtgagggcggcgtcgtcgctgtccgacacgcaccgcgagggccgcatgtccatcgccgacgtgctgcaggcgagcctggaggacgagctgacgatggcccgggagagcggcctcctggcgggttcgtcgggacggtgcccgtgccacggggagcacagcaaggac

SEQ ID NO: 4263 - DNA, 636 bp, Zea mays
  Clone ID: TF_jC-zmshLIB3569P008d01b1
ctgacatcgccccgctgccaataagctcggctcgggtcagctcagctcaggtggctcctccattttgagtggaggactgactgccctcccgccggccgactcgcgatgctgatggggttccccgtggggtactcggagacgcccaagctgctgctgcacctcctcttcctcctcgaccacctgcgccgcctctcctcctggctgctccgcctcgggggcgccaccgacgccgacgccgacaccgacgccggccaccctcgccacccctgcgccgccgcccagcgcctggaggagcactcccccgcggtgcgcttcgactcgctgccgtgcggaagcggcggaggggtgatggcgccgctcccgctgccccagggctgctgcatctgcctgggcgactttcacgccgccgacgaggtgcgccgcgcccggagctgccgccacgtctctcaccgcgcctgcctcgaccgctgggcctagcacggtcaccgtacctgcccggtctgtcggacgccgctcctcccgccgctgccgtgccgcatcccctgaccgtgccgctgccgccttcgtagcgaaccggattacctgctacctgaggagcctgtgtgcataaacataaccttccactccaatgggctt

SEQ ID NO: 4264 - DNA, 1073 bp, Zea mays
  Clone ID: TF_ZmC502938_1
ctctcgaagcttctcgcgtctcctgggtggccgtgtccgtctccacgccaccgccccgaccgccggttcggcacgagggttccaagagcactcgacatggcggccgctaatgttggggaataacaagcggcggcagcagcagcagcggcgccgacgccgggggcggattcgagtgcaacatatgcttcgagctgccgcaggagccgatcgtgacgctgtgcgggcacctcttctgctggccgtgcctctacaagtggctgcgcatccactcgcactcgcccgagtgcccggtgtgcaaggccgtggtcgaggaggagaagctcgtgcccctgtacggccgcggcaaggaccgcgtcgacccgaggtccaagaacgtccccggggcggccgacatccccagccgtccggctgggcagaggccggccacggctccgcaggcggaccccaacaacgcccactttcccaacgccgccaacccggcgaacccgtggttcatgggcggcggcggcggaggcatcccgctggccaacgcgcgctgggggaactacaccttctcggcggcgttcggtgggctgttcccgctgctcagcttccaggtgcacgggttccccgacgccacggcctatggccagccagctgggttcccgtacgggtacggccacggccacgcttttcatggcgggcacgctggagcacatgcccacgccgcagccgcagctcctcggcacgcgcagcaccagcagcagcaggcggatgtgtacctgaaggccctgctcatcctggtcggcgttctggtgatcgcgagcctcgtcacgttctagggcgtcgcctgttggtaggtgttcatcatattgttgctgccttgctggtaataaataagagagagagacagagacaacacgaccgaaactgaattattcagagcggtgcaaggtgttgatgaagggtgttgttgtacatgctgtttgatacatgattgtatactgtggtctttgaacatacattattatcgaataataatctggaggctctgtttgaagtaaaaaaataaaaaaaaaaaaaaaaaagcggcc

SEQ ID NO: 4265 - DNA, 1722 bp, Zea mays
  unsure (1)..(1722): unsure at all n locations
  Clone ID: TF_ZmC7715_1
tgatngatctgtaggggacctcgaagcttcgagcacgccacaacccaacgccgcgcgggcggcgggcccgtgctgccctggtgtgtactgctccctcacgccccgcgccgccacccccggcccccgccaccactcctcccggcctccccgacggcgctccgggcagcaggaacaagatgtccaatcgggccggccaggggccgtatcactcactacccgcggcccgcgcccgatcgggcgcactgccctgtggtgtactggtgtgtcacgcccctcgtcactcaccccgtcacccgcaaccccatcttctattcttcccgacggcgctcctggcagcaggaacaagatgtccaatagggccacacattggtgttatgcctgtcggcggccaattcgtctccgtgggcaggatatcgtatgccccaactgcaatgatggttttatccaggaaattagtgagatgggtggcatattgaacacttatgggctaattgaaccagactttgaagagcgtcgagctagaagattcggaatgatggatgccatgtcttcccttatgcggcaacggatggaagaaatgggaagagatggtttgtttgatattcgtggtagacaaggaacaggtactgaatatggaaggaggccaactgctgttcctacattggtatttggcggcatcccttctcctggagttggtagcggtgatgttaatgttgtcctcaggggaggccgcagagctggcgctgcccaaccaaatttcagtagcttagttgttggtcccagtctggaagctctttttgagcagctacttctccagaacaaccgtcaaggcccagcacctgctccacagtcagctattgactccatgcctgtggtaaagataaaccgcaggcatcttgacgacgatccacagtgcgcagtttgcaaagacaaattcgaggttggagcagaggcacgggagatgccatgcaagcacctgtaccatactgactgcatcatcccctggctggttcagcacaattcttgccctgtttgccgccatccactgccatcacagagatcaggcagtaccagtagcgcccggccttcagcttactacaacgaagccgctgatcctcctggggtcaccagagcagatcttgaacctgctccaagagacggtggcagggaaagccaggaaaggcgccgctccttctcgtttctgtggccgtttggcccgtcgagttccagatccagttcttaccagtacgaacagaatgttgatgagcctgcagtatacgatccaaaccagatagcatattctgagtggcactatgaccactgactgaaaccctgcagcaagtgcaagctatctgcaattcgtgccttcaaccctcagctttggagaggcattcatcagctgtaatggctgcttgccgtataaaaaaaggatggttcttgcctgttatattgtgttcagtgcatagccttgctccgtatgtccgtcgtatatataatcccttgcgtgtagtaagcgatgaactgaatgcatccagaatatcatgtcatgataaacttgaatatagtttcatggttgttatttcagactgaaaataaaatcagtcttctgttccggttatactgattctgaaagaattctagacctccgttctttctttcaagacctccgttcttgaatatttgttgtctgttttaaaaaaaaaaaaaaccataaaaaagaat

SEQ ID NO: 4266 - DNA, 1639 bp, Zea mays
  unsure (1)..(1639): unsure at all n locations
  Clone ID: TF_ZmC7715_2
ccggccggggacattgggtacctcgaggcgggaccggccagcgaccgttccctccccgcgccacgcgcccgattgggtgcactgcactggtggtgtgcacgcccctcgtcactcactcgctaccccatatcccattccccccgacggcgcttctggcagcaaggaacaatatgtccaatagggccacccattggtgttatgcctgtcggcgcccaattcgtcttcgtgggcaggatatcatatgtcccaactgcaatgatggttttatccaagaaatcagtgagatgggtggcgtactgaacacttatgggctaattgaaccggactttgaagagcgccaggccagaagatttggaatgatggatgccatatcttccctcatgcggcaacggctgtcagaaataggaagggatagtttgtttgatattcatggtagacaagggacaggtactgaatatggaaggaggtcaactgctattcctacgctggtatttggtggcatcccttctcctgcagttggtagcagtgatatcaatgttgtcatcagggaaggccgcagagctggcgctgcccgtccgaatttcagtagcttagttgttggtcccagtctggaagctctatttgagcagctactactccagaacaaccgtcaaggcccaccacctgctccacagtcagctattgactccatgcctgtggtaaagataaatcgcaggcatcttgacgaagatccacagtgtgcagtttgcaaagacaaattcgaggttggagcagaggcgcgggagatgccgtgcaagcacttgtaccatactgactgcatcatcccctggctggttcagcacaattcctgccctgtttgccgtcatccgctgccatcacagcgatcaggcagtagtaccagcagcgcccgtgtgccttcagcatactacaacgaaacagcttgccctcctgcggtcgccagggcagatttcgatcctgtgccttcagcatactacaacgaaacagcaactgatcctcctgcggtcaccagagcagatttcgatcctgctccaggaaactacggcagcgaaagccaggaaagtcacgaccccttctcctttctctggccatttggcccgtcgagttcttaccaatatgaagaaaatgttgatgaacctgcagtatacgatccaaaccagatagcatattctgcgtggcactatgaccactgactgaaaccctgagttaaaatcaagatatctgcaattcgtgccttgagctctcagctttggtgaggcaaagggctgcttgccgtataaaaaatggatggttattgtgttcagtgcatacccttgctacgcatgtccgttgtggagatatcagctgtgtatagaactgggcgcaacaaactctgctgtaatgcccgtatatattccttttcggtatatcaagtctaaagctatagtacataatcctgtatgtgctgtaatcggtgaactgagtgcatccagaatatcatgtcatgataaacatgattataattacatggttgtctttttagactgaaaaaaaaaaaaaaaaaagcggccaaagcactctgcgttgtccttctgttccggctatactgaaactgaaaganacaccaggatgtgtttggttg

SEQ ID NO: 4267 - DNA, 1212 bp, Zea mays
  Clone ID: TF_ZmC2205_10
cattgggtacctcgcgggcggccgggatcacccaattgaaaggaagaagcgctccctacccaccgcggttgccccctttcggcctttccccttctcgatcgaactcgggtccttcggcgacgtgcggatttttcgtccctcccgatgcttcgcctgtatctgatccggggttcattgtgaagctgaggtgagtgtataggcataaagagagcatgaacactgttagtggtacaaagcgtgcaccaaggagacagtcgcaagatgggtctggtgataaactagtggtgatcgtggaagcaagttcccggggggtggggagccgtcgtggaccacatacccctattcctggcgccctaaactcacccattgatgtggaggccatcgaagatgaagttcaggcagtatctccttcgcgagtgcccctgccaaggaggaacaggagaaccaggagggaacctataacagtggttgacttggaggttgaagctagccgggaagggagcaaacgccagagggttgaaccagtaggacgtcacctctatccagattggggagcaaggtctagcttgcagtcaaatgccgtacaaaccagcaaagagcctgccaaggaggtccccgaggaaccatcttttacctgcccaatatgttggaataagatggaggagccttccacgacgacttgtggccatgtcttctgcgacacgtgcatcaagcaggccatcaaggttcagaagaaatgccctacttgcaggaaggggctgaaaatgaatagtgttcatcgtatttaccttccgaacggttctagttaagctgagcagctttacatatctgatggcttgtaactttgggggcaattagcttaacctctgttatccgatacatgctgactggctttgtcaaagaaacttctggtaacgtaaggctgtgcaatgtactgtgaggatcaggaattcttagcctgaacagcagatagatgtttcatcccagtctgtattatttatcggcatcaccaggagttcatcatgagaacttcctgactagggaagtcgatatcagcctcagttttactctcttattgcatccatggttcccagaatgtgttgttttgttaggatgtgaccatcggatggtgcatatgaccgtgtaaaacattattttgcaccgtattctgtattatttatatagtagagttttaaaatataaatgatgaga

SEQ ID NO: 4268 - DNA, 1434 bp, Zea mays
  Clone ID: TF_ZmC2205_2
gggtaccttcgaggcggccggggcgttcctcaccgacgcgtggcacgaagccgccctccctacccccgcctccacgcctccaacagaagaaccctaagctgccctcgctccgacgccgccacctcgtcgtccgaccgcatcgattcgatggcccgcatctccgccgtcgttgccgccgtgatcaccgccgccgttgtcgttgacgcgctgttcacagccgcctccgccaccgaggcgccggcccccgccccgatgtccggcgcgggcgccctctcagcgcagctctccgtcggctgcctcgcggcgctcctcgccgctttcctccgccactgagcggtggggccgccccgtctgcgtgcgcgtcttcagatctagtggtacagtggtagtgagagttgcagtctaatgttagtcgcaggtatcgtagcggtggtgttagtgttatgaagatgaggcatttggttttgttccacgtggtggatggatggataaatctggacgtggggagagaactttcgcttcggagtttggtcgcggttttgcccctcccttcttgaactcctccgctcgatcgaactcagttccgattcggcaggttcattgtgaagttgaggtgggtggtataagcatcgaagagagcatgagcactgccagtggtacaaggcgtgcaccaagaagacagtcgcaagatgggtctgctgataaagtagtggtgatcatcgaagcaacctccccggtggtggggagccgtcgtggaccaccgacccctgttcctggcgcccaaaactcacccattgatgtggaggccatcgaagatgaagttcaggcagtatctccctcgcgagtgcccccaccgaggagggacaggagaaccaggagggaacctataacagtggttgacttggaggttgacgctagccaggaagggagcaaacgccagagggttgtggcagtagatcacctctctcccgattggggagcaaggtctagcttgcagtcaaatggcgtacaaaccagcaaagagcctgccaaggaggtccccgaggaaccatcttttacctgcccaatatgttggaataagatggaggagccttccacgacgacttgtggccatgtcttctgcgacacgtgcatcaagcaggccatcaaggttcagaagaaatgccctacttgcaggaaggggctgaaaatgaatagtgttcatcgtatttaccttccgaacggttctagttaagctgagcagctttacatatctgatggcttgtaactttgggggcaattagcttaacctctgttatccgatacatgccgactggctttgtcaaagaaacttctggtaacgtaaggctgtgcaatgtactgtgaggatcaggaattcttagcctgaacagcagatagatgtttcatcccaaaaaaaaaaaaaaaaaagcggcc

SEQ ID NO: 4269 - DNA, 1352 bp, Zea mays
  unsure (1)..(1352): unsure at all n locations
  Clone ID: TF_ZmC2205_5
atnnnnngggctgtttgttttgacaaggcaaagcacaaattttattaattttgatcaacgatcagctaatattatattgcaaaagaaagctgaggattaaatccaagggcggagcttcagtgtgtgcgtataatactccagtttatatcctgatgaacatctgtactgtccggcatgttaacctagatccgtctcggctgcgccctcctgttcttcttgctgctgggatctggtagactcgagggagtcaacttccgaagcgaggcgtgcaacatcatcaacgcatagctcaatccgatggcgtacacgagagcaaactgtaggttgcagacgtacaggagtatggcggtagcaatctgcgcacagtgcaacagagcctgggcaacccctggagccctggtggtaagaccccaatggtcccggcagtagcgcacgccctcccagacggcgaggctgcgaagatgaagttcaggcagtatctccttcgcgagtgcccctgccaaggaggaacaggagaaccaggagggaacctataacagtggttgacttggaggttgaagctagccgggaagggagcaaacgccagagggttgaaccagtaggacgtcaccccgcgtccgattggggagcaaggtctagcttgcagtcaaatgccgcacaaaccagcaaagagcctgccaaggaggtccccgaggaaccatcttttacctgcccaatatgttggaataagatggaggagccttccacgacgacttgtggccatgtcttctgcgacacgtgcatcaagcaggccatcaaggttcagaagaaatgccctacttgcaggaaggggctgaaaatgaatagtgttcatcgtatttaccttccgaacggttctagttaagctgagcagctttacatatctgatggcttgtaactttgggggcaattagcttaacctctgttatccgatacatgccgactggctttgtcaaagaaacttctggtaacgtaaggctgtgcaatgtactgtgaggatcagaaattcttagcctgaacaacagatagatgtttcatcccagtctgtattatttatcggcatcaccaggagttcatcatgagaacttcctgactagggaagtcgatatcagcctcagttttactctgcatccatggttcccagaatgttttgttaggatgtgaccataagatgatgcatataaccgtgcaaaacattattttgcaccctattatgtattatttatatcctattatgtattatttaaaaaaaaaaaaaataaaatataaatgatgagtaaagctggtgaagatagccttatatatattgggttattgtcttgggggattattgt

SEQ ID NO: 4270 - DNA, 601 bp, Zea mays
  unsure (1)..(601): unsure at all n locations
  Clone ID: TF_21214430
acggtgtcaatcttctgaaattccttacaattaaggtttgactagtacagtaagtggggctaacgataccgatgaaacagcacccgcagatctcnnnnnnnnnnnnnnntccaaggagtcagcggaggatcaaggcagtacgagtgtacccacagtgatctgcagacgtggcagcttagaagaagctcctcaggctcacggaagtggcactggtagcatgctccttgcccagacgttggtccagagaaatcgtagccttcactgcccagcacnnnnncatcggtagaagcttcacaaggaatggtctgcgagtatactttctgatctaaggtgcctgcctcgtccaccttactgatccatgtgaaactggctttgcaaaggggacatgttgagactttacccctagaagccagacaatccgaccatccttgaatgcatgaataacagaatcgatgtccacatggtaagatgccccttgtagaagnnnnntctgtccagcatatgacgcatgataattctgtttgcctttctaaattagatgacttttccatgggtttgttatcatatcccatttcatcatcagctagagtgccaaagctac

SEQ ID NO: 4271 - DNA, 1589 bp, Zea mays
  Clone ID: TF_ZmC1181_1
cattgggtacctcgaggccggccggaaaaaaaaaaaaaaaaaaaaaaaaaaaaaaaaaaaaaaaaaagaaaacctcgaggccggccgggatcgctccctttcccatttctcccctcgattctccgggctgatccggtcgctgtccgggcctgttcgattggaggagaatcgcctggtttgaaggaaaggcttgggaagaaaggtaattatcactgtatctgacatggatgagcacatgggaagacgaacagtcggcggcctcctcttcaccaagggaggatccatccttctcttcagagaagacggctcgcgccccaaggccaagaactgctgcacgcgccatggctgtagcggtcagcatcctgctgacagagccaagggcaaggaggtgcacagggcagcagcggtgggcagtgaatcgacaccggctacccctcggagatcacaagcttttaggaagcccaacagaaggcctccacatgaaggcagtgcctcaggcagcatcgtcagggatgtaggaggcccttgtagcgaaaccggcagcgggtcaagagatgctcctgggcgtgatctgcttgctcggcttaaggagagggtcaacacatcaaggaaacgatcgttgaacagggagaacagcccgcagtcgccgagtggactcagtgtctgtgccagttccccgagcaacagtcggtcagtctcaaggccgtcgcaccggacagcttcgaggataagagaagctgacgaaggcgcgaatgcaggagctgacagtgtagtgcgcagaaatgctgctaggaggggttcagagaggagtgacgatgacttgctgctggtcgagcaggtaacaagaaaccagcgccttctgaagggtttctctctggattcatggctagatacagaagcgatcttcagggagagctttcgtccctggacgacagcatggaggatccaaatggatacttgcgctttgatgtgggcgggattgaagagctcgagaactatttcatattcaatgatcggcatagaggaatgaggatggatatcgacggcatgtcctacgaagagttgcttgctttgggggagcgaattggtaccgtaaacacaggtctttcagacgacgcgttatccgcgtgcctgaacaggaggctctacatgcccacagcttcaggttctcatgaagattgtgaaagaaaatgcagcgtatgccaggaggagtatttagcaggcgaggaggtgggcgagatggcatgtaaacactactaccacctttcctgcatagatcactggcttcggcagaagaactggtgtcctatctgcaaatctgtcgccctgaaaatcaactagcaacgtgtttcatgtttcttcataaatgaagtgtatagattcttcatctcctgtattccttccccaccccactccttttcccttttggaattttttttctttctttctttttcttttactcaaagcactcattttttattatcaatttaaatcagaaaagaaaatcttgtgttgggttagggcttgctgcgagccttactcgtgttggcccatggcccagtaaaaaaaaaaaaaaaaaaaaagcggcc

SEQ ID NO: 4272 - DNA, 1065 bp, Zea mays
  Clone ID: TF_ZmC60888_1
ccggagctgtgagaaagaaatcagctggggtggagctgtaacagttcgccacggctaggctcctctcccctctcagctctcagctgcccctcctgcatgccgatcgcctccaagctcgtctacttccagcgccgccccgcgccggcgccgcctgacgacccgggtcccgagcctcccgacccccgccgcccccgccgccgccgccgcagcggctccctctcctcctctcaccagaagccggagcatgatgttccagggcaccaaagggatcacgctgctgcagccaagcctccggggccagtcggaaaggcagcagggcttcttcacacggcctccagcgcagggctttttcaccaccgcagcacgtcggggtcggaccacggccggcttcccgacgccgtgcagcaggccagggaacggctccttcagaggctcggcagcgtggacctggtcctggcggcgggacgaaggtgctctgcacaagacatggccgctgcagacactctgggctggagctggaggactcgctcgccccgtcgttgatgcctcttcgggcggcggtcaaaccagctgcttccagttccagttccagcccggtgaacgtgaacccatccctgtgttccccaaaccggcggccttcgtcgcggtacaggaagtagaagacgggcgagccgcgcccgcggacgcagcttctgactgctccatatgcctggagaggtgcggcgccggcggcgggctcacgcagctgcgctgcgggcacgtcttccactccgcctgcctgcagcgctggctgcggtcccgcgccgactgcccctactgccgggccaccgtgcgagctcgctcctaacagcaggaaggaaggaaggatggatgatgaatggaaagtgtggaactggatgacgatggttttattaaccgtgtgtcgctgctcacctcttgttgtaaccactccactagtatgggttttttttcttttcttcttcctttgcccgttgaggtagactggtagtactgagctttgcggcttcagcgattcagtgtgatatatgtgtgtatgttgtgtct

SEQ ID NO: 4273 - DNA, 1127 bp, Zea mays
  Clone ID: TF_ZmC11035_1
gctagcccaacaagagaaagactgagagagagagagagagagagctccactgcaccctgcagcaccctgacctaaactggtccctctctgctgcctccgccccaccactcgtctcccaccgagcaatagcatgcggcacttgcaggccaccgtcgagcacctggccggggtggccgccacgcccccgccggcgtccgcggggggcggcgtgcacacggacacgttcctcatcctggccgccgtgctctgcttcttgctctgcgtcgtcgggctggccttcgtcgcgcggtgctcgcgcctgtgcaacccctcgtcctactccgtggacgcgcgggggcccgtcgacgacgacgacgacgaggcggcaatgccggcgccgcgcaagggggtcgacagggccgcgctggagaagctgccgaccgtgccgttcgcgttcgaggacgaggacgcccaggacggggagcggccggagtgcgccatctgcctcgccgagttcgcgcccggggacgaggtccgcgtgctcccgccctgcgcacacgccttccacgcggcctgcgtcgacacctggctcctctgcacgtccacgtgcccctcctgccgcaccgccctcgtgctggcgcaggcgcaggcgccgccggcgtccgcggaccccctgatgcagtgctgcgcctgcgcgtcggcgcaggcctcggcggggccggcagagtgccccgtactccccctccccctcgccgtcgtcgtcgtcgagcgcggaccttgccggacgtcagtaccgtaggctggcgatgcccggcggcgagcgtccaattgacgccgacaccttgtacatactcgccagattactagtgaagttgtgtacagtgcgcgatggtgcattagacaaatcacttcacttgtactcctactacgtctgactggttgcctagctgtaaattttaccggcgatggcgagtttgtcctctcgatcgacgtgcagtcgtgcacgaaacagagaagcgttttgttttctgctacatgctcgtggttagccgcagacatacagttccgtagagaaaagaaaaaaaaaaagcgcttgcaaagaaaagactagcatcaatcgataagacgatgggagtgtccctttttgt

SEQ ID NO: 4274 - DNA, 2072 bp, Zea mays
  Clone ID: TF_ZmC1307_29
cactcaaaggccggaccaggagccgtagaaaaaccagcccaagaggagagagagagacctccgtgccagccccgccccacctcgccgcctctccacgcgacctgctcgccgctgccgccggcgccgcatcacaaatgcccacccagaagcgcccgcctccgcctccgccaccctctccctccccctccgcggcccctggcgccggctcgccccctccctcgtctccgccgctgccgacggccgagcccgcggagaagaagcccaagctggaggtgaacggcagcgccggcgccgaagccaacggcaacgccaacgatttcggcgcgaaggaggggacggaggtggaggcgtcggagtctgagtcggaggatgcggacgccgcaaaacaggagtttgtaccagtaaaattatctgatgtacgcaaagaagtgcagtgtcccatatgcttaggcatcatccggaagactagaacagttatggaatgcctgcaccggttctgtagggaatgcattgacaaatccatgcgacttgggaacaacgagtgtccagcgtgccgcgcacactgtgcgagccggcgttctttgagagatgatccgaattatgatgccttgattgcagctctatatccagatattgacaaatatgaagaagaggagctagcgttcaacgaagaggagaatgaccgcaacaagcagattcaagcatccattgctgaggcttttcggaaacaatcagaagttattgggcggaagtctactgccaaagctactgctgctgcatttgtaagaagatcacgccgtaacattcggcctaatgggcagaatacctatttccgtggccgaggaaaagccagttctgatgacgttgctctggcctgttctgaagatgaagaggatggaaacggtgaaagctgtagcaaagaggcctcatctgcggaggagagttccccagagaaaaagcagaaacgactgccaaaatggccaacaccgcgttcttcacctgcccgagcatgcaatgatgaggttgcttctgatgaaaaggatgatgtaggaatatccagggaaaatttcagcacatctcctctacgagcatggggaaagaatggcactcgcagtcagactcgccacagtagcttcagtggttcaaatggcaggatggtcaagggtgggcgcatgatcaagttggttgagtgcttgcgaaattctgacgacaatgaaggcgagcgtgatgtacatctttgtctgcttccacttgatggacaaacggcaccaaatctggagaagtcatatctgtgttgcggcccaactctgtccatcaaacaactttgtcagtttgtcgccagtcagacatctcacaaagatgaagaagttgagatgtatgcgctgaagccttcttgtagcaagcctgtcagcactaatacatgcggtcctgacaaagcaaggctcgcaggggaggaacgcctttcagacttgcgctcctcgttcacatttcctaatggggttctggtgagatcaaacacttagattatctgattagacccgttcacgtttattctaaatgttatactcttcatttcaggagctggtgtatgccataaaagtggctaactagatgctgagtgaaggcccattagttcaaatggaagtgttttttgtttatacatatcttcatcgtgatcccttgacgaaatgacaggtttgggctcttgaatacaacttggaaggaaaaaaaacgttgggggagactagttgttgtataattagcttgtgagatgtgagataaatgtgcgtacgttgtcaacgaatagtttcagaagagtcagattggcttccacagttcacctcgctgcaacccaaaatctggtctccactgccggcatttgggggaatttctcggttgggtgaaggctgagttatttcctcgagtggtcaagttgttttacttccacagttcaccagtttcagcttttgtaattcatcggttcatattcttcaggcggcagccagtccgtgctgcgaacgacttcccagatacatgtaacataaatcttataaaaaatatatatgtaacag

SEQ ID NO: 4275 - DNA, 1864 bp, Zea mays
  Clone ID: TF_ZmC5523_1
ccgctcggttcgcggttcggcctgtgttgccttgcgacttgcgactgggcggccgggtgcccgagtcggtgcggccgtgcaggagcgtttgctgtctccgtttccgtcccgttccctttcgtggactgttttggaaggcgttgcgatgagacgctgcggcggcggcggcgaggagtgcatccctcggcgatgagcagaatcaccaccggatcttaatctcccttgcctcgtttgcggcgagcctgcgctgtcggcggcggcgcaccccctccccttcccccggcgcttccgtctgctggctggactcagttcttccaactcggcccttaacaagagaacgacgaccatgccgatgcgtggcgtcgatttcaagtggtatgatgggttcttcctctccatgctcgccactagcgtaattatcgtttccattaattggaagaggtatcgcctgtgtgcccacccgctccacatttggatagtggtggactacaccactgtcttcattgactgtatccttatgatcaaaataatgataactgtgccatttatgatttatcttggtgcatgggactttcttgacacctgttttcctaccataatttttgctaccttatggttgtcattctcatactgatgttttaggtttctaagctttgtcttgtttgtttgttccacaaccaatgactaactgaactttgcaaaagtatggctgtcagtttattctattatgtatcttcttttttgaaaaaaattagctcgctgcaggaatgttagatctcggatggcaacagagatatgctcgtttttgtggaagaataattgtcctctcagttcttgtgctacttctctacccctttctctgggtttggactgtgattggaacattgtggtttagcactgcaagaggctgcttgccagaggaaggacaaaagtggggcttcttgatatggctgcttttcagttactgtgggctcgcctgtattgcttgtgtagctattgggaagtggttacaccgaagacatgcacttcaacagagagcacaacaaggaattccagtctctgaacatggggttttagttgatatgatccgtgttcctgactgggcatttgaggctgttggcctggaaatgagagtgggtcaagatactgcatatcatcctggtctttatttaactgatgctcagagagaagcagttgaggcactgattcaagagcttccaaaattcaggctgaaagctgttccaacggactgcagtgaatgccccatctgccttgaagaatttcatgttggcaatgaggtccgtgggctcccatgcgcgcacaatttccatgtggagtgcatcgaccagtggcttcggctgaatgtcaagtgcccacggtgccggtgctccgtcttccccaacctggacctgagtgcgttgaacaatcttcggtcgaccagcgagccggaccatccatccgccagcgccagcaatgtaacgacggcaactgcagcgacgagatacgtgaggtcgcagccggcaggtcaaagctatttggtgcggttgcaggggctgctgctccgccctgtccggcacgatagcgtggagagtgacggtgagccggcggtgggcaacagtcgcttggttggcaccgaagagctgcctagcatacttgtagacgatggccatcagctgccagatcgctgactgatttgatgacctgatggatccagcatacttgtcagcataatttaggatacttgtcagcttttcttttacagttttcttttgcaaatgaaatgcgagttttgttgaaaaaaaattttttaactgaacactgaaataagcaaataaaattatttgcgtcgaaaaaaaaaaaaaaa

SEQ ID NO: 4276 - DNA, 1454 bp, Zea mays
  Clone ID: TF_ZmC17955_1
ctcgggacacgagggggcatcccatcgatgccttgctgggacggcctgccgctgccgtgtggacccacgcgagggggacagcgactgtgtagcaccgtgggcggggtgggccccagcggagtcaagcgggtgtaaattgcagcctctgctctggcggcgcccgtgctttcatcattccgctccccacacccctgttcgtggcggcctccgcccctccctctcaggctctcaccaccgtctgctggtggttgccgcggcgccgctcctccctcgtggtggcggtggaggactacggtcggggatcgacggcttcttcgtccgttggttggcaggcgaggcgatacatcaaccaaccaaaagaaatgtcagctggcaggcaagcatactggtgttaccagtgccgacagagggtgaggccacggggccgggagatggtttgtccctactgcgattctgggtttgtggctgaaatggatgatgtagatgctctcatgagccacttcgtcgggacggatcctgatttccatcgcgacccacggttcgggataatggacgcgatctcggccgcggcggcatgaggagggccaacatcgacggctacttcgttggccctggactggatgattttatcgagcagttgacccagaaggatcgccgaggaccaccgcttgtcttccggtcctcgatccccgccatgctcaccgaggaaaacagcttgcgatgttttcgtcaggactcgacgtggcggcggcggcggcggcggctccaggagggatcccaacatcgcggactacttcgttggccctggactggatgatcttatcgagcagttgacccagaatgatcgccgaggaccaccacctgctgcacagtcctcgatcgacgctatgcccacagtgaagatcacccagaggcatctcagtggggactcgcattgccctatctgcaaggagaagttcgagatgggatccgaagaagcaagagagatgccatgcaagcacctgtaccactccgactgcatagttccttggttagagcagcacaattcctgccccgtttgccgttacgagctcccgccacagggctctgccacgggtgctagctgctcgcgcgcgagatcaaccgaccagagccagagctcaagtagttcaagcagcagcgggagaaccagtgggcgtcaaaggagaaggaacccgttctcgttcctgtggcctttccgctcatcaagtagttctcgctagattagcctctggtaatctttgctcaggttcgaaatactgtttgtttttttgggtcaaatacgctggtctaatgggctttaatgtggtgggatctcaatctgtactgtatggtttgttaatgatcgccacacgatgtttctccttgcaagtatattattattaccacggtatcatcaaaaaaacttggaaatgtttaaaaaaaaaaaaaaaaaa

SEQ ID NO: 4277 - DNA, 3477 bp, Zea mays
  Clone ID: TF_ZmC10271_1
aattcggctcgagactggagttcacaactgttttcgctgtttctctctcccgtagcccagtttacctcgcctagggcgaccaccgccgccgccctacgccagctgcccaggtcttgggcggaccctttgccggcgacgagcacccaccacaccagatcaaactctagatattgccactctacgtcccagcatcctatgaccacatggtttagacagtgctgtccaggtggatgatgaattgtggtgcccaaacggaggcacgtggcacgcctcttgaagataggcactggttggaaacagattttgttggcgctccaagagttcatacttatgtactttcctttctcaaatcataacaaatcttaggcagttcaagcttagctgaatgtcaacttgcctccacgtgcaagatcccagaaacattgctatgtctcgtccgcttgattttgctgtgcttaaatacaaaaaccaaaagcttgcggaacaactggaagtccacaaatttgagttctgtgctcttgagagtagatttaatgatctaaaagagaaacaaaggacacataataagacacttgttctagtcaaaagttattgggagcgactcatagcagatctgggtatagtttctgtttgcaaaaatgaatcttcacgttcaagctgcagtacagggaacaacaatatacgaaaggactttttaaatggacttttggaggctggtgccacagaaagttcaggttctcccaattgccaactaggaaatgacgtctcttcagaacaatcaacaacaattgatattctgcagaagctattccttccatcaagtggtccatggcatgtgaataacgagtttgtttctgctgctctcatgaagttgccagaaaatgaacacagcaggcaattgcacaatgctaccagcgatgtgttatccaagcttcatgtggtgatgcgtacagtagataatcttcacttgaaacacaggcagttagcagcgaactatcaaaaacaaagagattcgagtgcctggaacagagctgaacagaaacgtctgaaagaggagttgactagtgttgttgccaagttggaaggaagcaaacaaaaactggcagtactgaaagcacagggagacaataaacaagcaacaccgatcctggttcctacgctgggaaacaaaaatatgactgcagaaaaggtgagagataaacaaacagaactgcaagatcttgaagctactcacaaggagttaatggaattgatttcaaagcgtctggaggaaattagaaggctgcatacagagagaattgaaattttgaacaagttagcaacttttcagaatatactaacggatttcaaaagcattcactcttccaaagcttttcaacttgtcaatgaccaacttcagaagtcacaagcagaactggatgatcaccaaacgttgttagagaaattacaggttgagatggatacctttgtttggcgagaaaggcaatttaatcaaaaagttgatttggctgaaatcccccagaaggtttctgcatactgtgtgtctagaattgctgaccttgaaaaggatgtccagaaactgtgtaatgaaaagaatatgcttgtgctgaaacttgaagaggcttcgagagaacctggtcggaaccaggttatctcagagtttaaagctctggtgtcatcactaccgagggaaatgggtgccgtgcaaagtgaactgtccaaacacaaggatgcttccttacagttgcattctttgcgagcagaagttcattcactttctagtatccaaaccagaaaggaacaagaaattgaagaaatgtcatttagatctgcccatgctggatctgatataagccaacttcaatctctggtccgtgagctgagggaaaatacacaggagcttaagctatttgtggagttgtataagcatgagtccactgattccagacagctgatggaatcgagagatagggaactcgctgaatgggctcgagttcacattctcaaatattctcttagtgaaagtaaattagagcaacgtgtaatttcagccaatgaagctgaagcaatctctcagcagaggttggcaactgctgaagctgagattgctgaattagggcagaagctagaaacttctaggagagatctagtgaaacaatctgatatactgaagtctaaacatgaagaatgtgaagcgtatgttgtggagatcgagagcattggccatgcctatgaagatataatgtcacaaaatcaacaattgctacagcagattattgaaagagatgatcataataccaagcttttcatggagggtgttaaatcaaaacagtcacacgatgctttgcatttggaggtgcgctcgttgcaaagaaatttgcagcatgcaagtactttgatggatttgtgcaaccagaaaactatccgcctagaggaccagctaagaggttggtcagagcggttgaggagactgtcagaggatggaatgcagcagtctatttcattgggcaattatcaaaaaaagctgtctggtatgcatggagaagctccaaagctcaggcagtcaatggatgttctacaagcgaaggctgggagcaatcggctggaaattgctgagctgcttatagaactagagaatgagaggtttggtaaaaagagactagaggatgatcttgatctaatgtcaagtaaagctaattctctaagagagaagacagataattcagcagttcttcagaaacttctccatgaggccaaggagtacaggggaatattgaagtgtggtatttgtcatgataggcagaaagaggttgtgattgccaaatgctaccatctcttctgcagtcagtgcatacagaagccacttgggagccgtcagaagaggtgtccatcttgtggactaagcttcggtgttaatgatgtgaaacctatctacatatgaaacagaaggttggcgcctgtgtcgcagcaccaaaacaaaactgcttggcgcttactaatttccggtatatggtaggcggccatggtaattcagtcggtgatgtagcataagattatgtagcatttaagttgctacatgtgattgctggtacccgctggcatatatgatgctggtgttacctcaagcgccttttgtaaagtctgcttgccttgcccaatctggtagaatagcctgacatcgtcaaccattagttccttttaggagaaaaaaatatccaacaaatgaggattgatgcttcctgcaatagtgagcaatgtacaatatatagctttagtcagtttcattgttgtagctgacagtaagaatgtagttttcttttctttttaatataccggttatccagtttgtatgtttctggagtttgccaattctgtttatcaaaaaaaggagatttagtcatttctaaccatttttttcttgtcacgatatccaaaattaccacattatatttaatatagaagatatagtttttcagt

SEQ ID NO: 4278 - DNA, 841 bp, Zea mays
  Clone ID: TF_LIB4756-071-R1-K1-H3
attgggtacctcgaggccggccggggcgggctcattgttgcccaagaccctggaatcacggagcaggggtcctccctctctctctgactctcctgagggggaggaggaggaggcagaggcggaagagcaaccaccaagtagcagagcgcgaggcgacacggggacggagccctggaggtctctcgcgagtccagaggcgatcgacggagtcacgattcgtctcccagactcccaggatacgaacaacgggactttggtttttaacggcagctagaggatagcctggagtgagcatttcattctggagatacaatgggtggctgctgctgctgctgctgttctgcaagggcatctgattcagatagagcaccggtgcgcatctatcaccgacaaaatcccgaggaacatgcacccttgtcgtcagcctttgatggaccatcgccaacttctgctatagttgcagttgacacaaatcttgatacatcatctcttgacacttaccgagcaccacctgcacctttgccatatgatgtttgcttcacagtttcagaaaatcctgatgtggagaagtcaggcattaaaatcaaaactgatgggcagcaggccccaaaagtggacgaatttgagtcgtgcgaaaaaggtgcccctgaggataaagctgatgaggaggatgtttgtccaatatgtcttgaagaatacgacaaagaaaatccacgttcggtcaccaagtgcgagcatcatttccatctctgttgcatactcgaatggatggagaggagcgagacatgcccagtctgtgaccagataactctgatagatgggatgtacgaatagcattctt

SEQ ID NO: 4279 - DNA, 1190 bp, Zea mays
  Clone ID: TF_ZmC19345_1
cattggggcgctcggggccggccggggtccgtctccttccacccagacacaggccaggcgggcccattgttgcccaagaccctggaatccggagcaggagtcctctctctctctgactctctcctgagggggaggaggaggaggaggaggcagaggcggaagagcaaccaccaagcagcagagcgcgaggcgacacggggacggagccctggaggtctctcgcgagtccagaggcgatcgacggagtcgcgattcgtctcccaggatatgaacaacgggactttggtttttaacggcagctagagggtagcctggagtgagcatttcattctggagatacaatgggtggctgctgctgctgctgctgttctgcaagggcatctgattcagatagagcaccggtgcgcatctatcaccgacaaaatcccgaggaacatgcacccttgtcgtcagcctttgatggaccatcgccaacttctgctatagttgcagttgacacaaatcttgatacaccatctcttgacacttaccgagcaccacctgcacctttgccatatgatgtttgcttcacagtttcagaaaatcctgatgtggagaagtcaggcattaaaatcaaaactgacgggcagcagtccccaaaagtggacgaatttgagtcgtgcgaaaaaggtgcccctgaggataaggctgatgaggaggaggatgtttgtccaatatgtcttgaagaatacgacaaagaaaatccacgttcagtcaccaagtgcgagcatcatttccatctctgttgcatactcgaatggatggagaggagcgagacatgcccagtctgtgaccagataactctgatagatgggatgtacgaatagcattcttggcggcggttccagttgagttggcgttctttgattttgtttttgttgtggtctggtctggtggaggagatggttgatgagtcttggcaaaaaataatttatagaagaaaaatgacatgaaattgtgctagagtcgcctgtgtcctgtttttacctgaaaaccctgtgagatttgctccctggtttcctcttgcttggtttgcgtgttcattcttccatttagatttcagtttctcagtgcctgtgtgacagggaaatcatctgtattgtacagttagtctgaaacggtgacagaaaagaagaaaagctgattctatc

SEQ ID NO: 4280 - DNA, 1147 bp, Zea mays
  unsure (1)..(1147): unsure at all n locations
  Clone ID: TF_ZmC19345_3
ccctggaaaccggnagcagagtcctctctctctctgactctctcctgagggggaggaggaggaggaggaggcagaggcggaagagcaaccaccaagcagcagagcgcgaggcgacacggggacggagccctgaaggtctctcgcccacgcgtccgagcaaccaccaagcagcagagcgcgaggcgacacggggacggagccctggaggtctctcgcgagtccagaggcgatcgacggtgtcgcgattcgtctcccactagaggatagcctggagtgagcatttcattctggagatacaatgggtggctgctgctgctgctgctgttctgcaagggcatctgattcagatagagcaccggtgcgcatctatcaccgacaaaatcccgaggaacatgcacccttgtcgtcagcctttgatggaccatcgccaacttctgctatagttgcagttgacacaaatcttgatacatcatctcttgacacttaccgagcaccacctgcacctttgccatatgatgtttgcttcacagtttcagaaaatcctgatgtggagaagtcaggcattaaaatcaaaactgacgggcagcagtccccaaaagtggacgaatttgagtcgtgcgaaaaaggtgcccctgaggataaggctgatgaggaggaggatgtttgtccaatatgtcttgaagaatacgacaaagaaaatccacgttcagtcaccaagtgcgagcatcatttccatctctgttgcatactcgaatggatggagaggagcgagacatgcccagtctgtgaccagataactctgatagatgggatgtacgaatagcattcttggcggcggttccagttgagttggcgttctttgattttgtttttgttgtggtctggtctggtggaggagatggttgatgagtcttggcaaaaaataatttatagaagaaaaatgacatgaaattgtgctagagtcgcctgtgtcctgtttttacctgaaaaccctgtgagatttgctccctggtttcctcttgcttggtttgcgtgttcattcttccatttagatttcagtttctcagtgcctgtgtgacagggaaatcatctgtattgtacagttagtctgaaacggtgacagaaaagaagaaaagctgattctatc

SEQ ID NO: 4281 - DNA, 1052 bp, Zea mays
  Clone ID: TF_ZmC75319_1
cccacgcgtccgcccacgcgtccgcaagctttccattccgtcgtatcgtgtgatcccgcctccggtatgaatgattcgcgtattttgatttcgatctgatccgtcgcactgtttgactcggccccggccgggtactgagggatccaaatccaagggaatggatcaggcggcagccatgagccccagcccacgcgccgccgccggcatccactgggaggcacacgggcggcttctcacggcgtgcctcgtcgtgctcaacgtcctcctcgtcctcctcgtctacgcctacttctggcgcttcttctcgcgctcgcgcacgcgcggcggcggcggcggcggcggcggcgaggacgacgactcggccgatggggcgtcggcgtcttcggaggcctcgtcgccgccggcgtcgcccaaggcccgggaccggcgcgaggtgcagctggccatcaccgcgctgcccgtcttcgtgcactcctcctccggcgtcggcgtcggcgtcggcgggccggcggccgagtgcgcgatctgcatcgcggagttcgcggacggcgaccagggccgcctgctgccgcgctgccggcaccgcttccacgcgcgctgcgtcgacacgtggttccgctcccacaccacttgcccgctctgccgcgccactgtcctcgccgacgccgcgccggcgccggcggaaactgccaaccaaaaccaaccaccgcatcatcttcatacggatacgccgaatggtacggactccagtacagaatctccggtgtgaaaaagacagtcgcaggcagatccattcatggtttaacttgagagtactttcaaattgcgagtgatcagatgcctgtgtactgggaggaattaaaagcctgctcatgcaagcagaagcgcacttcttgatcaggtttaattgtgagtgcattagattttagacatttcaatccgtatttttgtacaactttctcgtgtaaacagtacgtgggatgagctgctagagctggctgtaaatttatgtgtgctaattgaactgctagctgattttcttgggttctgac

SEQ ID NO: 4282 - DNA, 2096 bp, Zea mays
  Clone ID: TF_ZmC989_1
ccggccgggtatctctacctctccctctccgcacccgactcacttccacgggcgcacggaacgaggattccgtgcggatgcttcgtccggattgaacgccgcactcaagctgcgacgaatgctgattgtcagccagctccttagcatacaccctggtttcctcccggctcaaatccaagttgcccaaatgcctacaccagtgaagacgttgctgcccgtactgctcctcatctggggcggatatggccggtacctcctccgccacatcagctactgacattccctccacgatcaaccattggtcgaggccggccgggtgggcgacgcttccggctttccgtgcgaccgtgcccttttcctcctctcgcagctcgcaggcgcaacagattccacccgttccttcgggtggccggacggaacgaggaaggaggcaggatggcctccgatggccacccgccggagccggggaagaaggaggatgtcgccaccacggccgccgggcctggagcaaacgatctggacgacccgcaattcatgtgctgcgtatgtctggatcttctgtacaaaccagttgttatatcatgtggtcatatgtcatgtttctggtgtgtccacaaagctatgcatattttccgggaatcgcattgtgctgtgtgtaggcagccctatatacacttcccgagtatttgtcagctcttgcatcatttgcttctaaagcttgaaactaatgattacaaaagaagggaaaaagaagtactagaggaagagaagcgcatgcaaacatactctccccaaatcattgagttcttaaactacaagactaacgttggaagctataaggagaacagaaatgaagacagtaaagctagacctccacaagaagttccattgaatgacagcgttccagatgagcatttgaagaaaattaaattggaggatgtttcatgccctctctgtatggagatgctgtatcaacctgctgttcttaattgtggtcatgtgtattgtgtatcctgtttgtcatccttgaatgaggaaacgctgaagtgccatgtttgtggaagtcttcaccctggagatttccctaatgtttgcctggaccttgatcatttccttgaagaatattttccagcagaatatgaattgagagggcagaaagttcaatttaagaaggatcagtgcaatcgtgaaacatcatcttcaggtacttcaggcagaaaaggaagcactagggcactgcatgctgaagacccgtcaaatattcacattggagtaggatgcgactcatgtggggtatatccgatacgtggtaagagatacaaatgccaggactgcactgagttaataggctttgacctttgcgaagcctgctacaactccagttcaaagctcccaggacgctttaaccagcggcacacccctaatcacagaatggaagttgacaattcagcactcgtgcataggatactgagacaccatggcatacccgaggaaggccctgagggactgatgatggaagtggttggtcctgatgcaatggtgcagatactcattgataatcaaggaatggaggagggcaatgacgagggcccaggagaggcggccattgaagaaccagttggttctcttggctcaatgtcgcgtctgtcgcatctattcatgtataatccagaaatggaggatggcaatgacgaggactcaggagaggaggcggccattgaagaaccagttggttctcttggcgcaatggcgcctctattcatgtatgatcaagaaatggaggacaacgaggaggatcaggcacactagatgcagattgcaccagctgcagcgaagcctttgttttgtgttgctggggcggctctacttatgtaatgtggaatggagggattgcgcaagcttaaaagtatggctggatcggccttgttttttaactggttctctagttactgccatctaatagccaacatttttcccgcttttgtaaatccgtgcagttgtttgtttcaaaggaaaatgcaataaggatatgcagaactatattccttattttaaaaaaaaaaaaaaaaaaacagaagagcaagtcattttaggct

SEQ ID NO: 4283 - DNA, 795 bp, Zea mays
  Clone ID: TF_ZmC412090_1
ttgggtacctcgaggccggccgggactctacaggaccagttggctgcatatggaggtcgaggacctcgaggatctctacacatcgacgcgtcgtacgaccaagacgacccggatgaggacgagggggagcagcagagcgaggatgaccaagagatggacatgctaggaggagcggtggcggaggaggacggggcggatgacgctcgaggatccagcgccgacgaggaagaggatgaagaagacgacgacgaggaggaggagccggagggggcgcagttggtcgcgggcgattgcggaccatccctacgagctagggtttccgagtttgcggcggttgccggcgccgccgtggagcgggcccacacgtccaactgccccgtctgtatggacccgtggacctcccaaggtccgcatcgcatcagttgtatcccatgtgggcatgtctatggcagatcttgcctagagaagtggttaaccctgcgcgggaaccaaagtgcgacgtgccctcagtgtggcaaaaggtttaaacataaggacatcatcaacctctatgcacaagaggttgctgttcctaatagtgaacttgagaaggaaatttcatacttaaggcgggaaatctgttctctgaagaagatggttgtgcaccatgataaaatgtttgaggagatgatcaagaggcagaatgatggtgttcgctcaaagagacagaaagtggctgagcactcatatgaagccgcaaatctggtggcatctaccccagcacaataagttttagcttacagacgaattaacctg

SEQ ID NO: 4284 - DNA, 607 bp, Zea mays
  Clone ID: TF_LIB3354-068-Q6-N6-B2
agcctccaattcatgaatcattttacaaacgactgaccgctttcatgatccaacatggccacgtgttcatgtacaaataaatcgcaatgcaatcagatcgagcagaacgagaatgtacagcccctgcagcaaactgttacaaggaatattcacgagaaccgacattgcaaccacctgcgcatcaccagtgacttttatgacttgactacaagacaggtagtcacaactccagttggcaaatgtggcaatactgacgagcacagctgggatgggacatgccgaaatgtgttgccatgattatttttttttttccttattgacctagacctcttctctgtggagattgctcttgacgatgttgaacttgcacaatgggcatgtagcatttatgtgaagccacttgtctatacagctgcagtgaaaatggtggttgcaagggagctcacgtagttccacgccatcttcatacgggcataggcagatacagcactcatatttggggccctagattttgcgggaccctgtacgagtgaacagctcgcacaccccttggcacaggcctgacagtactccgtattgactcaagtagcaaaaaacagagctcaac

SEQ ID NO: 4285 - DNA, 3346 bp, Zea mays
  Clone ID: TF_ZmC2201_1
gtttttcgtgcactcctatttgttagaataatggacgcactaactagtccgccttaaaatcttgacttgttagaagaaggtaggcaatccacttatatacttcaacacccccactcacgtgcagccagagagaaaagcgcaaacggggtggaggcacaaatgaagcctctgccaggatttaaacgtaagacttatgactctgataccatgtgagagcggacacattaaccagttcagcccaaaagtttaagatgctgggagaaggtaggcaattcatttatacacttcaacactattcaaagctaaaactttggatatattttatcctctcaaatctccttttactaccttgccctatgtcaactttcggcctttccatgtctcttcctattgctattgtgccttatgatcccactatgcactagtgcctttggaggtctccgttggacatttctaagccatcttaacgatgttgaacaagttttttttttcaattggtgttatccctagcttatcatgtatagcatcatcctggtctcttatcctttcttatatggccacaaatctaactcaacatacacgtttccgcatatctgagaagttctgaactcgatccgttctgtcttgtctgaaaagttccatatctgcaacttgaatccaaattaatggtaaacaaagttgatacattgattccaaatggtttacttttagatttaaaattcaactttaagtttaaaggggaaactacatctatgagaaatgagcttacaccacctctgatatttttaccaattttggattaagtaaaaagtaacctgcatatgatttcagatgtaagattgcatatttggaagtaattgagtgatttctctttcatcattctttttcctataaaaacgttttacctttctatgacctttcaaaacagtgagatcttttcaaattttgacagtgatgatttagtgtaggatataatataatgtccattatcactagtatgtacaaatgaagaaaaatgacagtagatccataaccacactgttttatttttccaggcacgtttgcaacatacttctagagtagggagtgtcatttgaattccacggcaacggtcaatttatatgatagaatatggggatatggaaataattaataaaattgtaatattctcgtaccagcttatctagctggcatgcaacctctatactatatgattttttcgaaacaaatatgccaaaattgtacacaatgggcaaaacccatgcttttctttaagcaatcaagttcggtgtcataaatcttgtagacatgtgacaagcagctgatctcaatcaatgataggctcagtagtgttctcagtgtccgcaagatcaatgtttccgatttgctcatgtgtgagcattcaactggtcagttggcaacatggaattactgcatcttggactgtgccattcaccttttgtgtaggtaccagtccttatggagctgatgttcaattctgaatgttttgggctggcttaaacctttgttatcttctggggaagaggtattatgttgagctcctgttttttgctacttgagtcaatacggagtactgtcatacacttgagttaccctgcatttttacactcttattactagtcagagtgctactctaccagactcaatttgatcatctcatttttaacgcaggccggccgggaaagcgaactcgccgccctcgaaaaaaaaaaaaatcagtgccaaaacgcaaataacgcgagggagaagaagagacagaaacagtaagggtttgactgtttggctaacgtcatggcgtcgacctctccgcgccgctcctctggcggggactcagcttccccgtccgcacccctcatcccctcgccgccgacctccccggcatccggcccctccggtggcccgctagggcggctcacgagcctccgcggcgcggcgcggttcatccgccgcacggggagccggcgcctgatgagggagccctccgtggcggtgcgggagacggccgccgagcacctcgaggagcgccagaccgactgggcctactcgaagcccgtcgtcgtgctcgacatgctctggaacctcgccttcgtcgccgtcgccgcggccgtactcgccgcatcggtgggcgagcggcccaccgtgccgctccgtgtctggatcgtaggctacgtgctccagtgcctcctccacgtactcagcgtcaccgtcgagtacaggcgtcgacgcaggaacgcggaccaggagggagcgggtgatgaggatttaaagctcagtattgtgaagcacttggagtctgcaaacacgatgttttcctttatatggtggattcttgggttctattgggtgtctgcaggtggtcaagctttatcacatgatgctcctcagctttattggctgacaattgtttttctggcgtttgatgttttctttgtggtcttctgtgttgccttggcttgtgtgattggaatcgctgtttgttgctgccttccctgcattattgctatcttatatgctgtaactgatcagcaggagggagcatctgaagatgacataaacaacctatccaaattcaaatttcagacaatgagtgatgcagacaagctagctgctggcattgcagcacctgtgggtggagtgatgacagagtgtggtaccaatcctcctgtcgaacatattctctcagctgaggatgcagagtgctgtatctgcctatgcccgtatgaagatggcgtggaactacgtgagcttccttgcaaccaccattttcactgcagctgcattgacaagtggcttcacataaatgctacatgcccattgtgcaagttcgacatcatcaagagcaaccgtgacatagaagaggtctaggtcactaaggaaaaaacgccgcaaaacttttcgtcatgtctctgctgtgttcttcagtactaccgctaccacatttgcgatcctgagttgtgattaccggtcctttaggtgatgcacaaatggtactcgtgaatattctttttattagcagttttctgcagggcctgtacattctctttctgctcgatccgattgcattgcagattgatttgtaaatgagtacatggtcacgttgaaccttgaaagcagtcaatcatttcaaaaatggtttatgaaaaaaaagaaaaaaaaagcggcccctgtgctcgcctacagggtcccgcaaaatctagggccccaaatatgagtgctgtatctgcctatgcccgtatgaagatggcgtggaactacgtgagctcccttgcaaccaccattttcactgcagctgtatagacaagtggcttcacataaatgctacatg

SEQ ID NO: 4286 - DNA, 619 bp, Zea mays
  Clone ID: TF_ZmC2201_3
gcattgcagcacctgtgggtggagtgatgacagagtgcggtaccaatcctccctgtcgaacgatggcacgatattctttcggctgaggatgcagagtgctgtatctgcctatgcccgtatgaagatggcgtggaactgcgtgagctcccttgcaaccaccattttcactgcagctgtatagacaagtggcttcacataaatgctacatgcccattgtgcaagttcaacatcgtcaagagcaatctccacagagaagaggtctaggtcaataaggaaaaaaataataatcatggcagcacatttcggcatgtcccatcccagctgtgctcgtcagtattgccacatttgccaactggagttgtgattacctgtcttgtagtcaagtcataaaagtcactggtgatacgcaggtggttgcaatgtcggttctcgtgaatattccttgtaacagtttgctgcaggggttgtacattctcgttctgctcgatctgattgcattgcgatttatttgtacatgaacacgtgaccatgttggatcatgaaagcagtcagtcatttgtaaaatgattcatgaatcggaggctagtatgcaggctgctattagccaaatcctctctat

SEQ ID NO: 4287 - DNA, 822 bp, Zea mays
  Clone ID: TF_ZmC9720_2
aattcggcacgaggcagtagtagcctggcggccatggcgatggcgcctcaggggcaggccgagcacggccaagtccacgtccacgaccatcagcttggccaccggcccgagcccaacagcaggcaccccgaccccggcgcggccgccacgagcagcatcgccaccaaccggtgggggccctactccggcgccggcgattttgccagcaacatggccgtcatcctggccgccctgctgaccgcgctggcgctcgccctggcgctcaacgccgccgtgcgctacctcctcagtcgcagccgccgagctcggcgcggtcgcgccggctccagctccggggagagggacagggacagcgacgccaacatctccgacccggagaagctggccgtggaggcgcccccgcccccgcccccgcccccgccagccctggtttactccgcggccgggaccaagctggcgggcgccgcggcggagtgtgccatctgcctggccgagttcgcagacggggacaccgtgcgcgtcatgccggtctgcggccccggcttccacgcgcgatgcatcgagctctggctcgcggggggacgccgctcctcctgcccgacgtgccgcgcaccggccggagctgccgcggccacgccatcgtcgtcgtgaataatggctcggtttggccatggccagttgcgacgatgttcactgttcttggcacaggcgcacagctagcatgtgtcggttcggtgttccttcattttcagtttgcgtgttgtagtggatcattctatatattctaaaataatgtgtcaatatatctatatactcttgttt

SEQ ID NO: 4288 - DNA, 2349 bp, Zea mays
  unsure (1)..(2349): unsure at all n locations
  Clone ID: TF_ZmC514_2
ttgggtacccctccgaggtccggcaccgggaatcgcattgctgggactcgcggngatgtgggatagtggaccggatgacaaagcaagagcagaaaaaagaactttcaccatcctccctatcaatacaagattcatctacacaaattataatatactccgtgcgaaggaaagatcaaattagagattcattcgatcaattctgattgtttccttccattccaaaccaccttcaattctgatttctgcgggtgtgggatatcgtccccccttgccattccaaatcctcctctgcaattttctcatggcagctgacgtttccatcccaactcgatccgcgtcaaccgcccgctaattcctcctagttctagtcccctctctcctgcgccgactcatctttttcctcgtgtcactcccctgctgctgctgctgccgggaagatcaaatcccgtcaaaaggctccaaaggatcagagttctgtcaagatggcatgcccaagaggaaggacaccatttcccctttgtttctttctgatgatttgcctcatggctcagctgggagcttccaatgttgtactcatggcgaacaacactaccttgtcgttggatgatgtcgaggcaacttttactccagcagtggaaggttcaggtgtaagtggcgttctttatgctgtggaacctaaggatgcatgcagtccattgagagcgaaagcgattcaaggctctgtctcaccttttgcgttgattataagaggcggttgccaatttgatgacaaaattagaaatgcacagaatgctggattcaaggctgctgtagtatataataatgaagataatgacatccttgtttcaatggctggaagctcgcttggtgtccagatatatgcagtgttcatctctaaggcatcaggggaggagctgaagaaatattcaggccaaactgatgcagagttatggataataccaacatatgagaactcagcttggccaatcatggcaatttcattcgtatcactgcttgctatgtctgctatcctagttgcatgtttctttgcgaggagacaccagatcagacgggacagggcaagacttccccgagctcaggagtcccatggaatgagcagtcaattagttaaggcaataccaagccttattttcacaaaagtgcaagaagacaactgtacatcagcaacatgcgccatttgcttggaagactacagtgttggaggcacgagaagagtgctaccttgtcgacacaagttccatgcggcttgtgtggacctatggctcacctcatggagaacattctgccctgtatgcaagcgggacgcaagtgctggaacgtcagacccccctgtatcagagtctacccctttgctttcatcatccgccacacgcttgccggaatcaactgtgttggcttccttgcggtctacagcagcagcgtctccccccaggacgatcagccggcatcctttgttgcggtcaatatcccgcaattactctgtttcaggttccagtatccttcgcacccccgactctaggtttgatgcaaactcatctatctgcacaagtggaagcaacttggaccttgcaaatgtaccatccccatggtctggcacttggcaccgtgcgtctgctcactctttgtgcaggggctacttgtccccaccgatcggcatcaggaatacctcagcacatgtctcgcgttctgccaatggatctcccagtcgttacgtaggctcatcacgcatgtcccatggatcttcagggcagcagcatcctcacctgaggcactgcacattgtcaggcccgagcctgttcaccatggtgccccagtcaccgcaacagaaccagttgcagcatggtggatactcggaaacaaatctgtcggctgccgcatcggctcaatcattccgtcagctctacctgcagcattgccctgattctgacacgtcgtctcagtcacttccagggtgctgatctcttgctgcaatattcactgattcttgcgcccatgagaaatcttgcctggtgctgaattgacatgtggattttgagctcgtcagcatagttcaccatgatgataaaaaaaagagaaagaagtttggagtagttttacatgtggaaacaaaactgcttgtaagaagagagaatgtgcagccccagagtgtgagcaattttacatgcttgagtgtacaggggtttggagtagtcttggacttgcttattttgaggcatgtattgcagtcataggttacttctgctcaatagtttatgtgttgcctctgaaaaattaaacaagcgaaaaacttttaccgatatacagctttgtaggaatcctagttgctgt

SEQ ID NO: 4289 - DNA, 573 bp, Zea mays
  Clone ID: TF_LIB5120-011-A1-PF1-G11
aacttctcacgccgcctgcccagagcctctgcatcacgccaacaacagcgccaccacgggacgcgcgccatcttcagccagcgcaaacacatggcgaggatactcgtcgaagcgcccgccggctcgggctcgccggaggactccatcaactcggacatgatcctcatcctcgccggcctgctctgcgcgctggtctgcgtcctcggcctgggtctcgtcgcccggtgcgcgtgctcgtggcgctgggccaccgagtccggccgggcgcagccgggcgccgccaaagccgcgaacaggggcgtcaagaaggaggtgctgcgctcgctcccgaccgtcacgtacgtctccgacagcggcaaggcggcggcggagggaggggccgacgagtgcgccgtctgcctcgccgagttcgagggaggccaggccgtgcgcgtgctgccgcagtgcggccacgcgttccacgccgcctgcgtcgacacgtggctgcgcgcgcactcctcctgcccgtcctgccgccgggtgctggccgtcgacctgccccccgccgagcggtgccgccgctgcggcgcgcgc

SEQ ID NO: 4290 - DNA, 964 bp, Zea mays
  unsure (1)..(964): unsure at all n locations
  Clone ID: TF_ZmC128844_1
gccggccgggctgcgaaaaaaagcactcaccgctatcttgatgattgtgtctgtctcgctctcgctgctccgttcctgttcttccgctccttctccccacctcgttttggctgatcaaagttcttgttcgcgaacactttcctctgcctgacactctgagttcttggttaacgagcctgtagacccatcggccatcaccagttcactactcgccaatcgacatgtcaggacagagctcaagctcctatggtgacactgatcctggcacagacagggcatacagcaccacctccagcagcatccggtggggtccgcacggccgcggcatgacggcctgcctcgtcgtcgtcaatgtcgtgctcgtcgccctcgtctacctctacttctggagggtgttctcccgcagaagcgccgcgtccccctcagcagctaaccccacggaccacgacgacgatgcgtcttccacatcgacgccgccgtcgccgctatcgtcccaggaccagcacggtcgcatcgtggcgtcgctgccgacgttcgtcgtgcgctccgggtccggcgctggcgccgagtgtgcggtgtgcatcgcggagctgcgggacggcgacgaagggcgcgcgctgccgcggtgcgggcaccggttccacgcggcgtgcgtcgacgcttggctgcggcggcggcacaccacatgcccgctctgccgggccagcgtcgtcgtcgccgcggaggaggtggggcccaccaagggcagtggcgtaacggacacgacgacgacgaccgtggctctcgaggatatggacgcaccggtctagtcattattactgattgattgcattagttttggtttgtgtacttgtatgggaaacgacgacgtcaggtagtagtcttgggtcaatggagtatagtaaaggaagcattatcttgnntcgatgactccaaaccagcaaactggttntgcaagcaaaaa

SEQ ID NO: 4291 - DNA, 630 bp, Zea mays
  unsure (1)..(630): unsure at all n locations
  Clone ID: TF_ZmC235641_2
ntttactcccccacccccccccacgcggcctcgattccacccagtgatccagggcatcggcatccaccaccaccaccaccgaccgtgcgtgcgcggcggtccgccaatgccattccgccgctccctcgccactagggactcgccaccgcgatgtccttcctctcctcgctctccagcctcggcctcggttactccatcgccatcgcgctcggctttctcgtcctgctcgcctccctcctgctggctttctacttctgcttcggccgcggcggggactactgggccggagaagcagccaccacggcctccagctccggccacctctccatcaccgtcccgcgcgtgctcttcgtcgcggaagggtccgagtcccccgacgccgacgccgcttactcctccgccgccgtcgcggcctgctcacccgtcgggctcgatgccgccgccatcgcgtcctaccccaaggtccctttctcctccagcggggccaccgacgccgacgccatgtgctccatctgcctcagcgagtacagggacggcgagacgctgcgcgtgatgcccgagtgcaggcacggcttccacgtcgcgtgcctcgacgcctggctgcggcggagcgcgtcgtgccccgtctgc

SEQ ID NO: 4292 - DNA, 789 bp, Zea mays
  Clone ID: TF_ZmC461818_1
agagcagtcacaagcatcggctggatggagaaattaaagcatcggtcaggagctaaagagaatcacgtagcgtagtacgggtaggcatagatagcatgttcatgttctctccaacaacagtcagcagatttgtctgtctctggctctctgcactgcaaatctatttattttccaacccaactacaactatatacatgcattcttacgtagcgcgtgcttgcttgtttccgatgaattaatggcgggcggcattgcatgcatgtatagggccggtgaagggatccaagacgtcgatcaatggatcgatatgaatgatgatggcgaaggagtactaagcatgcaagcccctccccgcagcagcaggctccggtgctgccatgggggtttcctcctgctggtcgcagcacgccgccccgcacctccggcacagcggcgatacgacggagacgatggtggcgcggcaggaggggcagctggcgtgggcggcgagccaggtatcgacgcaggccgcgtggaagccgtgggcacagcgcggcagcacacggagctggtctccctccacgaacgccgccaggcagatggcgcactcctccttgtcggcggcgtctcttctacttgcttgtttcagggaagaagagacggagacggtgggcagcgcctcgatggccgccttctccagtccgctgggcgcctgggcggacgacctgccgccgctggtggtggccgacactgaaacagaggctcctcctcctctacggcaggcgcaccgggcgacaagcgcgaggccag

SEQ ID NO: 4293 - DNA, 2605 bp, Zea mays
  Clone ID: TF_ZmC6343_1
cgccgtcccccgcaccaacccacccccaccacacgtccgcaggagacccccggccggaattcggcacgcttgttgcttggcgtccgtctgccgaaacaaaagtcgccgtcctcccccctcgtcgcttcatcacctcacctccgccgtcgcctcccctcatccctccaccggcccgtttgaccctctccctggctcgctcgttctcctcctcctccgtacccgtcctagtaggtttagcgctcaacagaaccccaatcaccaccccggcgccccccgagagcagttgccttgccgcttgctgcggttccatatggtgccccccgcgtcggcgtgagggctgcgcgcgctcgtgctgtttatcgggaggagatagatggggcccgccgtccgcagtagcgtcgtgatcagggccactgtggtagggctcgtgctggttggcatcgccctggccctgccgctggccgcggcgctgcggccgctccgggagcacgtcgcgtccatcggagccgcagcctccgctggttcgtggggcgatgagcatgccttctacaaaagggatgagaacgatataggcccatattcatggaatattactggaacatataaagggagctggacttttgctggtgccacaaatggttcgtctagatttcttgagtttgtggaatctaaaggtgattcagttttggaattgttgagcactccaacaaagataagcggggtgcattatgttcagggttcagttacattccatgatgtcattgacaatgcccacaatggtggagtggctcaaataaggttagaaggagtttacatatggccttttagacaacttcgcatggtagcaaacagtggtgcagatggtgaaccactccaggaagaggattatttcttgtcaaatccataccatttattgcggattttctcctctcaagtgtttcaagaatcttctgaagagaagaaccgaaggaagaattctctcacatatgacatggagaaacattgcaacacagaaatagctgctaaggtggttcgtgtgtcatctaacccaaatgatggagaacacgagaagtaccgtttggagggtttgatggagagtccagccgtcgatgatgatggggaatgcttctctcctatcttattgaatgcaacttctttgaatgttgaagtttattacaacaaagcagtcaactacacactgatggtcacttttatctctttccttcaagttttgctgctgattagacaaatggagcatagcaacacacaatctggagctgctaaggtttctattttaatgattggccaacaagctatcatggatgcatatctctgtctacttcacctgactgctgggatattggttgagtcactcttcaatgccttcgcaacggctgcattcttcaaatttgttgtattttctatttttgaaatgaggtaccttctcgccatatggaaagcaagtaggcctttaaacagtggagaaggttgggagataatgaggcgagagctgtctgttctttacagccgcttttatggcattctgttgggaggaatccttctaatgtatgagctgcacaatttcttacgcccacttctcctcctgatgtactccttttgggtacctcaaattgtcacaaatgtcatcagggatacaagaaaacctctgcacccacaatatattttaggcatgacagttacacggcttgctattccattgtatatatttggttgccctagtaatttcatgcgtatcgagcccgacaagaaatggtccatagctgttacagtattcatgggtatccaagcagcagtgcttctgcttcagcactatcttggttctcgctgctttattcctcgccagatactgcctgagaaatactgctaccataggaaggtagaggacagcacaaatcagcccatcgattgtgttatttgcatgactacaatcgaccttacccaaagaacaagtgaatacatggtggcaccttgcgagcatatatttcactcaggctgtttacagcgttggatggacattaagatggagtgccctacttgccggcgctccctaccaccagcttagatgaggctttgtatcatatataatagtgaacaagaagtaggtagctcagcttatacaaggtgggggaactgatgtacaataaggtgaggctgcaatcgtgtgaaagctatgaacagaactgtagaaaagttttatactattgatttcaagaggtcttgtgttgtgcaaactagcgtatcaagcatcccacgaagaaatcgtccttccccgctcatgcggttatcactgttgcatgcctttgcctgctaccagtatttcggcccagcgttttggtctgagctttgtgcaaagtttgttaacgccgtgaaagagttcgagatgtgcattcttgatttggtggacacattagtagcgtgtttggtttgaggaatgagatctctctcactcacttttttgtttggtttgtggaatgaaatgaattaatctatcaccatttcatttctcgtagactcataattagtaataatatgaggaatgggtttattccaaaaaaaaaaaaaaaaaaaaactcgagaaaagggc

SEQ ID NO: 4294 - DNA, 1303 bp, Zea mays
  Clone ID: TF_ZmC21265_1
cccaacaaaccttgagttgagagaggagagaggagacagcaagcgacacaacaccccgggctgagttgagagaggagagaggagacagcaggcgacacaacacagaggtaaccggctcacgcctgtctcggtggccgtgggcaatcatggccactgtgggacagtctggggccctgaggagggtcaccgtgcactacgccaactcgcccacaggcagcacggtggcagaggtgagctttgacgaccttgacgacgagctgctcctgtttgtgctcgccgatcttcttcctggccaggaaggtttacaccagtcgatcttggaaggaacatacaacaaccaggagaaccacatgagaggtgcagcacccagtgcaccatatggttattcacggccagaggagtaccgtgcagagagcagcactgctgcagcagcagcaactggttctaggaattcaggcatggatgaagctcagatcgcctcggacttcgagtacgccaagcagctgcagcaggagatggaggacctcagcgtcgacgaagacgacaacgatatcagctgcgtgccgtctccatctgactctgacgatgagcacgagcatcatgacgaagaggaagaggctgaggaggacggtgatggtgggtggaatcatgatgatccagacaacatgacttatgagcaaggacaggcacttgtagaatctgtggggactgagtacagaggtctatccgatgagctcatctcctacctgcagccatggaagtacaaggcagtcaaggcttcagggctcttctcccggaaaacaaaccatgaagactgcccgatctgcctgtccactttcagaaaccgggaaaccatgataacgttgccgtgcaggcatcactaccacgcagcttgtgtcaccagatggctcaaggtcaacaagacatgccctgtatgcaaatacgaactgtttggaccttcctaggatccgaccacgtcgacgatggagctgagaagataatgatgatgacgacgacaacgacagatggttgtgtcatctgctctctttttttagcgccaagaaaactggaaatgaaaaagggaaatcaatccgaaaggagaatagaaattaggaagtataggtagaatatctctcttgccagtgactgtgcgatgaattaagcatacctcgtgctatttatgatgtattggattttttttatatataagaacttccccgtggaaggattatatttttttagttttatatttgggggtgttctaaaaaaaaaaaaaaaaaaaaaaaaaaaaaaaaaaaaaaaa

SEQ ID NO: 4295 - DNA, 715 bp, Zea mays
  unsure (1)..(715): unsure at all n locations
  Clone ID: TF_ZmC21265_3
ctgattcgttgcccttttcctggtgatgcagcaagnacaggcacttgtagaatctgtggggactgagtacagaggtctatccgatgagctcatctcctacctgcagccatgngaagtacaagnggcagtcaagggcttcaggnggctcttctccccggaaaacaaaccatgaagagtaggtgtatgcctgcctcttttccttctccagtttgtactactacaagtttgctcttgtttaagaagaagagaggacagatcttcatagatggtcttttctggtttgtttggatgcagctgcccgatctgcctgtccactttcagaaaccgggaaaccatgataacgttgccgtgcaggcatcactaccacgcagcttgtgtcaccagatggctcaaggtcaacaagacatgccctgtatgcaaatacgaactgtttggaccttcctaggatccgaccacgtcgacgatggagctgagaggataatgatgatgacgacgacaacgacagatggttgtgtcatctgctctctttttttagcgccaagaaaactggaaatgaaaaagggaaatcaatccgaaaggagaatagaaattaggaagtataggtagaatatctctcttgccagtgactgtgcgatgaattaagcatacctcgtgctatttatgatgaaaaagggaaatgaaaaagggaaatcaatccgaaaggatttttttatat

SEQ ID NO: 4296 - DNA, 1748 bp, Zea mays
  Clone ID: TF_ZmC1320_3
gcggttgaactcgggctctgctgcttgtacagatgtgatatcacgggtggcacctgatggtggaaggagtcctcctgcaaatcaagtggattcattggatactttgggtctccctccaaggcctttgccttacgatgatcctcaatccagccctcgcatggtgcaacacccacttgtatcaggacacgacaaagcaccaacgcatgtccagaaactaggacagcctgcagaaactaagaatacccatactgggtcaacttgcacagctcataaggtttctgcgtcctcaccaaaacagcactcagaaggttcaagaatggatgatggagtacaattctgtgattcctctgacagtgaggatgactgtccagtatgcctggaagaatatgattatgagaatccgaagattgcactgcaatgcaaacataatttccaccttagctgcatttacgagtggatggaaaggagccaggcttgcccggtctgtgcaaagactatgttgttcaatgaggatgaatgaccccgccgatggaagtcttcccagacggcaagtggaagacccaagctaaatcctgcgtgttgtgtacatagcgctgatcgtttgctgaaacttacagcattgcgaaaatttatttttatagattttttcttgatgttaatgtccgcaggggtgcttacaataggttttcatgctgaaatctcaggttctgaaaaccacagctttcggttgaaatcaaatcaaatatacagactggcctctatttacaggacataacccatgttccatatccaatcacctagaactctattcgaaagtgaacatccacaccatcttcaccactaattatcaccacatcaaaactacgaaacacaacgggttccacagtttttctcgcaaataagcgccattaagttccatcttttgcagccatctcaaacgccctcgtgaattcatttggtggctggcccccactgagttgatatttattattgatcacaaagtgtgggaccccggagatgtccgatgagtacttcttgagctcttcctgaacctcatcgactcctttgataggatcttcaagcagttcctcggccccttctatgcccacctttcttgcagcatccagcaaaacctgcttgtcaccaatgtactttccttggcaatggtaattgaggaacaattcttcaacaagaacattttgcttgtcatagccttggtgtccagcaagtgttatgagcctatgactatccatcgtgttccctgtcaatcctgacatgtcgtattcaagcccgagtcctcgaaatatctcagtcatgcgagacatcgcaccctcatattggacaggaccgaacttcatcttgaagaagtcagatttcttgacgccctccttaggcgcgtcggggttcagaaagaatggatgccaacggacctcgaaatcaaacttgcccttgctttgctccattgctttctcaaggttctttttaccgacaaagcaccaagggcacactgtatccgagctcacatcgatctgaatgagcttcttgcgggtgtctgaagccatgaattttgcacaccctgggagtgccgagtttcgcgagggacgggatgcggacgtagagcaggcgatctggcatgcacaagcacggggagatccttcgttttcctccacagcttcgtcgatagagatttacgccatttgttcatcagcgttcttccctcgtgtaattcgtggaaggatggagaagca

SEQ ID NO: 4297 - DNA, 1955 bp, Zea mays
  Clone ID: TF_ZmC3547_2
cgaatcgcgctgcgtcccctcctccccgcctgcttcatcatggaagccgacgtccccattgccgctgctacccccaggtacggagcaagcctaagccaatagctgcacccggagacacagatttggagtattgagctggctctctgttttgtcggttgtgtgcttctacttcatagaaaagagctgcattttcttcttagtgctttggatgctggccagatgaagagtagtagatttctgttcctttgtgcaatgttctgtcttatggctcggctgggagctgccaatgtcgtgctaatggggaataatctgaccctgtccttcgatgacattgaggcgagcttttctccaggagtgaaagggtctggagtcagtggagtagtttatgcttctgaacctttgaatgcctgcagcccattaacaatcaaaacagtcaatggccctccatctccctttgcgttaattataagaggcgggtgcacatttgatgagaaagtaaaaaatgcacaggatgctggattcaaagctgcaatcgtatacgacaataaaaatagtggggtcctggtttcaatggctggaagctcaagtggcattcatatatatgccgtgttcgtttcaaaggcctcgggagaggtgttgaagaaattctcaggcaatatggatgtagaggtgtggatactacctacttttgagaactcagcctggtcgatcatggcaatctcattcgtatcgctacttgccatgtgtgctgtactgggtacgtgtttctttgtgagaaggcatcgaataaggagggagcaccctagaatcgcagaagatcgagaattccatggaatgagcagtcagttagttaaggctattccaagtcttatttttacaaaagtgcaagaagataactgcacatcttcaatgtgtgccatttgcttggcagactacaatgtcggagaaaagctaagagtgctgccttgccgtcacaagtttcatgcagcttgtgtggacttgtggctgacttcttggcgaacattctgtcctatatgcaagagagatgcaaggagtggagcatcagaagttgttgcgacagaggctacccccttgctttcttctgctgctcggttaccttcattccggtcgagtgtggcagcatcccctccaaggccaataagccggcatccttcatcgcactcggtttctcgtgcttactctgtttctagtacccccaattctcccaacccctttatatcttctcacataagctcacctggcatccgtgcaagcagaagcatcacagaccttggaaatatatcatctctccatcctcgcatctcacatttgtcatcgacgcactccctggttggcagccacttgtctccaccaatcagtataaggtattggtcgtcccatgtggcgcattcagggtatggatcacccagtccacacgtgagttcatcctacatctccaattctgggtatggttcttcaagctactgctatctgggactgggaggctccagccacagccagcatgggacatacctaaggcgctgtggagaatcggggccaagcctgtgtaccatggtgccgcagcagttgcagtgggagactaatgtagcagcaggtgcgtcgtcagcaaagtccctgcggcagtcctcctacctgagacactgtggcgattcagacgccagtttgtctgacatgacgtcagcccagtcgttgccgaggtgctgagggggctctggatttgtgatttgtgcattacacagtgaggagtgtgtgacataacattactacattggctgtggtgtggagagaaacatgcatagcaatagaacatacacatagtagcacatagtagggttttgttctcttgtttctgagatgagatgtgttcttgtgctcgcgatgcgtacatatggcaagtaacatgcatgagggaataatatttatttggttgtcgt

SEQ ID NO: 4298 - DNA, 816 bp, Zea mays
  unsure (1)..(816): unsure at all n locations
  Clone ID: TF_ZmC134339_1
cattgggaccctcgaggccggccgggctgcaccctcctctgcacagactgcactgcactatgccactcggagctgcattggcactgccactgctgcaccgctctgcctacgcacgccacgccttgaccggttccagttccgtacatggacgcgcccacggcgtcgtcgccgtcctcgtccttccccggcacgagcttcgtggtcctctccgtctccatcgtcggcatcctcgccacctcgctcctgctcctggcatactacctcgtcctcacccgctgcggcctcctcttcttctggcgcccgggcatgcacgacgacgacgacgacgtcgccgccgggccgggccaccgccgccacgtcgtcgtcaccgtgcacgacgagccaccacgccggagcggcatggaggaggcggccatccgccggatccccacgttccggtaccgccacggcagtacgcgcctcgtgctggcggcggaggccaagcaggccgcgtgcgccgtgtgcctcgccgacttccgcgacggcgagaggctccgcgtgctgccgccctgcctccacgccttccacatcgactgcatcgacgcctggctccagtccgccgccagctgcccgctctgcagggccgccgtctccgaccccgccgcccttgcccttcgctgccacanccacctcgacgtcccgcttccgcgcgccgccacggacgacgtcgccgttgatgttgttagtagtagtcctactcctacctccgcagacgccgccggggaaacagaggctgtgccttctcatgagaccgcgcaccggaacagtagctgccgc

SEQ ID NO: 4299 - DNA, 1548 bp, Zea mays
  Clone ID: TF_ZmC50086_1
ggaccctcgggccgggccggggccgaaaaccagcactagaaaatcgatgacctaaattccatagagagagcgagagaaaaaaatcccaatccatccaccctcgccgcgagatcgccgggcgccgccatgtcgactccagccgccgcctactacgccgccgccgcgcgcaagcaatacttttgctaccaatgcaaccgcaccgttctcatcgcggcctccgccgccgccgccggggagctctcgtgccccgagtgccacggcgacttcctcgaggaggtcaccgtccctgcccccaccttcatcccgctgcccttcccgttcccctttgcccccaccacgatccccgccgccagcaccaccccggcccccgccccagcagccggctccggtgggtccccttccttatcgtcctcgtcctcttccgccgcgacctccccttcccagcccaacgacatctcctccatcctcaactccttcctgggactaggcgaacaacccatcagggtcggcggctctgcctcgcgcgccgccgccggcacggccacccccgagaacgagcccgagcccttcgacccggtcatgttcttccagaattacatccatagcctcgttgagggaggcgccaacatccaggtcctcctcgacgacgccagcgtcaccctcggctccggacccggcctcgggcgtatcggcggggcaagctttggggattacttcgtcggcccaggcctcgaacaactcatcgagcagctcgccgagaacgaccccaaccgctatggcacgccgccggctgccaaatcggtcctctcctcgctccccgacgtcctcgtgactcatgccatggtcgcagctgcggagggcgctgagtgcgccgtctgcaaggaggatttctcgcctggagaggtggccaagcagatgccctgcaagcacatctaccacactgactgcattgtgccgtggcttgagcttcacaactcgtgccccatctgccgatttgagctgcctactgacgatcctgattacgaggggcggaagggcactaatcctcagccggctgttggtgtggctgctgctgcatctgggagctctactgctgctgagggacagatggaggagaggcaggagaatccaagggtggttgagaggaggttcaatgtgtcgctgccatggccattcagtggattgggagggcaaacatcgcagcaggatgggaacagtggaggcagtggtagcaactcacaaggcagtggctcgcaggatggtggcccacccagcagcaagaattgatcaaaaatcagctggaggttcaccttttggcgatctgttaagaagtctgcagtatatacgtgtcaccatgactatacacctacaggaatttacagtctctgtttgttacggaacaatcgtttgtttttcatgtagacacggcgcaaaaactgccactgcagcagaatttgcgcgctgagagagttgggacttcatgtgtagatttgttgattgatcctggtccatgaaatggtaaaccccaactccatcataaagaaaata

SEQ ID NO: 4300 - DNA, 826 bp, Zea mays
  unsure (1)..(826): unsure at all n locations
  Clone ID: TF_LIB4572-004-R1-K1-H2
ccccacccgtcccccttggtccaggcgcaggcgcgagcgcgacgtccggcgtccggcttcggcggcggagtggagcgatcccgatccccacaaggaattccatcgctgtcgtggcgtttggtggcgctcctcccggccggcaagcaggatcaggtaccctcccgtcccggatcctcccaaccgttccgtttcccgcggccgggctggcttagttctgcggcgctggttgccatttcgggccaaatttgttgcgtgaagcggaaggatttggattgaatggcacgcgttgtttccagtcgacgccctcttggcttgcctttggctgtaggaaatcgcacggaggtgaggatacacgggtgcggaacgagagctaggcgaacctgtctggtacctcgcggcggagatggacgagaaggcgacgatggagagcaagctgtcctcggcggcggccttcgtggnaggggggcgtgcaggacgcctgcgacgacgcctgcagcatctgcctcgacgccttctgcgacagcaacccctccacgatgaccaagtgcaagcatgactaccatcttcagtgcattcttgaatggtgccagagaagctcccagtgccccatgtgttggcagcatatcagcatgaaagatcctatgagccaagagctactagaggctgttgaacaagagaggaacatccgagctaatccttcacgtaatactggctgttttccaccattcaaatgctgggtgatttttgagatccctgtangtgcagatgatgcagaacttgaaagacgcattattcagcacttggctgccgcagctgcagtgcgtag

SEQ ID NO: 4301 - DNA, 741 bp, Zea mays
  unsure (1)..(741): unsure at all n locations
  Clone ID: TF_ZmC3546_7
ggcgattggttccctcgaggccggccgggacctgtcattgcttcaaggggaggcgggggagccacggcggcggagggaattgtttaatcccccgtcaccgtctcctatcgccatcaccccacccgtcccccttggtccaggcgcaggcgcgagcgcgacgtccggcgtccggcttcggcggcggagtggagcgatcccgatccccacaaggaattccatcgctgtcgtggcgtttggtggcgctcctcccggccggcaagcaggatcagtcgacgccctcttggcttgcctttggctgtaggaaatcgcacggaggtgaggatacacgggtgcggaacgagagctaggcgaacctgtctggtacctcgcggcggagatggacgagaaggcgacgatggagagcaagctgtcctcggcggcggccttcgtggaggggggcgtgcaggacgcctgcgacgacgcctgcagcatctgcctcgacgccttctgcgacagcaacccctccacgatgaccaagtgcaagcatgactaccatcttcagtgcattcttgaatggtgccagagaagctcccagtgccccatgtgttggcagcatatcagcatggaagatcctatgagccaagagctactagaggctgttgaaacagagaggaacatccgagctaatccttcacgtaatactgctggtttccaccatcaaatgctgggtgaatttgagatccctgtangtgcagatgatgc

SEQ ID NO: 4302 - DNA, 456 bp, Zea mays
  Clone ID: TF_LIB5116-055-A1-PF1-C1
gcaggcctccgcttgccgctcgccgcccgccgcccgccgatcggcctccgctcgccgctcccccgaggtttcaaccgttagcaacctcaagatggctgccaatgttggggaatcagcggcagtcggtggcagcagcagtgatgcagctggagggagcttcgagtgcaatatttgctttgagttgccacaggagccaatagtaactctctgcggtcacctattctgctggccgtgcctctacagatggctgcacatgcacgcaaacacaccagagtgccctgtgtgcaaggccattgttgaagaagacaagcttgtcccccttatggccgtggcaaggaccgcgtcgacccaaggtcaaagaacactcctggagtcgacattcctcaacgcccagctggccagaggcctgcgacagcccaacaagctgatcctaacaacaatttcggcaacgcccat

SEQ ID NO: 4303 - DNA, 2222 bp, Zea mays
  Clone ID: TF_ZmC12547_1
aggcccgcatggtatgggatccgtctctccactctcttctctaccgaacacaatctcatccgtcttcctcttccccatcagccgccctaccgagtcttcgcacgcacgacgcttcgtcaggatcgattcgcgagacctctcctgtccggatcgaggttcatggtttacatatgcgcgtttgtttactgatgcataccacgaccacctgatccggatgtcaggacagatctcctgctttaatcgagtccagttcatgtatgaactctcccttttcctggcacgttgctagatgtaaaagggtgttccgggatttaagagaaccacccacgcatccatgtctgaccagcaaaggcactacggcagctacgagctcctcccggctcacccagatttgcggtgcctggtctgcacgcggccgttcactcttgacgccgaggtcaccgacagcttggaagctttagccatatgcagggagtgcaagacgacggtgcttagtgacagcaacagggacgacactccccgagccaaccgacagagaagatggcgaaggcagcaaagctccatcaggggggtctcggtgttctcgcagctgatcaacctagctagacaacagggtcatgaggcggacactgattctccgacggttccccgccgccacacatcctatagttctacgccgagccggtcccagagggggcacacttccgacgacgagagcgatggtctgagctacgccgattccgtgtttggtgagatcgagtcgaacatcagttttggtgatgagggtggggaatctgacacttctcttgatcgccacaccatggttgggagggaaattggcatacagcttgacaatgagagctacatgaacacagatacagatattgatcctatgaatgctggagtataccagtgggactcagacgatcctgaagacgatgaagatgaggagtcagaggagtctggtttggatgaaggagatgacaccatgcaggagcgccggcagcagtggcatgatatcgccccgagtggattgaatgagcaggaatctgaaggtgctgcatggacttggagaacagttggaagccaagacataaacaggactgatctgagagtcgacatggaaggacgggaaatcaggagactttttattgggaaccccggagattatgttgatgcaagacagtttgaaatgcttctcgagcaattcgctgatgaggataacaattccagaagaggagctccacctgcagcggcatcttccatcgaaaatctttcgtctgtggtcatctccaaaggctatgagataaacggtggtgtaacctgtccagtctgcaaagatgacatgcctatcaccactgtagcaaaacagctaccatgcatgcatctctatcattcatcttgcatcttgccatggcttaattctaggaacacatgcccagtttgtcgttacgagcttcctacagatgactcggaatatgagaggtccaagcatgccgcggtcaatgaaggaggtatccatggggtggagcgtacccatccgcaggaagttgttgaagaaacttatgaacctgaggttgatggaggttccaatacaggcggtgatacaatgaatgagactaatacacatgaacagcatactgcacagcagccaaatggagcacatgggcgtcatagatggctgtttattgcagcagctccagttgtaagtcttgtcagtttagctctagttttgtgcttcaccaatcctgctggcaatgttaggaggcaattgtgccgtaggtcccagactaccactacggcacatgtagacacaagaagaagttggtggtctatgttctaagtaaccagtgtttacttgctgatgctgaatttctgtgtgatggcgtgtgcttgttgccacttgccagtgttgtgtcaattatgtatgaaaaggttctagataaatttgaagtgcaaactgtgtgtgccaaccaaggtgttcttgtaaccaagttcagacagttcagcaaaacaaatactgatgattgctgctgttcattgatattttatatgtttggttgctcaggttgtaacttcaagcatgtaactaacactctgccttaaagtttacccatgcattcatcagtaagtgcctaaaaaaaaaaaaaaaaaaaaaaaaaaaaaaaaaaaaaaaaaaaaaaaaaggaaaacaatataaaagaatacaatttgggcggccg

SEQ ID NO: 4304 - DNA, 2181 bp, Zea mays
  unsure (1)..(2181): unsure at all n locations
  Clone ID: TF_ZmC31511_1
gcggcctaatgatttcgatcctcgaaagtggccatcccctttttatatcatttgataccacaagacctgccatgttaagcaatatgtgcggtgtgcacatgagncacatcacaacgcaacagtgggttccaaatctaaatacgtagccccaccttgcaaggctgacctgtagaagcgaacaagacgcgtgagcacttcctttcaccccctcgaccccgatcgaatcgctcgaacaattcactgtgcatcgatctaggcttgcgcgaggatccaattccatccgctctcctttgaggtcgtgatcctcggagttggaggagttcttcgcgagcctctttttgccccgatttctttttggcttatttgtgcgagctttctcaggagcagaagaggcagtttgcaattccgatgcacccaggcctcaagatccaactctgaggccttctccgaggcatccgcatcgatctgcgcaagaagatgggtaacgcgggaagcaacggtggaggccccgccactggtcaccgccgtcggagctccggccacggccatcaccagcaggcgccgccgcctccccagccgcaggagactgcgcccaaccgctacgtgttcgcggccgccacgccgtacccgccccagtaccctaaccccaacccgccgcagtactacccgcagtacgggaactactacccgccgccgccaccatccgtgccggtgccccttccggcgccgtacgaccaccaccacaggccacccaccgccgcccctggcgagttcccgcccccacccaccgcccacccccacaactaccccggctgggccgggcggtatccctcctacggaccgcatctgtctatgccgacgccctacgttgagcaccagaaggccgtcactatccgcaacgacatcaaccttaagaaggagacgcttcggatcgagcctgatgaagaatgccctggccgcttcctcgtcgccttcacctttgacgccacggtcgctggcagcatgactgtttacttctttgcaaaggaagagctcaactgcaatctaacaacagtgaaagaagacctaattaagcccattactgttagcttcaaagagggtcttggtcaaaaattcaggcagccttcaggaacaggaattgacttttcagtgtttgaagaatcagatttattaaagcagggggacatggatgtatatccacttgcagttaaagctgaaacaacattatctgttgatcacccaccagaaggggatgaccaaaagatgataactcctaactcacagatcacccaggccgtgtttgaaaggaaagaaaatggggattatcaagtaagagttgtttgccagatcctctgggtcaatggaactaggtatgaactgcaagaaatatatggcatagggaactccatggaaggtgatgctgatgcaaatgatccagggaaagaatgtgttatttgcctctcagaaccaagggatactactgtcctgccatgtaggcatatgtgcatgtgcagtgagtgcgccaaggtcctgaggtaccaaaccactcggtgccccatctgcaggcagcctgtggagcgtctcctggagatcaaagtgaacaacaaatctgaagatcagcagcagacgccccaatcgccaccgctcccagacctggctccgcagcaggaaggggtgtagccgtgatcaaagtcagttctgaggtattatatggctcgaatttgcggaccttcctgaaggtttgttctctcatttgagcaacgggggatgcaactggtacttttacctttagcatatgtaagcttctggcatcgcatggctttgccgacctctgctgtatctgcctatctggaggtcggagagcaggatgtcaaggagagtgtgtatcatatatacatcatgcatgcgtgtgccatggctaccttaagaagcgtatcgaggaggattcctgatgcctggttgacttcctccagggaaaaaggggaagagaactagagaagaggtggtctcttaaatctgtacaaaaatgactatttcaccttgattccataccttctctgttatggcctgaaaaggtcgatgagtattttacttggagttataaaaaaaaagtcagtgcataggtcgcctctcggccaattatttaaaaaaaaaaaaaaaaaaagcggacgctgggtcgac

SEQ ID NO: 4305 - DNA, 1126 bp, Zea mays
  Clone ID: TF_ZmC31511_4
aatcgacatatcttttcacaattcagaggttatgttgggatgaattatcctcaataattaagcacgttactgttagcttcaaagagggtcttggtaaaaaattcaagcaatcttcaggaacatgaattgccttttcagtgtttgaggaatcagacttattaaagcagggggacatggatgtatatccacttgcagttaaagctgaaacaacattgtatgttgatcacccaccagatgtgggtgaccaaaagatcaaaactcctaactcatagatcactcaggcagccaggtcgtgtttgaaaagaaagaaaatggggattatcatgtaagagttgtttgccagatcctttgggtcgatggaactaggtatgaactgcaagaaatatatggcatagggaactccgtggaaggtgatgctgatgcaaatgatccagggaaagaatgtgttatttgcctctcagaaccaagggatactactgtcctcccatgtaggcatatgtgcatgtgcagtgagtgcgccaaggtcctgaggtaccaaaccactcggtgccccatctgcaggcagcctgttgagcgtctcctcgagatcaaagtgaacaacaaatctgaagatcagcaacagatgccccaatcgccaccgctcccagcactggatccgcagcaggaagaggtgtagccgtgatcaaagtcagttctgaaacattatatggctctcgtttgcggaccttcaggccttccctaaaggtttgttctctcatttgagcaatggggaatgtaactggtactttacctttagcgtatgtaaggttctggcatggctttgccgacctctgctgtatctgcctatctggaggtgggagaccaagatgccaagaagagtgtgtaccatatatacaccatgcatgcgtgtgccatggctaccttaagaagcgtagcgaggaggattcatcattcctggttgacttcctccaggaaaaccaggggaagagaaggttgtctcataaatttgtacaaaaaatgactatttccagggaaaccaggccttctctgttatgccatgaaaaaaaaaaaaaaagcggcctgtgcctcgatgattatttccaaaaaaaaaaaaaaaaaagcggcc

SEQ ID NO: 4306 - DNA, 502 bp, Zea mays
  Clone ID: TF_ZmC270420_1
cggttaattggtaggcacggtaatctcctcctcctctcggggtcggccccccggggggcgctatatacatgcgcacgcatcgcacatcctgcagcggcaccgacacgcgcgccgacgcaaagcaaagaaccagactacgtgcagcaaagaatccattcgccggccgaccgccatgtccgtcgcgggcgccgtgaccacagccgccgttccgtcccgagcgcccatgtcgtcggcgtccgtcgacgaggcgcgctgcgggggcggggccactgcggcagcgggggcgggtggctcgccgttgccggccccacctcacgagtgcgcggtgtgcctgtccgagctgccggctggagccgaagcggcggtaccggtacggcgacggacgctgccggcgtgcggccacgcgttccacgcggactgcatcggaaggtggctgccgctgcgccccgagtgccctctctgccgccgccccgtgctgctcgccggtggcggcggacaacgg

SEQ ID NO: 4307 - DNA, 766 bp, Zea mays
  Clone ID: TF_ZmC888799_1
gccggccgggccttcgactctcccagtgccagcacaccagcactaccgccaacgcgttacacagacggtcctctgcgttacagagctcgacaagatgagcgtcggacagctgcacacaaggaggctcctgtcgcacgccgccgccgccgcggctgcctcgtcggcgggaccaccagcgacggaggtgcaggtgcctgccgcgcacgctcacgcagcagcgcccttcagctccctgaacacgatggtgatcacggcgctgtcgctgctcctgtgcggcctggtggtcgtgctcgcggtgcacgcggtcgtccggtgcgcgttccgcgtcacgcgccgcgtgtgctacggccaggacgagccccacggcggcggcggcggcgccgatgcgttggcggtcgcagcctccttctcctgccaggccggccccaggaggaagcgcgggccgcgaaccgggctgcccccgtggatactctactcccgcgaggtcgagctcactgggtgcggcgcggcagaatgcgccatctgcctcacggagttcgtgcggggtgaccgcgtacgcgcgctgccgcactgcaaccacggcttccacgtgcggtgcatcgaccgctggctcgccgcgcggcagacgtgccccacgtgcaggcgggcgccgttcgccgctaacccctcgctctcgctgccggacagcgcggaggcgccggagtccgtgcagcttcaggcgcgcgttgaatccggggccgggcagcaccagcacgagactcaatag

SEQ ID NO: 4308 - DNA, 1486 bp, Zea mays
  unsure (1)..(1486): unsure at all n locations
  Clone ID: TF_ZmC3298_4
actcgtaaacaagcgccctcttggatccttgcaagcagaaccccgtcagtgtcacgatgttgacatgacaagtcctgctgatactggccacctcgttcatgaattccncccttcgcttttggtgtcctttagcatcttgactgctacctggcggccatcgtggaggctgcctctgtacacgggtccgaacccaccttggcctagcttctcggtgaaggatcttgtcattcttttcacatctgcgtaggtgtatctttttggatgcaggttcccgttcttctgtagaaaggactcgatccttggttcgtccttcgatttgaatggcagcccggccggtttagaggaattggaattcactcaataaagtaacttatttagtttggaatttgacatcccacctttttccatagctcagatataagtcaatctcaaattcatagggtggaggatgagaaatgattttatgcattagtagaatttgtttctactttgtaacttacataacactcttcgtctcactcctctatagtaaaaatgtagcacataaatatttccgacatcttgctaataatagtatacaaatatattttgcataaaaccgaattagcctgattgatatatgccaaaattgttattattagaatggaattcaattccaatgatccaaacggcgcgtgatgggaaagtgaattaatatagaaacagaccatatcaccatactgaaataatcttagttgttgaagcatattgagatggcacacggtgcttaaagttgaacctagctggttatgtgaacttaaaaaaagtataaacattgggtaacacaatatactagtatacaaaaatatgtgagcatacacacacttgagcttagctctttaacttatttttaaatctttttcttattaaataaaatattttatgacctagctcttcaaacactgttggagctacgacagctacccttggcaaaacttcgtgttctgttttctcccttcaatgcaaggcagagctctttaaaaaaagttctaatgtgatgtgccctgatgaggcaacggtggcaacgctgcaagatttcttactcttttgtttacagtttcacgtaaactgcatcgacccatggctgcgccaacagggtacatgcccaatctgcaagcaccaggtgagcgatgggtggcatgctacaggcaacggtgaagaggatgcttcttacatggtgtgagtagctgactaggagctgactaggagtaggccatagctaactactagtagctgctaactgaatccgtggaacatagttttcgaggtgacgggttggactgatctagggatgtgatctaatccctttctatcctaacaaaaccgcgtgtggaaacagttgtccagtacggttcttttacaggtaacgctcatttcaaacattctctggaatggaaggcataacaaggttgatgataatctacaaaaaaaaaaaaaaaaagcggcc

SEQ ID NO: 4309 - DNA, 1119 bp, Zea mays
  unsure (1)..(1119): unsure at all n locations
  Clone ID: TF_ZmC3219_3
ccgcctccgccggatgcgcgggtggcgccactcccccggaggactcgaggaagagataaggatgtttcagacaagagtgttactgggaggaatgaacatgtatgaccgctaccaggattggcgccttgacgttgataacatgacatacgaggagttgctcgagcttggagacaaaattggatatgtcaacacagggttacgtgacgacgagattactcgcaaccttcggaaggtcaagcacccatccttcagttccttacggttcgcaacagaaatggaaagaaaatgcagcatttgccaagaagaatttgaaacaaatgaagagatgggaaggctagactgtggccatagctaccatgtgtactgcatcaagcagtggctctcgcagaagaacatttgccgagctctacccgaaccacagaggccgtgcatgtcccggaggcgaccgtgcaggagcagatatcctcgcccttcatggactcgccgccgccgcacctcgacgcccccttcttcggggccgatctgatcccctccggccgcctccgtcggatgcgcgggtaccgtactcccccggaggcctcgaggaagagataatgatgttttagacaagagttttactgggaggaatgaacatgtacgatcgctaccaggattggcgccttgatgtagataacatgacatacgaggagttggtcgagcttggagacagaattggatacgtcaacacagggctacgtgaggacgagattgctcgcagccttaggaaggccaagcacccatccttcggttccttgcgattcgcagcagaagtggaaaggaatgcactatttgccaagaagaattcagtcaaatgaagagatgggaangctagtctgtggccatagctaccatgtgttgtgcatcaagcatgggctctctcanaagaacactgcccggtttgccaaactgccgtcaccagaaattgaaatgcaaactccaaggcacgctggtctgcatncctaagggggaaatccatgtgnaaattggccaattaggttgtcnggtanagnccgtcatttttatttaggggggttgggggtnaattttttcncgtttggaagatacgcataatctaaaacg

SEQ ID NO: 4310 - DNA, 1668 bp, Zea mays
  unsure (1)..(1668): unsure at all n locations
  Clone ID: TF_ZmC11494_1
gggtacctcgaggccggccnnnnnnnantttccaaaaaaaaaaaaaaaaaaaaaaaaaaaaaaaaaaaaaaaaaaaaaaaaaaaaaaaaaaaaaaaaaaaaaccggacccacgcccgcgcggacgcgtggacaccaatacactacaccataccagaaggagcaaaaataagacgagatggcggacgagcgcttgcctcaaacggccggcgcccgcacggctctcgccagagctactggatcctcggcacggaaacgcgcccgcgatagttaggtgcgcctgtgggcccggccggctcgtcacttacataggcgcacgcacccccgcctggtgcgtcgtcgatcgctgctttgctggcgcgcggcggccctgtgtggcacagtagaggtctgctgaggacgacgaccggaggcgtgctgcgtggatggtcctcatggccgggatgctccccggcgtggagtgcgcgcggcggcggcgggtccggcagggcggggcggggatgggagcggaggcggccggaggaggcacggggcggcggtcctccttctgcctgtacgcggccggccacggcggcgccggtaattctggcaagcggagcggcggcgtggtgcacgggcacgggtggacgctggacagcaatgcccgggaggccaaggagcggctggaccagaagctcaggaccaagagggaggccgccatcaagaggcaccacagcacggggagcataaagctgggcgtgccgcaccggagcgccggcgcggacgagcgcggcgagagctccgcgccggcgatggccggcgtgcagcgcgaggtgtactcgaagaagggcgtgatgcggcggctgatgcggtggagccggccgcggtgggccgcggcggagcaggcggagtgcgcggtgtgcctggacgagttccgcgcgggcgacgtgctggcgcacctgcgctgcggccaccgcttccactgggcctgcgcgctgccctggctcgagggcacctcgcggtgccccttctgccgcgccgccgtggacgccggcgccgccgccgccgccgacggcgcctagaagcggccgaggctctggtcttgctggggcttgccctgggctgggacggcgcggggcgccttgtcgctgtcggcccacgccagccacgccacccccatggcgttgccacgctaggcagtggctagtgggggtggtcatggtgagtggtgaccggcctgcttgtgcatgtggcgcggagcggaggaggacagcgagacgcgcacgacgaacccgtgagtgccttggcagtttttgcacgctttgcgcgcgcaaaggcacggttggtgcacatttgttggttgggccgtttggcccccctttgccgtgtcctcctcccatcatcgcgagcaagtgatgaacggttttgttttcgtgtttggggagcgctttgtttatggactctggtattagcggatagcggttccatcatgtaattcatgtcaaaaaaaaaagatcgtctgatcgatcttggagaaagaactgtaatttagatcaacatcaatcacatctgtgtacagtctcagtgttgttgctctgaacttgtataattttctgtttgctcagttgaaggtaaatgcagttggaggtgaggtctctttagaacgctaaaaaaaaaaaaaaaaagcggcc

SEQ ID NO: 4311 - DNA, 1107 bp, Zea mays
  Clone ID: TF_ZmC11494_2
ccccgcgtccgcccacgcgtccgcggacgcgtggggccgccatcaagaggtagacgcagacctgccacccgacacacacatccatattattcatccatcctccacgggctttgcttgtgttccgtgccagtctgaacaacactagctagctaggtcgtcgttcctaaagatctgaccttgcagcaggcaccacagcacggggagcataaagctgggcgtgccgcaccggagcgccggcgcggacgagcgcggcgagagctccgcgccggcgatggccggcgtgcagcgggaggtgtactcgaagaagggcgtgatgcggcggctgatgcggtggagccggccgcggtgggccgcggcggagcaggcggagtgcgcggtgtgcctggacgagttccgcgcgggcgacgtgctggcgcacctgcgctgcggccaccgcttccactgggcctgcgcgctgccctggctcgagggcacctcacggtgccccttctgccgcgccgccgtggacgccggcgccgccgccgacggcgcctagaagcggccgaggctctggtcttgctggggcttgcccgtgggacggcgcggggcgccttgtcgctgtcggcccacgccagccacgccacccccatggcgttgccacgctaggcagtggctagtgggggtggtcatggtgagtggtgaccggccttgtgtggcgcggagcggaggaggacagcgagacgcgcacgacgaacccgtgagtgccttggcagtttttgcacgctttgcgcgcgcaaaggcacacggttggtgcacatttgttggttgggccgtttgccccccctttgccgtgtcctcctcccatcatcgcgagtaactgatgaacggttttgttttcgtgtctggggagcgctttgtttatggactctggtgttagcggatagcggttccatcatgtaattcatgtcaaaaaaaaaaggtcgtctgatcgatcttggagaaagaactgtaatttagatcaagaccaatccacatctgtgtacagtctcagtgttgttgctctgaacttgtatatttttctgtttgctcagttgaaggtaaatgcagttggaggtgaggtctctttag

SEQ ID NO: 4312 - DNA, 1726 bp, Zea mays
  Clone ID: TF_ZmC1250_1
cattgggtccctcgaggccggccgggagtctactgcttgggaagggaaaacgggggtgcatttgttgggatttttccaactcaattccatccgatccaagagcaagtttcaccggattgattccccaccgcacccgaccacaaatcccaccaagcaaaccctaatccgtcggccatgtcgtcctcccccgcggcgctgcgcttctactgccaccagtgcgaccgcaccgtctccctcgcccctcccgcatccccggacgccgacgtcttctgcccccgctgcggcggcggattcgtcgaggagcttcctcccaaccctagccccgcgcctccggccgccgccttctttgccccgccctccttcgacatccgccaccccagcgacctctccgctttcttcggccccgcctcccccgagccgctcgccccaggcctcttcgatccctccaacttccttcacgaccacttcggcggcctcctctccggcggcgccaccatccagatcgtcctcgagggtgggcccccgcccccaggcctcaactttgccgactacttcgtcggctcctccggcctcgagcagctcatccagcagctcgccgagaacgaccccaaccgctacggcaccccgcccgccgccaaggccgccgtcgcctcgctccctgacgtcgctgtctcggccgacatgatgcaggccgacggcggcgctcagtgtgccgtctgcatggacgacttccacctcggcgccgccgccaagcagctcccctgcaagcacgtcttccacaaggactgcatcgtcccatggctcgacctccacagctcctgcccggtctgccgcttcgagctgcccaccgacgaccctgactacaatcacacccatcagcagcacggtgattcgtctgcccctgctcccccttcccccgctcccgcggtctcctcccccagggtggccgagaggaggtttaggatttcgctgccctggcctctcagggccgcttttggcgctgctcaggcagagagcagcaatcccaccgatgatgacgtgcctccgtctggcagcgatgcagctggtggccctcagtctcagactggatatgatgatctcgactgaggcctcaatagccgttcttggaaacaaataggtatgaacaacaaattgcagttattactactagggttcatcgcttgctgttatctgtttggcgtcacctacctatagttcaggaatcaggtagcaccatgcatttactatcgcatttgattacggttactgtattgactgccaaagaaaaagaaaaaggctctattgtgccatcattgttctacaaaagcgtattacaagagtgaatgaccatccttgttctatgtttacctgatattaacatggtatgcacttggcgtggatgataaccaagattcatctagggcaatcaatgggatgtaacttgcatgttgtaactgcgactctataccccaaaaatgaaagatgatcccgtcgtggaccaaattaataaatgtgcatcaaaagtatggagtcctttaggaacctctgctgactgttgatggaaaatggttggtttgttgaccctgtcagtgcattgtttttgaagggatatgggcctgttaatttaaaatttgtattccctaatggttgggggaggaacggtggagaaactgagtcatgtaaagttgttccttttgcaattgctgcatggtttttttcctgttcc

SEQ ID NO: 4313 - DNA, 412 bp, Zea mays
  unsure (1)..(412): unsure at all n locations
  Clone ID: TF_uC-zmroteosinte115a04a1
ccnntaaattataattncaggngcacaagcatccggtgggcgcttaaagggggaatgggaaaatacacaancacaggacacanaccatgaaacgcacagcagcctcaggctggcggacacccacccagaaccgcatcagggccgaacagctagcacgcgcagccagcaggaacacacacacacacacacacgaaacatatgcacagggaggagcgccccagctggcccagctacaactggctctaaaagaccacaaaagctggaagaagaggcttgcggaaccgacaccgaacgaccggaggtctgcaggcctaaccagtgcccggcacagcgggcaagaccgcccccataggaaccattcggacacacaatcttcacaaaagacatgtttgcagcacaaaaggatgggaac

SEQ ID NO: 4314 - DNA, 2087 bp, Zea mays
  Clone ID: TF_ZmC3083_1
aaagccaagcccacaaggcagccagagcgcggggtagcgtttacaccttgacacctaaggccagagattggagagagaaagaagcagctgagtggagcaagaaagaagaggtcatggcggtgtagtctatcagctgagtgggaaagagtggagcaatggtggggggctgtgccagcggcgacggcgccgccgaagggacgctcgcgaggtggcggagggcggcggccaagcggatcggcctctcatgcgcctccttcttctcctacgccgcctctccctccccgcctccttccaagaccatctcccactccgcactgaatgcgcctgatggagagcagcaaaagatggaggaacccaccagcaccagagtggctgacaagaatctatgtgcaatatgtttggaactcctcagcacgagcatcagcagcgatgttgatagtggtgaggcggcagcaatctacacagcgcagtgctcccactcattccacttcctatgcatcgcctccaacatccggcatggcaacgtcagctgccctatctgccgtgcacaatggtctgagctaccacgtgacctgaaggttccaccattgctgcacaaccagtcagacccaatccttcgcatcctggacgacaacattgcgtcatcccgtgtgaaccgaaggtcctccatccgtgctgctcgctacaacgatgatgacccggtagagcctttcaccttggctgagcatgtggatccatgtctccgcttcgtcctcatcccggcaccggtgtcagctcaccatcacgtcctcgggcattacccctgtggacgcatgttgccactgcaacagcaatgccagtacagcggctcctccatgctttcaccaccgcagattgcttcaccaagtggtcaaaggcgagcctacctctctgtcagtcttgctccacagccagccatggacctggtcctggttgccagccctaacggaccacatctgaggctcttgaagcaggcaatggcgcttgttgtcttctccatgagggcaattgaccggttagccatcgtcacgaatgccaccactgcaacccgtgctttccccttgcgccggatgacgtcccatgcaaaaagaatggcgctgcaggttatcgaacacctttgctgtgttggtgggactgatccagtaggggctctacacaagggcctcaagatattggaggaccgggcgcatcggaacccgagcaactgcatccttcacttgtctgatcatccagtccgcaactgtgttggtggtgtggacatgaaccactccagcatcccagtccaccagttccatgtcgggctcgggttcggggtgcggagtggatttatcatgcatgagtttgaggagctcctcgcgcggttgcttggcggcgtgataggcgacacccagctgaggataggggagcatggcggaatggtcaggcttggagagctgaggggtggtgaggagcggaggataccgctcgaccttgcggcagattgtggcttcatactcgttggttacagttacctggagggtggaagagaggagcagttgaggacaggtgagatcgccgtcgggttcgaagagaaaggtgacaacgggtactgtggaatgagagagatggggctgagcattggcggcgagaggaggagctgctgcgccgagaggcgggactaccatgacccgttcatggcacggcgatgggcgaagcatttcaacgtgtacagggcctgagtagaagagcttgatcgtcagctgctgcgaaatatgagtcttgttggtttcttttctctctttttttccccattcctgcaagcatctaggtttggtgtctgctttttggcttcttttgttgtggatctgaatccctgtaagatctctctctctttctctttttgcatgaaatgtgtgggttctgtctgacaaaatctgcttgtgttgtgtgaatctgaacgtgaacagatcatactggagaaaaaaaagcagcaaaactagaaatattatttgattgagcttgcaaatttggaagccagggagttaaagaattattctttcgaagttgtaatgctaaaaaaaaaaaaaaaa

SEQ ID NO: 4315 - DNA, 1039 bp, Zea mays
  Clone ID: TF_ZmC24905_2
cggccgggagtgatgatctcctcatcacatctatctccatcacaagaagaaggtgtggacaggaagacgacacaagattcaggcgacactcccaccattgctgctgacggcgtccaaattgtcttctttctcccccctaccttggctggctggctctctagatcgacattcgggtcatccgctcccctggggaaggccatgagccactacaccatgcatgcagccatcaactacgccgcgctgccacccacgtcgccgctgcaactccccctcccgtacctccctccgcctcctcctccgccgttaccgctaccgccgctgttgtcgccgccgccaccggcggcggcgtcctctgacgcgggattccagagcaggatcagccccagcgtccttctcatcatcctgatcttggccgtcatcttcttcgtctccggcctgctgcaccttctcgtccggttcctgctccgcccggcgccgcgggatcccggcgacgcgtacgggggtgacgcgaacgctaccgccttccagggtcagctccagcagctgttccacctccacgacgccggcgtcgaccagtccttcatcgacgcgctgccggtgttcctctacggcgccgtggtcggcgccggcgggaaggatcctttcgactgcgcggtctgcctctgcgagttcgcggacgacgaccgcctccgcctcctccccaagtgcagccacgcgttccacgtcgactgcatcgacacgtggctgctgtcgcactccacctgcccgctctgccgccgcagcctcctcgccgacttccccacctgcggcggcgcctgcagcccgctggtgttcgtcctcgagtccggctccgagggctcggtctccgatcgccacgacgcggcgtcctccgcgcgcctcagctttggcatggagcaggagcaggcagggcaggatcggaaacacgtcgccgctgcagaggcagcggagaagaatgacgaggtggtcgttccggtgaagctcggcaaggttcgaaagccaggccacccgaaggagccgg

SEQ ID NO: 4316 - DNA, 864 bp, Zea mays
  Clone ID: TF_ZmC538896_1
ccggccgggaaaaagggacggtcacggtggcccagagccccagactgctgcgcctcaccaaccaacgagagagcacgaagcacctagcagcccggccttgtcgttctacggtcccaccggcgccgcggcggaggagatggaagcttatgcccccgccggcagctaccggccggtgtgcgacacggtggtgttcgtctgcctcgcgtccgcctccgccctcatcgtcttcatggtggccgtctgcttccgcaacgccttcgccgccaacgggtacgcgaccgctgccgtggccacgaacggtgccgccagagccaccgctgccaacggcagaagccggtgcgggctggcgccgtccgcgctgtcggcgatccctatgctcgcttaccagaggggcgccgggtgggcgcagtgcgcgatctgcctcgccttggtgcgggacggggagacggtgcggttgctgccggcgtgcggccacctattccacgtcgagtgcatcgacctgtggctgcgctctcacgcaacatgcccgctttgccggcgtggcgtcgtcgaggctcccgtcgaaaaggtttgagagctcgccgctcttggccccaaaaaaaaaaaaagccaagatcacacgctggctgctatactagctagttcagcagacgctcactagttaagcttgttccctgccgtgatgttggatatcttataccaagggttgtagatgctagggcttaggcgtagtttatatatttctggtctctggaatcgaaactttttttttgctagggaaaagtcatatttttatgatgcactatgttttgtgttttctataattaatcttcaatcatgaaaaaaaaaaaaaaaaaagcggcc

SEQ ID NO: 4317 - DNA, 621 bp, Zea mays
  Clone ID: TF_LIB3689-243-Q1-N6-A10
aaggaaacggaaggcaacaatccaatatcaacaaactcgcaatagcgtgtgatcaatttcaatgcgaattttccatacaatacaggagcatcctgtgcaatagttttgtaggttctatcggaattagaaccatggaaagagctccacttttctctgtaggaagctgcattctcaagagacagaatcagctgacctttccaatcagtgcatcagatctgcagacatcgccacgacaaagtggacaaaccctgtgaatctcctttagccatttatctacacatgttagatgaaattcatgatggcatggaagtatacgaagacaatctccctcttcatattcaacaaggcaaatatagcattgtgcagcttcctcactgtggtatttcaatggtctcctatacacttttgcaggaagacgctcaacaatctcccttggagcaggaacagatccaattgaagaaaacgctgatcttgatgacgataacgcagcagattggtggtgaatttcatccagaacctcaaatagtgcttctgctaacataacaattcttgatatgctagcccttgtgctagtttcttcatcaggattgccttgtcgactacctgttctgcagttgcaag

SEQ ID NO: 4318 - DNA, 1878 bp, Zea mays
  Clone ID: TF_ZmC4557_1
ccaccgcgccggagggaaaagttgtccggtcggggccgatcgggagcgggaaggggaggagggggaggagcatgttgcaactgcagaactcctagtcgatacggcaatcctcgtggccatgctaacacaagggctagcatatcaagaattgttatgttagcagaagcactatttgagcttctggatgaaattcaccaccaatctgcttcgttattgtcatcaagatcagcgttttctccaattggatctgctcctgctccaaaggacattgttgagcgtcttcctgcaaaagtgtataggagaccattctaataccacatggaggaagcagaacaatgccggattatcaattgccaaatccttctgggaagattggcccacgatatggtgacaactttggctatttcatctaacatgtgtagataaatggttaaaggagattcacagggtttgtccactttgtcgtggcgatgtctgcagatctgatgcgctgattggaaaggtcagctgattctgtctcttgagaatgcagctttctacagagaaaagtggagctcttttcaactttctaattccgatacaacctacaaaactattgcacaggatgctcctgtattgtatggagaaatctgatagaatctgaagatgctagcttcaggagctcctacagaaggatggggtctcatgaaccttttgaaggcagtgtccggtttagccgaacattaagtgttgggcggcttcgggacagagttctcaggcggcctccattctcagatgggctattcaccccttcacttctttatgatagggcagtatggccgtctggaaatgctagtgctaggcaagattcagcagtaatgcaaaggactaattcagacaggagttcagaaccacggtctgatccttcaaccagcgatatgtacaactcgagctctgagaggcaggctagcaacggcgatctactggagcgcagatcagcttttcttgagaggaggaggataagatctcaggtcagagctctacaaaggttgggcagcaggtttgaaaatttatctggtcatgagagatcctgcatactatctggtcagcatagaacaggaaattgcaactgcagaacaggtagtcgacaaggcaatcctgatgaagaaactagcacaagggctagcatatcgagaattgttatgttagcagaagcactttttgaggttctggatgaaattcaccaccaatctgccgcattatcgtcatcaagaccatcattttcttcaattggatccgttcctgctccaagggagattgttgagcgtcttccttcaaaagtgtataggaaaccattgaaataccagagcgaggaagcagcacaatgctatatttgccttgttgaatatgaagagggagattgcctccgtatacttccatgccatcatgaattccatctaacatgtgtagacaaatggctaaaggagattcacagggtttgcccactttgtcgtggcgatgtttgcagatctgatgcacccattggaaagaccagctgattctgtctcttgagaatggagcttcttacagaaaattggagagcttggcatggttctcatccaattccgatagaaccgccaaacttctgcagctgttattttcatttcctcctctcttatggtcagtacagcatcgcagtcatcctattatgaaactgatgacgacatgccatggtgaatttaggattcttgtgtggtggggcgagtttgttgataatggattattggcttccgtttgggcgattgatgtcgggtgcagccattctggccaactttggttccacgtgtttcctactatttgaacaggggactaaaatcttcaaagttaccgtccttttct

SEQ ID NO: 4319 - DNA, 721 bp, Zea mays
  Clone ID: TF_ZmC4557_3
ttcccacgagggtttgaaaatttatctggtcatgagaggtcctgcatactatctggtcagcatagaacaggaacttgcaactgcagaacaggtagtcgacaaggcaatcctgatgaagaaactagcacaagggctagcatatcaagaattggtatgttagcagaagcactatttgaggttctggatgaaattcaccaccaatctgctgcgttatcgtcatcaagaccagcgttttcttcaattggatctggtcctgctccaagggagattggtgagcgtcttcctgcaaaagtgtataggagaccattgaaataccacagtgaggaagctgcacaatgctatatttgccttgttgaatatgaagagggagattgtcttcgtatacttccatgccatcatgaatttcatctaacatgtgtagataaatggttaaaggagattcacagggtttgtccactttgtcgtggcgatgtctgcagatctgatgcactgattggaaaggtcagctgattctgtctcttgagaatgcagcttcctacagagaaaagtggagctctttccatggttctaattccgatacaacctacaaaactattgcacaggatgctcctgtattgtatggaaaattcgcattgaaactggtcacacgctattgtgaatttaagactcttgtatggtggggcgagtttgttgatattggattgttgccctccgtttcctt

SEQ ID NO: 4320 - DNA, 1722 bp, Zea mays
  Clone ID: TF_ZmC28375_1
gccgcgccggcgtcggggacgtctggctctggctgcttcgactgcaacatctgcctcgagtgcgccacggagccggtggtcacgctctgcggccacctctactgctggccctgcatctacgagtggctacgccacgacgtcgccgaagccggcgccaggagctcggcgaggcggcagtgccccgtgtgcaaggccgcggtgtccccggacgctctcgtgccgctctacggccgcggcgggagctccagcgccaagaagccgctggccagcatcccgcgcccgcgccggccggccctgcgacagagcacgcatgacagcggcagcggtggccaccaccaccaccatcggcacgcagagaccggcacgccagcccggtcgctgcggcacccagcccacgcccacgccgcgcagttcgacgccctcctctccgcgccgttcggggaccgcgggatgctgcactcgacgtcgacgaccggcgggatgctcggagggatggcggtggccgtcctcccgttggtgctccgcgggcaggcgcgggtgccgggcatgtactacccgagcccgtatcatctgatgagccccaggcagagacggtggcatgtggaggtagagagatccctgcatcagatatggttcttcctctgcgtgttcgtggtgctttgcttgctcttgttctgatttctgaagcaggacaccatcctgcgcctgcgggccacgagacgtgctctgtacatagcaaagggtgcgcgatatggatatggtgcggcagtgacctatatttggtgattgcatgacgggcgttcaagatgttaaattgagaaccagctgagttctggtcctagaaaggagaaatcggtttcgaaactgcaaaggacccttgagaagattatcagaagccatcgtccacatgttcatgcgcagacagtaacacataagctactggtaatatagagcgtcagaaaaaaaatgcttcagtatctaaatgtcacgctaccattttgagcgctttgatgacctgtgcagctgtgctccctccatctcggtctcggtggtcaccagcaatgcagcatttaactctaaaagtctgcaatgtgtgcgaaaaaggaatgccactcgtggcagcttacatagctccctttgccaaaagaacaacagcaccttgattcaaaacgtcacttaagattgtgttaagatctatgatcatcttctgtcaactctgctgattttgcagctgattaatccggctgaggaatgaggatgttgccggagcgcgtctcaaaatcacgaatctggatgagagcacttcacgacaggacctgctaccaccgacgtgagtgtgatttgccattgatatacagcctgatcagttgcaactccacttagtactatgatgacgagtaacagagcgtctgtgaaagggagcacggccggctacaacagcagctgaagtagcgcataagtcacaagttacagtccactacaactgatcattcgagctttgcttcttttttttttgtaacggcaacagtcgttgatgactaacataacgaacaatacatgattattatatcctgcgcctgcgggcacgagacgtgctctgtacatagcaaagggtgagatatggatatggtgctggtgcggcagtgacctatatttggtgattgcatgacggggcgttcaagatgttaaattgagaagcagctgagttgtggttctagaaag

SEQ ID NO: 4321 - DNA, 2559 bp, Zea mays
  Clone ID: TF_ZmC3609_1
cgcacgcacgcacgaccacgaccagttgccacggcagaccaccccgcccagcggccagcttgctcgccacgaccacgatgggcttccccgtggggtactcggagtcggagatgctgctcccgcgcgtgctgctgcaggtgctcctcctcctcggccacttccaccgcttcctcctctgggccttccacgccgtggggctcggcgacctgatcgacctcggctgcaactacccgccgccgccgccctccgcgtccacggcgcacgagatgatggagcaccagcaccagcaccaggggcgcgacgacgtggcctccccgctgcagcaccagcgcccggagttcaggcccgtcgcggcggcgctcatcgaggaggcgctccccgtggtgcggttcgacgagctgggcggcgcgccgtgcggcggcggcgactgcgcggtgtgcctgagcggcatcggcggcggcgacgaggtgcggcggctcggcaactgccgccacgccttccaccgggcctgcctggaccgctggatggcgcacgaccagcgcacctgcccgctctgccgcgcgccgctcatcccctgggccgccgacgccgactacgacatgtcctatccgtctcccctgccgcccacgccactgcggcggcctcacgagctgctgctgctgcttaccggcctgggcggcttccagtgatgcgcctgcgcgtgggcagcgtggctggcacttgggcaggccggccggaacgggccgtgtgtgtttccttctccgtcagccgcgccgccgcccgcctccccaactgtcaggcgccgcgatggaggctctccacgaggagatgcccttcgacctcgacttccacccgtcgtctccgctcgtcgtcacctccatcatcaccggagagctctgcctgttccgctacggcccggagtcgcagcctgagaggttacttttgttaaaagcccacaaggagtcatgcagagctgttcgttttgtggactcaggaaaagtgattttgtcagggtcagctgattgctcagttcttgcctcagatgtagaatcgggcaaggccattgcccgcttggaggatgcacatgagaatgccataaaccgccttgtctgtcttactgaatctacaattgccacaggtgatgatgaaggctgcattaaggtatgggatacccgggagcgatcttgctgcaacagttttgaagtccacgatgattacatttcagatatgacctatgtggctgagacaaatcagatactggccacaagtggggatggaactttgtctgtgaacaacctgcggaggaataaagtaaggtcacgatctgaattttcagaagatgagttgctatccttggtgttaatgaagcatggtaaaaaggttgtgtgtggaactccaagtggagcactcttattatattcatggggatactttaatgattgcagtgaccgctttatcggacacacgcagtctgtggatacaatgctgaagctggatgaagacactttggtttctggatcatcagatggtgtgatcagattggtgggcatcctacctaataggataaaacagccacttgctgaacattcagaataccccattgaggcccttgctttgtcaaacgacaagaaatatttaggcagcatctcacatgataaaatgctgaagctctgggacttggaagaactcttgagtggcccacaggtagccaatggtgatgaacctgctgaagctggtagtgatgacagcgatgacgatagcgatgatgatgtgatggatgtagacatggcggcaacctcttctaaaggttcaaggagtaaaaaggcaggtaaaggacagagttcgagtcggccggcatcggatttctttgcagatctatagtcgtcaagtttcctaagttagaagctgtgtactctcctctctggttttttttgggttactgtacgcgagtgcgtgtgcgagtgggcaactttgaccgccggtgcaaggcatgccaaatgttgttttatttataagtatattgctgatggcatttatcagaagtagaagcagtaagtgttgtggacatggtgctaatggtttggaatttggaaagcggaaaccaaaccttatccacgcgaatccgatccgtggcgaggcaaaccgcgtgctcatgtgcggcccagcacgcccggtcggtcaggcgggtgaccgccgccaaacctgctcagttgccagccgtacacgcttgccggcctcgtcttcggtcgtgtctccgactccgttggtttttttacagaggctcccagtcccaggtcaaacaaaaaaggaggcgaaacagacaaagcagtcggaaattaggcaggtactgtactaggttgatctgtaggccgattgggcgactccaaatctgtggagctgtgaatcctttggcagattaaactaaaaattgtctctatagatcagaccatcaaaaaaaaagccacgcggccgcggacgcgtggggccattccgcatcgatcgatcgatcactcactcgctcagtcactcgaaaaaaaaaaacccccccccccacccaac

SEQ ID NO: 4322 - DNA, 825 bp, Zea mays
  Clone ID: TF_ZmC36740_2
gcagaatatgggataacactacacctgtaaacaatgtcgattctgccaatgttgtcctgcagggtggtgaagctccccgcacaacggcaaatactattaacaaggaatgcatccaacaggtacaccaaagtccaggtagtcctcaggtaattcggcacgaggcaacattgaccctgacaatatgacatatgaggaactcttggatttgggtgaggcagttggaacccagagccgtggtctctcccaagaatgcatttcattgcttcccatcactaagtataagtgtggattcttttcaaggaagaaaacacgccgtgaaaggtgtgtgatttgccaaatggagtacaggagaggaaatttgcagattacgcttccatgcaagcatgtataccatgccagctgcgtgacaagatggcttagcataaacaaggtatgccctgtttgctttgctgaagttcctggcgaggattctcagaggcaatgattcatcagttgtgatgccactatgaagttgctgctctgggtactgcgcccccaatggacgcatgatttctttgaaggcagcttgttgtccccactttagaattgtgtattagcgccatattaccaaataggttattacttatcagatgtatttaggtagtgtttggtttcggaatatggtaggatggagtcactttgctcctaatttattgttgtttgaattgattttatgtaggacatagtaactctaaaattggaaaaactatgcttaaatactgaatcatctgactccccaaaaaaaaaaaaaaaaaaaaaaaaaaaaaaaaaaaacacccaacaaac

SEQ ID NO: 4323 - DNA, 801 bp, Zea mays
  unsure (1)..(801): unsure at all n locations
  Clone ID: TF_ZmC348_2
ccgggtcgccgccggggaagagacgatccacgcgcggnaccggtctactaatctattctctatctctagcagtggtaccatttggcggcgatcgccccgtgctattgcttgggccttggactgagtaggtttggaggtagcgagacgagacactcgcccccgattcccctcccgctgccgaagcctgtgttgcagggatcgttcgcggaagcggtttttgatcggagagagagaaagagagagcgagggagggaggcggggatggacgcggcggcagcagcggcggcgcagatggagaggcactcgtcggcggcggccttcgtggagggcggcgtccaggacggctgcgatgacgcctgcagcatctgcctcgaggccttctccgacagtgacccctccgcggtgaccagctgcaagcacgagttccacctccagtgcatcctcgagtggtgccagaggagctcccagtgccccatgtgttggcaggcaatcagcatgaaggaccctacgagccaggagctcctcgaggccgtcgaggaagagcggaacgacgtgcaggaaaaccacgcgcgcacaaccaccgttttccgtcacccgctgctcggagatttcgaggtaccggtggatgcagacgacgccgagatcgaggagcggatcatgcagcacctggccgccgccgccgccattcgccggtcgcatcgccacgccagaagagaaggccgccgcagcagcagggtggcggcagctcatggccatggccacccacaaacacaagtcctgttctttccgtctgctggcgag

SEQ ID NO: 4324 - DNA, 1798 bp, Zea mays
  Clone ID: TF_700052368_FLI
ccgcccgctaattcctcctagttctagtcccctctctcctgcgccgactcatctttttcctcgtgtcactcccctgctgctgctgctgccgggaagatcaaatcccgtcaaaaggctccaaaggatcagagttctgtcaagatggcatgcccaagagctccagcagtggaaggttcaggtgtaagtggcgttctttatgctgtggaacctaaggatgcatgcagtccattgagagcgaaagcgattcaaggctctgtctcaccttttgcgttgattataagaggcggttgccaatttgatgacaaaattagaaatgcacagaatgctggattcaaggctgctgtagtatataataatgaagataatgacatccttgtttcaatggctggaagctcgcttggtgtccagatatatgcagtgttcatctctaaggcatcaggggaggagctgaagaaatattcaggccaaactgatgcagagttatggataataccaacatatgagaactcagcttggccaatcatggcaatttcattcgtatcactgcttgctatgtctgctatcctagttgcatgtttctttgcgaggagacaccagatcagacgggacagggcaagacttccccgagctcaggagtcccatggaatgagcagtcaattagttaaggcaataccaagccttattttcacaaaagtgcaagaagacaactgtacatcagcaacatgcgccatttgcttggaagactacagtgttggagaaaagataagagtgctaccttgtcgacacaagttccatgcggcttgtgtggacctatggctcacctcatggagaacattctgccctgtatgcaagcgggacgcaagtgctggaacgtcagacccccctgtatcagagtctacccctttgctttcatcatccgccacacgcttgccggaatcaactgtgttggcttccttgcggtctacagcagcagcgtctccccccaggacgatcagccggcatcctttgttgcggtcaatatcccgcaattactctgtttcaggttccagtatccttcgcacccccgactctaggtttgatgcaaactcatctatctgcacaagtggaagcaacttggaccttgcaaatgtaccatccccatggtctggcacttggcaccgtgcgtctgctcactctttgtgcaggggctacttgtccccaccgatcggcatcaggaatacctcagcacatgtctcgcgttctgccaatggatctcccagtcgttacgtaggctcatcacgcatgtcccatggatcttcagggcagcagcatcctcacctgaggcactgcacattgtcaggcccgagcctgttcaccatggtgccccagtcaccgcaacagaaccagttgcagcatggtggatactcggaaacaaatctgtcggctgccgcatcggctcaatcattccgtcagctctacctgcagcattgccctgattctgacacgtcgtctcagtcacttccagggtgctgatctcttgctgcaatattcactgattcttgcgcccatgagaaatcttgcctggtgctgaattgacatgtggattttgagctcgtcagcatagttcaccatgatgataaaaaaaagagaaagaagtttggagtagttttacatgtggaaacaaaactgcttgtaagaagagagaatgtgcagccccagagtgtgagcaattttacatgcttgagtgtacaggggtttggagtagtcttggacttgcttattttgaggcatgtattgcagtcataggttacttctgctc

SEQ ID NO: 4325 - DNA, 813 bp, Zea mays
  Clone ID: TF_ZmC2018_1
attcggctcgaggccgtcgcagccctccccacccgcgccttcgccgcccgcccccgcggctccgccgcctccgacgccgagtcccagtgcgtcatttgtctcgaagaatacgaagagagggacgtgctacgcgtcctccctcactgcggccatgacttccacatggcatgtatacatgtatggctggagcagaactcgacctgccccgtctgtagaatctcgttgctcgataatcccaacagcgagcacaatgcccctccgccgccgccgccgccgctacccggtgtagcagtgacgatgagctctccaggctctcctgagccgccaggctccgacccgtgccgctgcctgttcgccggtgccgggcactcgtcgagggcgtcatcagaggctcctcctaggcacgagcccgaccaggagaatcaggtggcgtctgggccatcggtggacgggggtgctaacagtaacggcatgccgctgtccgaagttaaccccactccacccgagagcaacagccagacagtgaggaagcagcagccagggccctgcaaatagcagctgcctggagtcggcgaggcgagatcgctgttctgcagcggtctgctgcaggacgagcaaacacctgtacagtggcagatggctgtctggctgctgtaggttggggtttgatgagggtatggtgtaaatatgagaaatcattcagatttgttgttggaaaccaaacacacttcatctgttcagttcagtattgatgctgaaaacagcaaccccccgtggtatgcggatacgggataccaaaaaaaaaaagcggcc

SEQ ID NO: 4326 - DNA, 2388 bp, Zea mays
  Clone ID: TF_ZmC3494_1
ggccgggccgggaaggaatcaaagccaccccagtccgctgcttccattccatctcccttctctcgccttctgcggcactgcagtgctctgctgcctcggcgtctccacctcctcccggcgacggcagggcatccgatacgacgccgcgcttccttccgaatcccaagccgcaccccgcaccctcccggtcgccattcccgatgctggtgttctcgagcgacgacgactgctgcggctcctcgtactaggggggcaggatcgatcggcagactcgcagaactataggatatcacagaacagttcttgaggtacttattgcagcctaatagtacatggagcgatattcagatatgagaccaaaggcagaagtttcatatctcggaaggggttccagattctcttctagaaatcaaagttcagaagagaggactaaccatagcagcgataaaccgggaagcagcacaagattcaatcctacgaaagcgagaattggcggtaatcaagggaggccaagatatgtatgcgattcatttaaatctccaagctcaaaggtgtcgcctgcaggctcttccaaatttccacttagcaagtttgaggagaggcgaagacagccttttgtgccagggtttgacattgctgaaagtagtagaagaaaggctgatgccaagcagctacagggtagtaagaaaattgctgcagagaacgacagttcagacaatctgcgaggtgaatcagaaggttttactactgaacaagtagtaaaaccagaaggctctcatgttgtcggtcattcaggtgtttctgcgtatacagtcgggtccctggtccaaactgcttcactaggttctaggacacacagacagaaacacaaagaagtgaatttgggtactccaggagcatcgtcttcaactctgactaacaggtctactatacctggaaattctaccatgggtgtgaggccagcttatggtcatgttaatggagggcagatacatggtcttaaaaaccttggttgttcttcggtacctgatgctcagccatcaggttgcccatctgagtctgttattagtaggaggaggtttgagttcatgagaaagagggcctttgaccaggaaagctcttccagatcagtgaacttaagcttaggtcattcaactcctacagatattcgcagaatcagaatgaatgaacaatcactttgtcaacaaataccacgaagcagcagcagaagccatcaggaatcggcaggttcagttaggacaagacgaccttctcctcatgccactaggatgagtgttcctgatggaagagcagatggcgtgctttctctgcacgagtcatccacaaaggatgtacagccagctcaggaacatctttcattggaagaagtctccactgagagttcaataaggccattctttgtggaatttgataataacattttctcgtctagtcatcttcgtcgctcgagtactcgagctgaaaggggaagaccaagctccctttttgaagaaagtcctcgacaaatgttccatagtctcatgggggagagggacagacatagacacataaccatggaaggaattacagaggttttggctgcattggagaggattgaacagcaagcagagctgacctatgatcaattgctaatgctggaggctaatctattttttggcgcctttgcctcctatgatcggcatagagacatgcggatggatattgatgatatgtcctatgaggaattattggccctggaggagagaataggctctgtgagcacagctctttcagaggagcagttcacaaaatgcctcaaaagaagcatatatagtcaggtcgctctagaagtgaacaaatcaaccgttgatgacatgaaatgcagcatctgtcaggaagagtacgcggagggcgaagaggttgggaggctgccatgcgagcaccggtaccatgtgtgctgcataggccagtggcttgggcagaagaactggtgtccagtatgcaaagcgtctgccgtgccttccaagggctgaagcattggggatgctggaaaccccgttccggattacaaaccatccttgcttttgtctacgtacattgttcttttccctatatgcattagatatagatcatgtctagatgtatgacgctagaacagcttgcgatttgggaggaagctaagagagtaatagttagctggttaataatagttcatagctaatatttgctagataactattacttggctacctattagctgtgcctttcacattgtggtacaggacaaatgcttgtcagatcgtgaacaaccttataacttgatgaatggcctaagtcaaagaggaatatgttgtgcctatctcatattgcgaaaaaaaaaaaaaaaaa

SEQ ID NO: 4327 - DNA, 889 bp, Zea mays
  Clone ID: TF_ZmC6690_21
ggccgcttttttttttttttttttaacttcaagctttttttttatcattgcacttgcagatatgtacagataaattacagggacaatttctgtccagaatgagacctaataaggctaagaagaagaagaaaaaaacaagttcaccactgagctcggagctcgggcattggttcagttcctgtgtgccgggtgcgcaaggcactaactaactactacgccaagaacgtcggcccctcggcgctgcagggcgcgggcgccttccagagcgcgcggaagccggggcgcgcgccgcagcggcggcacggctcgccgggcggcaggtcggcgggcgcggccagcacccggcggcaggacgggcaggaggagtgcgcgcgcagccacgtgtcgacgcaggcggcgtggaacgcgtggccgcactgcggcagcacgcgcatggcctgcccctcctcgaactcggcgaggcagatggcgcactcgtcggcccccgccgccgccttggccttgccgctgtcggggacgtacgtgaccgtcgggagcgagcgcagcacctccttcttcacgcccctgttggcggccttggtggcgtccgccgccggctgcgaccgggacgcggcggcccagcgccacgagcacgcgcaccgggccacgagacccagcccgaggacgcagacgagcgcgcagagcaggccggcgaggatcaggatcatgtccgagttgatggagttcgtcggcgggcccgagccggccgccgcttcgaggagtatccgcgccatggtttgcacgctggctgagatggcgcgagcgagtgctgtggggtgcgtgccgctgttgttggccgatgcagtgcagtgcagaggctctgggcaggcggcgtgagaagttcccggcc

SEQ ID NO: 4328 - DNA, 846 bp, Zea mays
  Clone ID: TF_ZmC1258_3
gcacgaggataaccgattttttgtgagtccaatgcacataaagaaagtttggagacgatcatttgatggtccaggcatgctcgaagcacagcaaatagaacatttctaaaagtaaagttgtacattccttatgaaaattcagaggaaattgttggcagtgtatgaactatggaatccattgctattgtcgtgttttcgttatactactagttactactctagctatgtagtgatggcctacacaattcttttgaggtgttggatgaaattcaccgtcaacctgcatcactttcactttccatggtctctgttcaggctcctgaatctgtagttgattcgttgccgtgcaagagctacaaaaagctagaggcaccccaacgcagtgatgatatggaacagtgccatatctgcctaactgaatatgaggatggagaccagatacgaattcttccttgcaagcacgagttccacctgcaatgtgttgacaaatggctgaaagaaatacacagggtgtgccctctgtgccgcggagacgtctgcgaagtcgcctcgtgaagaccttggcgctgccatccctttcctcacggcaccggcagatagcgcatcccccgcctgctccgttgttgaagctggtttggtcaggcaacggcgatcacgtcccgtcaatctgggcgtccctgccgaagagcgtggccagatcctgcgaccaatgcgtcgctgttcctgccatcaactttttaagataccgagactgtatatagctcttgtagcctctccgtgtatgacaacctgtacatatatatgtaaattctagattccaatgtccattattttgtcctacattcc

SEQ ID NO: 4329 - DNA, 417 bp, Zea mays
  unsure (1)..(417): unsure at all n locations
  Clone ID: TF_cC-zmpo14820018a08d1
gacccacgcgtacgaccatcgcgtccgcccacgcgtccgcccacgcgtccggtcgtagctctgctcacgtcgcgacgaggatctcctcgagaggagacggagagctcgaggagggggcgcacggaggccgttctaggcttgggcgtgggcgtggtctcagagcggcacatcgggcagctggagctcccgcgcatccacgtgtcgatgcagtcggagtggaagtagcgcatgcactcggggagcacccagacgacctctccggcttagaagtcggccaggcacaccgggcacgtngactcgctccaggcctcctccttggggnaccggctcaccaccgccgcgcccaccaggacgacacatgcatggcgcggcgcgctataagtggcccgcgacgatgggggcgggcttggggcacaa

SEQ ID NO: 4330 - DNA, 681 bp, Zea mays
  Clone ID: TF_ZmC10271_2
gtgtggtatttgtcatgacaggcagaaagaggttgtgattgccaaatgctaccatctcttctgcaaccagtgcatacagaagtcgcttggtagccgtcagaagaggtgcccatcttgtggactaagcttcggcgttaacgatgtgaaacctatctatatatgaaacagaaggttggcgcctgtgtcgcacacaccagaactgcctggtgctctactgattcccggtatgtggtaggccgccatggcggcggttcagttggtgatgtagcataagcttctctaggtacctttgcacagccaaaaaagaagaagtaagactctgaatgtgattgctggtacccgctggcatatatgatgctggtgttacctcaagcgtctctcgcaaagtatgccttgcctttgcccagtctggtagaatagcctgacctcttcaaccattgcttattttttattcattgggagaaaaagacccaacaagtgaggatattggtgcttcccgcaatagtgagcaatgtttatatttgtagctttagttagttccattggtgtagccgacagtaaggatatagtttccatttcatttttatttttcctttttgaaatatactggttagccagtttgtatgtttcaggagattgacaatagtgagattccgttaataaaaaaagaagtgagattcc

SEQ ID NO: 4331 - DNA, 781 bp, Zea mays
  unsure (1)..(781): unsure at all n locations
  Clone ID: TF_ZmC669712_1
tccaagacttgctcgcggtcttttccatcccatccgccgatccacagccaccccacaccagttcccgagcagagcgagcgccccatgccgcgtgccacggcgagcctccgcctgcaggcagcggcgtcgtccacctccaccgcgaccccaagagagcagcaggcgtcgtcctcatcctcgtcatggcctgttccaccaccgcttccccagcagccggcggtgtcggtgaactccgacacggtgatgatcctggcgtccttcctgtgcgcgctcgtctgcgtgctcggcctcgccctcgtctcccgctgcacctgccgccccgcctcgtcctccaccgccacggggatcccgcagcaggcgaggcctccgaaaggactcaagaagaaggccatcgacgcgctgcccaccgcgccattcaccgctgccgcctcctccgactgcgccatctgcctcgacgagttctccgacggcgacgcgctgcgcgtgctcccccgctgcggccacgccttccacgtcgcatgcgtcgacgcctggctccgcacgcgcgccacctgcccctcctgccgcgccggaatcgtcatcgcccaccagccgctcatggccgcaagtctgtctcctggatatcttgacccgtccgtcgtctctatctagctagctgttanaatacccaatcctttgctccctccttgtaaattacttttgcaaaccttttgttttattttaactgtnaatatttgaaagatatatatattaatgctcgacggcatgtcgatttcagtgc

SEQ ID NO: 4332 - DNA, 2413 bp, Zea mays
  Clone ID: TF_ZmC20235_2
caccgtctgtggagaagcgagaggaggaaggagacaaggaaaggaagggaggggaatcttcgtagagcactaggcagcgacggagtcagcgcagcttcgtctccttccttccttcccctttcgctggccgctggccgtcggcaccatcacctacggccacgggcgcagcgcggggccgctccgtaccgggtccgcgggcctctcgccagggggacccgataagcctccgctgctctgctcggctgctcttaccgtctctcccgtccacggtccacttagctagaaacacacaacaaacaaggagaaatcgcaaggaggagcagcgcctgccgccgcgccgtatccagcgaggcagcccccccgccccgatctgccggcccgacacgctgggatcttcctttccttagccgaccggtcaacgccgcagatattctccttccctgcggctctggaggtttccgtaaacccgtcaccccccctccttctattccttgcaggtgaatccaccgtcgcccctttcctcgttcctcctcctcctcctcctccccttcgtctccaccccccggatctcgccttcgctcgtcgcttcccgattcgcggccggaggggcggactccggctgtgtgggtggacgcaaggtagtcggcaaaaggtgcgattttgatcttgtattcttgtttccgaggccagctgcgttgcgtgatggctggtccgtcgaaccttcgctgctcatggttttccgtgatatacgattgagtagttcgattcaatagacactagaatcgatttgggtgccgccgacctgattcttccgtcccgaatgctgttgggttggatgggggactacggggatggtattttggtgcgcggtgctgccggggcccaaagctttgcgtccaaagtcccaaattgcaggaagaggaaactttgttgtcaatttcagatttcttttctctgtggacgtgtgtgtctgtccaacaacgccttctctggagttacctgattttgctgcctgccattgataggtatcgacgatcagacggagcagttgcttcaatctcgacttcgacctccatctgcgttgaacccatttgggattttggagagggggggtgcttgcttggattgcacagcatctgcatcagttcacattctttgggcatttgctatcttgtcaagcttgctgactatacagttctggttcaaggaacgcctttctgaggtctcttggattatgggagctttctgttcatgtctgcaacctgattattcggaccaccatggaaaccaagcttcttcggcgtttaggaactgcatgtgcctcagatgctttacccagcagctgatcaatgcgtatactgttttgttccgagctggagcagtgcattctgtttcccccgctattgaagccactcctgttgattcaactgaaagctccttcgatacatatcgttcgccgccaagacctctgccctatgatgatccacgattttcccctcctgctcgtgactggttaaggagtgagaacccaagccattccccagaggaatcggaaccacttagagcaaatgaggatgatgaagaaatggaaacaccaagtataatacagaaggcaagtaaaacaaactacaacacaaaaatgaaaatctgcagctctacttatggtgataaggtgccaccaagggaacatggaaattacttcagctatttttccccatctgctgaagatgaagatgtttgtccaacttgtcttgaagattatgattctgagaatcctaggatagtaatgcagtgctcacaccatttccaccttggctgtatttatgagtggatggaaagaagtgaggcatgccctgtctgtggaaagaagatggagtttgacgagacaacataatcctctggctggactctacaccatggcccatggattaacaacaaaccttctcatatgacattctgaaaatacagatggtctagcccagcaagttctctgtaaatacgccctgtaaatattggactggtagtgtgggtccctcttggccatacgagtgctctccaaatgctggaacggtgcacataaacattcttttccgatttgttacaaatagtcggcaggggaaggttgccccccctctgcctgtctgcgcctctgcctctgccttgtcgaggcttagaggtgcattggttgtccggtgatagattcatcggaagcctgtaaattaaagacctaggctcatataataatcatatggagtcccgtggttctgaaagttcttgcaatgataactatttggcttcagagactgaaattctgtcatagtagtggtgtttatcatgccaacatttgtttccgtggtgttgctaattgtgactcatggacacatatgaagagttatttattacacttattgtc

SEQ ID NO: 4333 - DNA, 1329 bp, Zea mays
  Clone ID: TF_ZmC9757_1
gggcgacgcgatcaaatgcacttctcggctgcattttccacaccgcgaaaggagcccatcactcggaaaccgtaagccgtgcaaacaacaggcgacgcaccggcgccgcgcgcgcacgcctatttctagctcgatcgtgtcctctcgccgctccggagtcctcaatccacacgcttgggcgagcaagccttgttccggaagcgcgcggacgacatgctgatgctgcacccgaggttggtgtcgtcgagcgccgtggacgacgaggaccactgcgagagctgcgcctgctactgcgccatggtgtcctgcgtctcgctgctgctcttcatcgtgctggctgccgcggtcagcatcccgagggcctgcgccatcgccggcgtcatgctgctcctgctggggctcgtcggctggctcgtgcccacggggaatggagccggtccggcggcgcagcagcagcagcagcagggccaggctgctgccgatcctggggcgcggcggctggtggtgcaccaccggtgcgcgtgcgggctaacggacgccgctatcgccgcgctgccggcggcgttcacgtactacgaggcgcccgcggtgaagaatggagtggggagcgaggacgacaagcagccgcgcggcagctccttgctgtgcgcggtttgcctggacgacgtgcggggcggcgagatggtgcggcagctgccggcgtgccgccacctgtttcacgtcgactgcgtcgacgcctggttgcgcgctcaccggacgtgcccgctctgccgctgccagctctccccgaggaacgacgtcagcacaaagcgggccgccgcggtcgtcggggagtcatccatcgacgcgttgccgccggtgtgagtgttactcactcatcaatcctccgaagctggccggcgcattggtaaactgtattggaccagattcttcatttcttaacaccacataataaagaaaacttcggcacaatttcgagggcgcgcagcagacgtgtgtctctactctctagtctctaggcatgagcatgagcctcaacatcgatcgagtggttccaaccacatcgccagacccgacgcttccagcagtcgcgaaagaagtagcatctcgccgatggggacgggtaccagaccgtacggaccagggagtctacaacttgacacgcttcagttctgccgctaccagacaggcaatcgagtctatcatgtcagtgccagcttttgtactgtatgctccgttgcaccacgagggtctgatgaatgttgctgccagttacattttcgtgagttgtaaaaccagaacaaatacccgtgtttcttaggaaactgt

SEQ ID NO: 4334 - DNA, 1069 bp, Zea mays
  Clone ID: TF_ZmC6690_23
cccccctcgagtttttttttttttttttttttttttttaggagtgactctggttttcagtactaacaagacacaagcaaagtagtttcctacagaaaggaatggcaacatccagttcgtcgttaagacaagaaaccagactactcgtcccaatgatcgaaagcttggagttggttgcatttgcatatgtacagataaattacagggacaatttgtatacaccaatcaggtacacacatcttgatgcttgtccagaacactccaccgttgagctaatcactacacacacctaaaaaaggggaaacctaccaggctaaaaaaaaaaacaagttcatcactgagactgcgcgtcggttcaattcctgtatcgagtgcgcacggcactacgccaagaacgtcggcccctcggcgctgcagcgcgtgggcgccttccagagcgcgctgatgccggcaccggcaccggggcgcgcgccgcagcggcggcaccgctcggcggggggcaggtcgacggccagcacccggcggcagaacgggcaggaggagtgcgcgcgcagccacgtgtcgacgcaggcggcgtggaacgcgtggccgcactgcggcagcacgcgcacggcctggcctccctcgaactcggcgaggcagatggcgcactcgtcggcccctccctccgccgccgccgccgccttgccgctgtcggagacgtacgtgacggtcgggagcgagcgcagcacctccttcttgacgcccctgttcgcggctttggcggcgcccggctgcgcccggccggactcggtggcccagcgccacgagcacgcgcagcgggcgacgaggcccaggccgaggacgcagaccagcgcgcagagcaggccggcgaggatgaggatcatgtccgagttgatggagtcctccggcgagcccgagcctgcgggcgcttcgacgagtatcctcgccatgtgtttgcgctgcctgaagatgcgcgagtcccgtggtggcgctgttgttggctgatgcagaggctctgggcaggcggcgtgagaagtcccggcccggccggcctcgagcgtccgcac

SEQ ID NO: 4335 - DNA, 1987 bp, Zea mays
  Clone ID: TF_ZmC20996_1
cattggtacctcgagccggcgggctcgggatcgtttcttttcttgttggccttctccgtggcctgccgggaaagggcccccctttccgtttccctcccccaaaactactttcccacaaacccagaccagagcagcttgcgttgcgtctctcgtttcttttcttgttggccttctccttgccttgcttttgcttgctcgttgcttcttgagctcgagcccgccccttctgcgccttgcccaagtctctgtgtgttttttataggcttgagagcttggaatagcggggggtggaggaagcggaagaggagcttcgttttgtgttctagagggagtcatgttccatggcggcaggcctctgtccctccgggggtctctcaaggcgcttgaagctgatatccaccatgccaacaccctggcgcatgctatacacagggcgtatgggggtgcctgcgtgcagatgaggctgtcctacagctccatggctccaatctttctcaaccttatccaatggatggactgcagctgctccctgtcatacacgctccctagctaccttggcctgctcgaggttctcgtctacaaggtttatgtcgatgaagatgcctccatatccaccatagaaaggagggcgagcctgaaggaattctacactatcatataccctttcttgcaacaactggaggacaacttgatggacaaggactgcaaggacaaagggtggtctgctgctgccggcggcggcggcggcggtcggaagcttgttgccgaagatgacagggaggatgagtgtggcatttgcctggagacctgcaccaagatggtccttccgaattgcaaccatgccatgtgcatcaactgttaccgagactggtacacaaggtcccagtcatgcccgttctgccgcgggagcctgaagagggtccggtccagagacctgtgggtgctcaccggcgacgacgacgtgatcgacacggtgacgctggagaaggagaacgtgaagcacttcctcagcttcatcgacagcctgcccctgatcgtccccgacaacatgctgctggtctactacgactacctagtctagcaaggctcctccccccaccccccactctgaagctctggaagaggaagggggtctgggaagaagacgcggcgtacaagcgacaagggttacccgcagccgaccatcctctgcggatcgagttggcaaagcgaagccgttgccgaccaacagacgatactctcgtgggcatgccacgccgttgcgctggctttattgcatggtggcgttgctcgctgtaatggttgtaaataaagaaggaaaatgtctcgggttttatatataatatactagcttgacatttctcgtctggcgaattgccggactgttcagaatgaagaaatcagggggcctctacttctctgctctaaaaaaaaaaaaaaaaaaaatatggatctgcaataggaaaataactaaaaaaaaggcccctacacttcatatatatatatatgcatgcatgtagcccgacagctatatattccggaatgtgcttgcgcccaaaatgtaaaaaaacgttgtacactataaatcagttctatgcgtaaccaggttggaatttttccaccccgtatcatgtataccctacaaaagtgcaaagtctagtacagttggtttttggattggctagagcttagttctatgcgtaagcaggtgaagccacggacggcataactatttgtacactcggtttgcataagaaccgactgcacatctgcatttgcaccgtcggttgcaagttgtgatagactcggcgggaagttttatgtaatataaaataaagtataggtgaagtacatgtttttagtataaatttttatcctgtaattttatagttattgaattttatgactaagagaaaaaaaacatgctagtagagttttatcatggatcactgcaaatgtcaccttgaagcagttaatggttgttatc

SEQ ID NO: 4336 - DNA, 1390 bp, Zea mays
  Clone ID: TF_ZmC20996_3
ttgggtacctcgaggccggccgggatccgcgcgctctgctctccctgcccgcaccccgcagatcccgaatggccatgcctaccgccgcctgcaggtcggggccggatgcactgcaagctgcggccccgagcaccgggctgaactgaagaggtgtcgaggtcgccattaatcctcaacaaccagctgccaccaacgctatatgctcaccatcgccagcaacttggtggcttgagagcttggaatagcggggggtggaggaagcggaagaggagcttcgttttgtgttctagagggagtcatgttccatggcggcaggcctctgtccctccgggggtctctcaaggcgcttgaagctgatatccaccatgccaacaccctggcgcatgctatacacagggcgtatgggggtgcctgcgtgcagatgaggctgtcctacagctccatggctccaatctttctcaaccttatccaatggatggactgcagctgctccctgtcatacacgctccctagctaccttggcctgctcgaggttctcgtctacaaggtttatgtcgatgaagatgcctctatatccaccatagaaaggagggcgagcctgaaggaattctacactatcatataccctttcttgcaacaacttgaggacaacttgatggacaaggactgcaaggacaaagggtggtctgctgctgccggcggcggcggcggcggtcggaagcttgttgccgaagatgacagggaggatgagtgtggcatttgcctggagacctgcaccaagatggtccttccgaattgcaaccatgccatgtgcatcaactgttaccgagactggtacacaaggtcccagtcatgcccgttctgccgcgggagcctgaagagggtccggtccagagacctctgggtgctcaccggcgacgacgacgtgatcgacacggtgacgctggagaaggagaacgtgaagcacttcctcagcttcatcgacagcctgcccctgatcgtccccgacaacatgctgctggtctactacgactacctagtctagcaaggctcctccccccaccccccactctgaagctctggaagaggaagggggtctgggaagaagacgcggcgtacaagcgacaagggttacccgcagccgaccatcctctgcggatcgagttggcaaagcgaagccgttgccgaccaacagacgatactctcgtgggcatgccacgccgttgcgctggctttattgcatggtggcgttgctcgctgtaatggttgtaaataaagaaggaaaatgtctcgggttttatatatcatatactagcttgacatttctcgtctggcgaattgccggactgttcagaatgaagaaatcagggggcctctacttctctgctct

SEQ ID NO: 4337 - DNA, 1536 bp, Zea mays
  Clone ID: TF_ZmC20996_4
ccggccgggaaagggcccccctttacagtttccctcccccaaactactttcccacaaacccagaccagagcagcttgcgttctctcgtttcttttcttgttggccttctccttgcccttgcttttgcttgctcgttgcttcttgagctcgagcccgccccttctgcgccttgcccaagtctctgtgtgtttttttataggcttgagagcttggaatagcggggggtggaggaagcggaagaggagcttcgttttgtgttctagagggagtcatgttccatggcggcaggcctctgtccctccgggggtctctcaaggcgcttgaagctgatatccaccatgccaacaccctggcgcatgctatacacagggcgtatgggggtgcctgcgtgcagatgaggctgtcctacagctccatggctccaatctttctcaaccttatccaatggatggactgcagctgctccctgtcatacacgctccctagctaccttggcctgctcgaggttctcgtctacaaggtttatgtcgatgaagatgcctccatatccaccatagaaaggagggcgagcctgaaggaattctacagtatgcttactatccaccatagaaactagtgattaagaagctttttttttctgttcaagatttttttttgttgatgctgctgctgctgctgcagcagtggtttaatatagttttgggaccccatggaatgcagctatcatataccctttcttgcaacaactggaggacaacttgatggacaaggactgcaaggacaaagggtggtctgctgctgccgccgccggcggcggcggcggtcggaagcttgttgccgaagatgacagggaggatgagtgtggcatttgcctggagacctgcaccaagatggtccttccgaattgcaaccatgccatgtgcatcaactgttaccgagactggtacacaaggtcccagtcatgcccgttctgccgcgggagcctgaagagggtccggtccagagacctgtgggtgctcaccggcgacgacgacgtgatcgacacggtgacgctggagaaggagaacgtgaagcacttcctcagcttcatcgacagcctgcccctgatcgtccccgacaacatgctgctggtctactacgactacctagtctagcaaggctcctccccccaccccccactctgaagctctggaagaggaagggggtctgggaagaagacgcggcgtacaagcgacaagggttacccgcagccgaccatcctctgcggatcgagttggcaaagcgaagccgttgccgaccaacagacgatactctcgtgggcatgccacgccgttgcgctggctttattgcatggtggcgttgctcgctgtaatggttgtaaataaagaaggaaaatgtctcgggttttatatataatatactagcttgacatttctcgtctggcgaattgccggactgttcagaatgaagaaatcagggggcctctacttctctgctctatatatatcgtcttcaaaaaaaaaaagataaaaaaaa

SEQ ID NO: 4338 - DNA, 1790 bp, Zea mays
  Clone ID: TF_ZmC22066_1
ccctcctcacggctccgggagtgcagggctcctggcttccctccctcccctccacggcttcgcgggctcacccgccctcctgctctaagcccaaagctcccgtcccgagggcttcaggtctgttggcccctactcctcgtccgcttcccgggccgccgcttttaggtgtgacttcctcatcatctgccctgacggggatcgctggtttcttcctccagagatcgcatctctggtccgcgggatccgatgagatgcgggggtgctctcgcagtccgacctcgtagcaggcatggctgaagcggccacttcttcgtcttcgtccggatccttcgccccgcgccgcctccatgacgccggtgtcgtcagggaatcgctcccgtacagtgttctcgctgcacccccgccgccgcctctgcctccggtgcaggtgcaggttgcgggttccggcggcggcggtggagggaagattagccccgcggtgcttttcatcatcgtgattctcgcgttagtgttcttcatctccggcctgctccaccttctcgtgcgcgtcctgttgaagaagcagcaccgccgcggcggccgaaggggcacggcgtcggcggcggcgccgaggactggagtggaggcaggcggggtggacgtggcgttgcagcgccagctgcagcagctgttccacctccacgactccgggctggaccaggccttcatcgacgcgctgccggtcttcgcgtaccgggatatcgtcgtgggcggcggcggcgacggggacaaggagccgttcgactgcgcggtgtgtctgtgcgagttcgatgccgaggaccggctccgtctgctgccgctgtgcgggcacgccttccacctcaattgcatcgacacgtggctgctctccaactcgacctgcccgctctgccgcggggttctcttcgtcccggggctcatgggcgatggcaaccccatgttcgatttcgaggagagactggaggaagggcggttgtccgaggactgtgacgttggatttggattgcctgggctgaaggcttcagggttggcacagacaccggtggttgagaagaaggtattccctgtgaggttgggaaagttcaagaatgtcggaacccagggtgcggtggaaggtggcaatgccaatgccagtgtgttgagtagggatgaaggggagagtagcagcagcagcttggatggaaggagatgcttctccatgggcacctatcagtatgttcttggcacttctgagctccgagtagctctccagcctggccgtattagaaatggcactggtggtgcaatgatgggaagacctcctggtttaagttcgatcaatgctgatattatggaggggaagaagatctgtacacgcaacaaaggggagagtttctctgtgtcgaaaatttggcaatggtctcatattaagggcaagctacctgctggttcggatgaatgttcggatgccgggagccttccttggatgaagagaggaggtgctgcggatacatcaaacttatgactctgcactagtgtaatgagcctttctttagttagtgatacccacctaattttcacctgtagtcatttttcttatctaattttcatgtgctcattttgattggagtgccaacctcattgggggcttagcttttggtgatcttgccatgttagtatgtttcaccacgtagaattgtagattgtgatgatttatttgatctgattctggtctgcctaaaattttgtaaaaaaaatgaaaaaaaaaaaagggcggccgccaccgcggtgga

SEQ ID NO: 4339 - DNA, 1086 bp, Zea mays
  Clone ID: TF_ZmC1120_3
cctcgaggccggccgggccgggtcttcaccgcgcttgcatcctctcatcgccaccccaccctcctcctcctccctgtctttctccccccacctctctctccccctcttgacaaattttcctccacccattcccttcctcccctcttcttcttctccacccactccaccgatccccctctttctctctgaattctctctcgtcgtgcccacccttcccatctgtctgctgcccctctctcgcaatcagtcactcggctcttgtttcttccgtctgctgggttgattctctctctttctctccgtggagaaacaggaggagagagagggaagaagagaaatcggaaccagcctgttctttttgcctggattgcggttcttgcgagttgttcagaaactctgggccagtttctgattcggaatgcacttgaaatgattcaaaggggggaaaatgtaaggctcgagtctatcttctatggcggcctcgacattcatgacagacacagggacatgcgccttgacattgacaatatgtcctatgaggaactattagcacttgaggaaaggatcggaaatgttagcactggcctcagcgaggaagctgtgataaagttgctcaaacaaaggaaattttcatcgtggagactaaaagcatctttggacccagaaccatgctgtatttgccaggaggagtacgttgatggagacgatctcgggaggctggactgcgggcacgacttccatgctggctgcatcaagcaatggctggtggtgaagaacgtgtgccccatctgcaagaacaccgcattgaaagcctgaaaccgaacaaaggcgacacacccatgttccatgtccattcgatcggtcgcaagatcatttacccgattggtttttactatgcgttttttggttgggaaaattttgccatttcacctgggaaagtggtgggggggtgttggaggtggaagagaagatggcggtccctgtaaactgctgctgcagtaaataatccctggaatttgtctccctgcatttaaacaaaatatttatggctgttataatggacgccgtcgtagggtttataactcg

SEQ ID NO: 4340 - DNA, 2373 bp, Zea mays
  Clone ID: TF_ZmC3547_1
gcccttccccctccgctcgccctcccccccttcccggcatgaatcgcccagtccacacgtcagttcgccctacacctcaaagcgctgcgtcccttcctccagctactactaccttggcggctccagccagcacgggtcgtacctgcggcggtgtggagagccagggacaagcctgtctaccatgatccctctgtcctcccagcagcagttcgagtcaggcgcaaccgtggccacggcgcgtcgtccgcccagtcacgggagtcctacctgacccgccaattctgtgcgggtgcacgcctgcttcatcatgggagccgacgtccgaccctggccgctgctacccccaggtacggagcaagcctaagccagtagctgcacccgaagacacagatttggagtattgagctggctctctgttttgtcggttgtgtgcttctacttcatagaaaagagctgcattttcttcttagtgctttggatgctggccagatgaagagtagtagatttctgttcctttgtgcaatgttctgtcttatggctcggctgggagctgccaatgtcgtgctaatggggaataatctgaccctgtcctttgctgatattgaggcaagcttttctccaggagtgaaaggatcaggagtcaatggcatagtttatgcttctgaacctttgaatgcctgcagcccgttaacaatcaaggcagtcaagggcccgccatctccctttgcattaattgtaagaggcggatgcacgtttgatgagaaagtgaaaaatgcacaggatgctggattcaaagctgcaattgtgtatgacaatgaaaatagtggggtcctggtttcaatggctggaagctcaagtggcatacacatatacgctgttttcgtttcgaaggcctcaggagaggtgttgaagaaatcttcaggacatactgatgtagaggtgtggatactacctacattcgacaactcagcctggtcgatcatggcaatctcattcatatcgctgcttgccatgtctgctgtattagctacgtgtttctttgtgagaaggcatcgaataaggagagaccaccctagaatcccagaagctagagagttccatggaatgagcagtcagttagttaaggctatgccaagtcttattttcacgaaagtgcaagaagataactgcacatcatcgatgtgtgccatttgtttggaagactacagtgtcggagaaaagctcagagtgctgccttgtcgtcacaagttccatgcagcttgtgtggacttgtggctaacttcttggagaacattctgccctgtatgcaagcgagacgcgacgagtggagtatcagaacttcccgccacagaggctacccccttgctttcttctgctgtccggttaccttctcagccatcttcattcaggtcgagcgtggcagcctccccacccaggccgataagccggcatccttcatcgcactcggtttctcgtgcttactctgtctctagtaccccccactcccccaaccccttcagatctcacacaaacttacctggggtcatccatgcaagcagaagcaccacagaccttgcaaacatgtcgtctccccaccctcgcatctcacacttgtcgtcgtcgacacactccctcgtcggcagccacctatctccaccaatcagcataaggtatccattgccccattctcggcatgaatcgcccagtccacacgtcagttcgccctacatctcaaattctggctacggttcttcaagctactactaccttggcggctcgagccagcacgggtcgtacctgcggcggtgtggagagtcagggccaagcctgtctaccatggtccctcggtcatcgcagcagcagttccagtcagaggcaaacgtggccgcaggcgcgtcgtctgcccagtcctcacggcagtcctacctgcgacgctgtggcgattcagacgccagcttgtctgacatggcgtcagcccagtcgttgccggggtgctgaggcagatgtgcactacaagatgcggcttgacctgtgcatacaatgaggcttgcagcgtcacataggtggggaacatgtatagcatagactttatgatcctgttcttgtctgtgagtggtatatggttctttttttgtgccttttattgtgtgcatctgacgtgacaggagcctgttgaagttgattctgttaacattttagtccgcaccatgcgtccatgccagtttctccctagatttgctactctactaccatgcacacatttgaacgaggcagtgctcagctgcatgcatctgatgttaatgttgtgctgctcgctcagtgagcatgaagagatggtcgtctgagcaaattcagaaaacagccctttgtctg

SEQ ID NO: 4341 - DNA, 1445 bp, Zea mays
  unsure (1)..(1445): unsure at all n locations
  Clone ID: TF_ZmC3547_3
gccgtgtctagtgtcttccgtctcgatcccgcgggtgggactcgccggcgacaaaaacgaaaagcgacttgccctccgcggcctccggccttcccactccactcgccctcctctcctagcgtcggtgagccggtgcgctgcagtccccgctccccttccgcgtcgccgcgatggaggtcttccgggagcacggggacgacggagtgccctaggattccatcacgccgccaagcatcagtcccgcagccagggatttcttctccgaccccgaccttcatgtgagtcgcggccttcctcctcgaagcggatccggcggattggaggggcccaaccatagcaggtacttcttgcgggtgtaagcatttcgctgcacttggagacgcttatttggagtatttgaagtatgagttggctctctgtcctgtcagttatgtgcctgtgcttcataaaaaagagctacattttcttctactagggctttggagactgcccagatgaagagtagatttcttgttctctgtgccattgtctgcgtcatggctcagatgggagatgccaatgtcgtgctattggggaataatctgaccttgtcctttgctgatattgaggcaagcttttctccaggagtgaaaggatcaggagtcaatggcatagtttatgcttctgaacctttgaatgcctgcagcccgttaacaatcaaggcagtcaagggcccgccatctccctttgcattaattgtaagaggcggatgcacgtttgatgagaaagtgaaaatgcacaggatgctggattcaaagctgcaattgtgtatgacaatgaaaatagtggggtcctggtttcaatggctgngagctcaagtggcatacacatatacgctgttttcgtttcgaaggcctcaggagaggtgtntgaagaaatcttcaggacatactgatgtagagctacgtgtttctttgtgagaaggcatcgaataaggagagaccaccctagaatcccagaagctagagagttccatggaatgagcagtcagttagttaaggctatgccaagtcttattttcacgaaagtgcaagaagataactgcacatcatcgatgtgtgccatttgtttggaagactacagtgtcggagaaaagctaagagtgctgccttgtcgtcacaagtttcatgcagcttgtgtggacttgtggctaacttcttggagaacattctgtcctgtatgcaagcgagacgcgacgagtggagtatcagaacttcccgccacagaggctacccccttgctttcttctgctgtccggttaccttctcagccatcttcattcaggtcgagcgtggcagcctccccacccaggccgataagccggcatccttcattgcactcggtttctcgtgcttactctgtctctagtaccccccactcccccaaccccttcagatctcacacaa

SEQ ID NO: 4342 - DNA, 2705 bp, Zea mays
  unsure (1)..(2705): unsure at all n locations
  Clone ID: TF_ZmC1018_1
atcgaccgtgagaccccacgccaccctgtccctttccccgcgccaccgccctctccgtcgccgccgttcgaccgagcgccgctcacccaccccacgagctcccgcgcgggttcatgtccatctctccacacgaacgcaccggaggagcctattacccgcgcccgcacaaccctagccctagtccccaacatggcagcgacagacgccgccacggccgccgctcccctccggcatccgtctcgccacccggcgccgctgcggaagctagcgacggcggggtcggctcgagctccaacccagtggttccagctattggagaatctattaatgctcccgaaaaggtagttggatttataatatctggggaagagaatgatacatgtacacaagaggttggcaatgtttcagaatgccactcttcagaacagggggattccggtttgcctgtagataattttggctcagttgggtcatatcctgagagacctaaaatggtgggatcccttcaggctgaccatttggcttcaggttctactggactgggtaatgggactcagatagctgccaggaagaatcagaccgtgaatgctaatcacctactgaatttccagtatgatcctatttctcggccacagcccagaggccctagaacatatcttccgagaagacaaaggaagataaaaccttacaacaaggatctgttcatccaagcaaactataagtttgttgtattggatactgggaattaccagattgattcaatggatcctgataagatgcttcagtgggaagatattatctgtgtaagatactatagcccttctgaggtacaatgccctatttgcttggaaagaccattgtgcccacagatcacatcatgcggacacatatattgctttccatgcattttacgttatctaatgatgggcaaagatgattatagaggtgagtgttggaagaagtgtcctctgtgtttcatgatgatatcatcaaaggatttgtatacaatacaaattactcaagtccagaatgtccgtgctggtgacgttgtcacatttacacttctgagcaggtcaagaaattcgctcactccttccatcaaaagctcctccagtgaaagttctacaacagatgaagagcattataatgttttctcaaagtttattttgacatctgatgtggagttgtctgttcgagatgcaaaattggatcttagtaattggttgcatatggctgacttaggccttgttgatgacttggagaaacttccatttgtttctgctgctttggagcaactggaagagaagacgaaatattggattgattacagaaattatggtggtagtcctccatcaaaagatagcttctctcctggatctagtttcaagtctaggaactcttttgatgtgaatacttctcagcagatgagtgagcacaagatctctctttcagatagagatatggtcaatggtatttcagaactctccatgtctcccgagttgagtaaaacctctggtaaaggaacaatatctaaagtaaatgagaaatgtaccacaaccattgattcaaatgaacatgacccatacacattttaccaggtgtcagatggccaacacctaattctccatccactaaacatgagatgtcttctaaaccattttggaggttctgatatgcttccacctagaataactgccaaaatattggagctggaaactgtaacacagtctgaggctataaggaagcgctatcggtttttgagtcacttctcattaacaactacatttcagttctgtgaaattgacttgagtgatgtagtgtctcctaactcactggctccattcttggatgaaatcaagaagcgtgagaaacaaagaaaacgagccgccaagaaggaagaaagtgagagagtgaaggcggaagttgctgctgctgttcaggcatcagctatgcgatttgagtatacaaattcctctcaaagtcacaacgatgtcatgttctctctggatgactttgaagccctgggaaacaacgctgggccgtccaccagtccaccagcgagtgaaaggaagcttttctctgatgtaacacgcttgggttttgcatctgctcaagactcacctcccttaagactcggaactggggatgcaaatggccaaagtgaaacctcgagagaccaagggccgttagcgacacccgcattatcatttgccagcatcatatcttccagtagagccgtgactgcagctgacaactcggagatgcagaaagcaaatggcgctgggaagaagggtaagaaagcaactagagtgcttttgtcgactggtggtggccgtcgatactgaaggactatagatgcattggaacgaacagtttggttgtttccatataatgccgtagctcaatgcaatgtgcatagtacataacctggctgggatacgcttgtaagttgtaacactgagcggcagtcgtgtgtgttttgcctttcttgtgggtgtgcttgcgttgtgcccacatcctgtcccttgcatgatctggaaacgagcgcagagaagcgtgtaccataactaataaaggtggcgcaacactttagttgtggaacgccgctagtctgcccggagtgtcaaaatctccaaaaatgtgtacttttgatcattgaacatagttcatcagggttcaaaaaaaannnaaaaaaaaaaaaaaaa

SEQ ID NO: 4343 - DNA, 1188 bp, Zea mays
  Clone ID: TF_ZmC17335_1
ccggccggggtaaaaaaaagtacgaacaatccaaaaggagtccaaagtccatccatcggtccttccgtctcgacaagcttcttcatctcctccgtccttcaccgcttccttgaccctctctctcccccaccccacccacggaaagcttcgagctttctctctataccccagggagaaggaaggaagccggcacagtctactggccttgtggtgccggcaactgactaggatcgagaaatagggttcttggagagcggccggtccatggcacagcggggcgagctggggcggcagctcccgctgagaggccccctcaaagccctagaggcagacatccaccacgctaacgccatggcagatgctattcagaggaattatggtggcgcatgtgtgcagatgaggctgtcgttcagctccctggctccattgtttttgtacttcatccaatggctggactgcggctgctgttatgcccttcccagctatttaggattgtttcacattctcatatgcaaggtttatgctgatggagatagctcagtgtcgacatatgaaaggcgggcaagccttagggaattctacgcaattatctatccgattctgcagcagcttgagagtagtttgatcgagagggacctgaaagggaagggccgatgcaaggatatagtgagtaggaggaggatggaggattggaaaaaggtttccggtagggatgtggaaagggaggatgaatgcgggatttgcatggaggcatgcaccaagatggtcctgcctaattgcagtcatgcaatgtgcataaagtgctatagggactggtataagagatcagagtcatgccctttctgccgaggaagcctcaaaagaatccggtcgacagacctttgggtgcttacaaattccaacgatgtcatcgaccctgcacatttagaaaaggaaaacgtgaggcatttctatagctacattgacagcttgcccctaatacttcctgatagcattttctttttctattacgagtatctactataacgccaaggcaacatacatcagatgtgtaaattgcgaaaagcagatgaaatcatggttttcttttgtagatgaaccccctctcactctgaccacatgcatgtctatttacccataggctgctaatgtaaacattaatgcatctgtcaataaagttgttaggag

SEQ ID NO: 4344 - DNA, 406 bp, Zea mays
  Clone ID: TF_ZmC140839_1
atgatgcgctttctgagtgtctgaagagaaacctctatgtgcccacaacttcaagcagcaatgaagatggtgacatcaaatgcatcatatgtctggaggagtactcttctggtgtggaggtggccaagatggcatgcgagcattactaccataccacttgtatccaacagtggcttcagcaaaagaactggtgcccgatttgtaaatgtgacgcttctgccattagctcatagtgttcttgacagtaacagaagtatcagttcattgtaatcaaataggattacacaagtttttttggttctagaacaaattattcacttcaatcctatactgctcttcaattaacactaaaaaaatcataaaaaaaaggaaaaaaaaaaatagaagaaaaaaatttctctaaaaa

SEQ ID NO: 4345 - DNA, 1115 bp, Zea mays
  Clone ID: TF_ZmC11815_2
cattgggtacctcgaggccggccgggcggacttgtccgccatatcctctccagctttccgctccgcccttgtcgctcgtccagccaccgtgcccgtgcccgtgccgccgagaattctatccagaagcaagcaacaagagcccacccccgcttcgcgcgctctttcgtgccaggcaaacacagagcacagctatctgctcgtgtcccggtccgtccaactcgctcgctcgctcaatccactgatgatggggatcccgctggtgtgctactgcctcgccgtgcccaagccggtcatcgccttctgcaggctgctcagcgccgtcagggacgccgccctgctgatgctggccgtggtggggctgtgccgcttcccgcccgacggcgcggtggacgccggccaccagcccggcgaggtgaaggcccggctccccgccgtggagtacggccagctcctggccgagcacgacgagcagcagcagtccggcgaccacgactgcgacggggacgccgcgtcgtcggattgcatcgtgtgcctcgagacgctggaggcggcggacgaggtgcggcggctgggcaactgcgcgcacgccttccaccgcgcctgcatcgaccgctggatcgacctcggccgcgcgacctgcccgctctgccgctccgacctcctgccgcgcgcgccgggctgggccagccggctcggcctgggccggctcacgcgcgttcggtgaggaggaccgtcttccagggcagtttttaatttgtctattggatgatggggcgcggacaggttagcgacggcgatcgcccgggtggtataacagctgctctgcctgccatcagccaaccgctaatctacgggggggcttcattagtacgtaaaaggcgcctcacacttggtatacgtaaaagatatactagttattaatacgttaaaggattgagtatacggcacctagatgtttcatttgtacacgattttaatttcagtctctcctcgaccatataatagtaattaaattagttcgtcaacttattgtgcaacttggtgagcttagcagcagcaagtttgcgcaactggcagtgatgaataatttagcaaccaacttgaatcctcttatc

SEQ ID NO: 4346 - DNA, 1128 bp, Zea mays
  Clone ID: TF_ZmC11815_6
ttgggtacctcgaggccggccggggcttctgttctgcctgcctctatggctctatataaccagcgggccgcttgaggtctcccggggacttgtccaccgtatcctctccagctttccgctccgcgcttgtcgctcgtccagccaccgtgcgtgcccgtgccgccgagaattctatccagaagcaagcaacaagagcccacccccgcttcgcgcttgctttcgtgccagacacagagcacagctatctgctcgtgtcccggtccgtccaactcgctcgctcgctcaatccaccactgatgatggggatcccgctggtgtgctactgcctcgccgtgcccaagccggtcatcgccttctgcaggctgctcagcgccgtcagggacgccgccctgctgatgctggccgtggtggggctgtgccgcttcccgcccgacagcgcggtggacgccggccaccagcccggcgaggtgaaggcccggctccccgccgtggagtacggccagctcctggccgagcacgacgagcagcagcagtccggcgaccacgactgcgacggggacgccgcgtcgtcggattgcatcgtgtgcctcgagacgctggaggcggcggacgaggtgcggcggctgggcaactgcgcgcacgccttccaccgcgcctgcatcgaccgctggatcgacctcggccgcgcgacctgcccgctctgccgctccgacctcctgccgcgcgcgccgggctgggccagccggctcggcctgggccggctcacgcgcgttcggtgaggaggtcaggaggaccgtcttccatggcagttttgtctattggatgatggggcgcggacaggttagcgacggcgatccgcccggttggtataacagctgctctgcctgccatcattaacccgttaaaatatcgggggggcttctcgaggacgtccgggttgacacgattttcattctcttctcgaccatattaatagtaattaaattagttcgtcaacttattgtgcaacttggtgagcttagcagcagcaagtttgcgcaactggcagtgatgaataatttagcaaccaacttgaatcctctcatcaaaaaaaaaaaaaaaagcaaaaaaaaaaaaaaaaaagcggcc

SEQ ID NO: 4347 - DNA, 1030 bp, Zea mays
  Clone ID: TF_ZmC27970_1
ggcacggcacggcacggcacgaccgagctccagtctgcccccgcccccatccgcacgtccgccttgatccggcaaatggcgtcgccggcgcggcggctcctgcagaccaactccgtgcagtacccgacgctccccgcggccgacccgccgagcccgctggccgtcgactccgacgtggtggtcatcctcgccgcgctcctatgcgcgctcatctgcgtcgtggggctggcctccgtggcccggtgcgcgcgctcccgcgccgcgcccgccgccgccaggagggggctcaggaagaaggcgctcagggcgctgccgagcctcgcgtacgaggacgccgtggcggcccgggccgcggacggggcggcggaggtcctggcggagtgcgccatctgcctctcggagttcgcgccacgggaggaggtccgcgtgctgccgcagtgcggccacgccttccacgtcgcctgcatcgacacctggctcgccgcccactcctcctgtccctcgtgccgccgcgtcctcgtcgtcggcgacgcctccagtaagcgcccgccccagcctaagcgctgccgcaagtgcgaggcggccatggacgagccctcctcgtcgtccggttccgccggcgacacgcctgccggttcctgacccttctcacgagtgccacagccacgccgccgccgccgccagtttctagcaactgggctggcgatcttagctccactggaattccctcatcatcaggcgccgccggtttctagcaactgggttggcaatctttagctccactccacttcattccaaggattcgaacgttgatgctgtaaattgcaggttggtcgattatgtacatatttattttcagattagaaacatgctaaagtatcgtgtgaatgtgaatctcagaaacagaatctttcttcgcaactcagtttctcataatcttgccggcagcatgtttgacttctttttttctgtattagtgaactcatataatacagttcatattggaaatcacagggccttcttggctggc

SEQ ID NO: 4348 - DNA, 656 bp, Zea mays
  Clone ID: TF_LIB3608-056-Q6-K6-C10
ccaggtctcaaagggccagtaccactgtgacggatgtggaatatgtaggtaagcaccaccacgctgatggctacgtctaaagacttgacgcgcagaagtgtaaaacttctgtcagccgttcaaaactgataaattcgggttcctcgtcttcttgttgtttatgcagaaccggcggcgtggagaactttttccactgtgataaatgtgggtgttgctacagcaatgtcttgaaggattcccaccactgcgtcgaaagagcaatgcatcacaactgccccgtctgctttgagtatctgttcgactccacgaaggacatcagcgtgctgcaatgtgggcataccatccatttggagtgcatgaacgagatgagagcacaccatcacttctcatgcccagtgtgctcgaggtccgcctgcgacatgtcggccacatggcggaagctcgacgaggaggtcgcggccacgccgatgcctgacatctaccagaagcacatggtgtggatcctgtgcaacgactgcagcgcgacctcgagcgtgcggttccacgtgctggggcacaagtgccccgcgtgcagctcgtaccaacacccggagacgagggctgcgtgcccccagatctgaggcgaaccagaggccatgtcacaaaatgccagggag

SEQ ID NO: 4349 - DNA, 1041 bp, Zea mays
  Clone ID: TF_ZmC2210_2
gccggccgggccgggatcagccgcagtcgcgtcgcgtcgcgtcgcgtccagtccaatcctcggagcctcacacgggcggacgagcgggagcttctcccaatctcccctgcccagccctgccctgccgccgcgcttagcttcgcatcttcccctcctcctcctcctccttcctcggccaagcgaggagcgaggcgcgggcgcgagcgcgtcgttgagatggattcggaggcggtgcagcacgggtgagctgttctctctgctccaaggaacaggacgtgcaacagaactgctccagctgtggggcctgcatgggcaagtacttctgtaaagtatgcaagttcttcgatgatgatgtctcaaagggccagtaccactgtgacggatgtggaatatgtagaaccggcggcgtggagaactttttccactgtgataaatgtgggtgttgctacagcaatgtcttgaaggattcccaccactgcgtcgaaagagcaatgcatcacaactgccccgtctgctttgagtatctgttcgactccacgaaggacatcagcgtgctgcaatgtgggcataccatccatttggagtgcatgaacgagatgagagcacaccatcacttctcatgcccagtgtgctcgaggtccgcctgcgacatgtcggccacatggcggaagctcgacgaggaggtcgcggccacgccgatgcctgacatctaccagaagcacatggtgtggatcctgtgcaacgactgcagcgcgacctcgagcgtgcggttccacgtgctggggcacaagtgccccgcgtgcagctcgtacaacacccgggagacgagggctgcgtgccccaggatctgaggcgaaccagaggccatgtcacaaaatgccagggagatgccgtccaacgatcatctgtctgcaggacgttgctgcgcttaaagttaaaggctagcgcgagaccatgctggtagtccagtcttgagtttggtgctggagcatttgtaatgttccggaaaatgtatgcgtccatgagtctgtccaggcagta

SEQ ID NO: 4350 - DNA, 719 bp, Zea mays
  unsure (1)..(719): unsure at all n locations
  Clone ID: TF_LIB5045-072-A1-K1-G9
cctcgnagccggccgggccgggggtctcgctatctacacacaggaaaccaagcttgtcatccgggtcgcatcgagataactaaaacaccatgacgcaaggttccgacgaaggtgctggcgctgcgcacccgtcgtggccgagcggcgccgacgccgacacacccgtcgcgcccacggcgggtgcggcggccgccatgacgctcggcagcatcctcaccgtgtccggcatcctcctgctcttcgtcatcttcgccttcgccctcgcctccctccaatattgcttcgagtcccgcagggatagggacagggacgcacggaccgggcggccggccggtagtagcaggggcgggatgatgcgggccagcaggggcggcggcgtcgacccggagctgctgcgctcgctgcctgtcacggtgtaccgtgcgccgccgcaaggttcggacaagggacggcagcagggcgtggtactggagtgcgccgtgtgcctcgccgagctccaggacggcgaggaggcccggttcctgccccgctgtggccacggcttccacgccgagtgcgtcgacatgtgtctcgcctcccacaccacctgcccgctctgccggaccaccgtcaccaagcccgacgcatcgcctccgacgccttctttggctcttccacccgtaccgccggagcccgcgaactactacgccaccgccagcttgcccgccaccagcgtgctt

SEQ ID NO: 4351 - DNA, 708 bp, Zea mays
  Clone ID: TF_ZmC39016_1
ttccggctgctggcatggaacgccgtcgtctactcgctcccgttcctcctcttcctcctgctctgctgcttcgtgcccgcggtcggctacgcgctcggctacaacatgaacacggcctccgtcggccgcggcgcctccgacgagcagctcgccgcgctgccgcggtggcgcttcaaggagcccgacgtggcaagggaccgggagcgcgatgaccaggagtgctgcatctgccttgcgcagtacggggagaaggaggaggttcggcagctgccgtgcacgcacgtgttccacctcaagtgcgtggacaggtggctcaggatcatctcctcttgccctctctgcaagcaagagctcaagtgactgatgcctactccgctcctacagagagatgtgggtgtattctccctcccttactctgactgcgcctgccgatcagccacacctactacatatataccacgacgaccgccggacgatgcgtgcgtcgcacctctcgcgaggatctctcggcgggcccgtgctgacctctagtagacgctgacaaatgatgtgcagcaggcggcaggtgaattcggtaccttttttttttgtctagactagatcaaatgggaaatgtgtaaacaaaaaggtctcttttttttatgtatgtaacaatgtgatgtgcgcccttgcttcattcaagactgaatgcatacttttctttgtgcc

SEQ ID NO: 4352 - DNA, 1206 bp, Zea mays
  Clone ID: TF_ZmC235641_1
gccggccggtcaccgaaatgagccgctcgagccgcgcacccacccggccagatctgagttctgagttctgaaccccacgacaaggcgagagagaggggaaggaaaggaacgcaaaacatctatcaccagttcacgacgccaccagccacctccaacatttactccgctacccacgcggccccgattccacccagggcacccagcagaggcaccaccaccgtgcgcccgctccgccaatgccattccgccgctccctaccgcgatgcccctcctctcctcgctctccaacctgggcctcggctactccatcgccatcgcgctcggcttcatcatcctgttcgcctccttcctgctggctttctacttctgcttcggccgcggcggggactactgggccggggaagcagtcaccacggcgtccagctccggccacctctccatcaccgtcccgcgcgtgctcttcgtcgcggaagggtctgagtcccccgaagacgacgcttacccctcctccgccgccgccgcggcctgctcccccgtcgggctcgacgcggccgccatcgcttcctaccccaaggtcgccttctccagcagggccgccgaggcagacgccatgtgctccatctgcctcagcgagtacagggacggcgagacgctgcgcgtgatgcccgagtgcaggcacggcttccacgtcgcgtgcctcgacgcctggctgagccggagcgcgtcctgccctgtctgcaggtcctcccccgtcccgacgcccaactccacgccgctcgcgacgccgctttccgagctcgtcccgctctcgcagtacgccgccgaccggaggcgccgcagcttttctggtcgccttgcacagaaccacctgacctgatgtggttagcttgcttctctcgtgggtttgttgttaaatggttcttggcgtttggtttactttttccatcattctcacctgcccaagtccaaggaaacagccaaggagtggacgatggagtagaagaagatgcggtcatttatcacgctggagaaatggcgaccagtatgaggatgtagggcactgagcgtacatgcgtacggtgtagtactgcatccccttgcgctcgctacgtccggaatacgcgtcttcatccatcaggtacagtcagagcaggtcggcactccactgccaaccgcacatggacactctcaagagcattttctagt

SEQ ID NO: 4353 - DNA, 2423 bp, Zea mays
  Clone ID: TF_ZmC4657_9
tgggtacctcgaggccggccggggaggggccagccactccccgtcggatgccgccgccgccatgaccgtcacggccgccgcatggccggtatgcaccatctgctacgaggacctccgcccgctctccgaccagcacctccactgcctccccgcctgcggccacgtcttccacgccctctgcctggagcaatggctggagtactgccctgggggcaagaagaagcgcacctgccccgtctgcaagcagccctgcggcgccgcgcacccgccgacccgcctctacttcagctccaccggcacgtgcccgacccaggcctgctcctccccgggaagcgcctccgggagcgcggacccggaggcgctcgccgccgaggtcgcccggttggagcagaaggcggcgtcgctcggcaaggtggtcgaggagcagcgccagagcatcaacgatctcaagtctgaggctgcctggttgagggagcaggcggaggcgggagactttatgctgcaagccgcgaagaaggacaaagaatctgtccagatacttctgaatgcgaaaacagaggagttgtcgaggaagacatcagagtgcgggaggttgcaggagaagagccttgcattagccaaagagcttgcggcgctgaagctgtccgcagacatgaaccttcaggaggaagaaatcatgaagtttgcttcacttggtaaccagggaaacctgcagaatgctgttgatgttttaaagagatcacttgctattcggaacaagagctacaaggaattgatggtccagtgtaatgttttgggaagatcagagtctcgcatgcagcagaagcttgaaaaggccaaagaaattttaaagaagttaaaggcaagggtacaggaacttgagaaggaattagaagataaagaaaatggtctgttaagggacttgaagtcttcaaagaaatttaaagcagaccatataaaatctgggaatgccacagctaatagtgctttcactagttcaagtcctggatatgaaaatcaaacaaacaagctcgatgaggtgatgcaagatccgtgcaacgacaagactcactttgaccggtcaaaatctgaagctgggagtgttctgaatgcccaagacaacctggacaacaaggatgtagatgtgatagacctagaagccaatgattctgtttttggatatgaacagaaggctcagttttccgccaagccattcgggaccgaagatagcacaccgaattccgagaacaagtctagcctttgccaaaatgatgaccgacagtccgtggcatctgaatgcacaaccgcacacgcaacaaatggaggacccttcctcaaacacagagaagcaactgtaaaatcaacctttatggcgaacattagggccaaactgcatattcctcgggagagtccttccgtgagaactaacgcgacaagttcaacgctggagagtgaaacattgacaattgatggcatctccaaacaagcaacgagattggcatctggcactggacctcagcagatccacaacttcaactctttttctgatgatttccaagcgccaggaattcctggcacggatggagcaaggagaagcattggcaaatggtaagggcccagcagatcccagttctgcgagtgggagcagaggcaacctgatcgccgtgggaccggatggccgaggaggcaaggtcaagatcctgagggaccttggccgaccccaggatagcaagtcccaagcgctgtggcccaaggcgcagaaggttggaggcagaggtggccagtcccagatccatcagttctttggcaagagatgatcctgctactgaatgaatatgttgtgccgcatggagcctggttagctgaacctaaatcctgcatgcagctgtgtcggtatgcaatgcgtgctgtcgaacaactgaacgtgtatctctgttgtgcttgagctgatctacgtgtggatagttgtagagcacacctctggctcagcttggacgtagccctggtttcatcacatggcagctggatgcagcagaagagggaaacaagtttgttgaagagtctgatggtaggttctgggaggtggtgtgggcttgggagagcctacctacactacacgtcagctgtgttggatctaactctccaatcataacaggacaccgggcatgtatggcgcttctagtttgtttgtttgtgaggtagtgcaagtgttgagcttctctggagtccctgaaaaggatgtttagtggacagctacacgcctacaccagcttccgtctttttcctcaaagattttagctgcgataattgatgtacttgttttgtatagtaatccttttctatttaaatatagacataaaaatcaagaactaaaaaaaaaaaaaaaaaaaaaaaaaaaacccacgcgtccggttctagatcgc

SEQ ID NO: 4354 - DNA, 1346 bp, Zea mays
  Clone ID: TF_ZmC9505_1
gtgtgtgtctagtcgtccccttctcccatcggcgggagggcggcgtcgtcagcccgcaaaaaagcaaagcgtcacgagaagctcgttccttgacaggcagccatgattccaaggacgtcctcggtctcttcgtcggcggcggcggcgcccaccgcgggcgcgccgccggcgtggccgagcggcagcgacgcggcggcgttccaggcctcgggcagctcgggacatcagcaggtggtcatcagcaacggggtgctcctcgccgcggtcatcttcctcttcatggtcgttgtgttcgtcttcctcctctacctctacgccaagcgctacctgggcgccgggaacccgctcgcggcgccgccgtcctcgcggttcctcttcgtggccgcgtccccgctcccgcagcgcggcctgcccgcctccgccctgcgctccctccccgtcgcggtctacggcggcggcggcggcggcccgggcaccaagagcagcaaggaggcgctggagtgcgcggtgtgcctgtccgaggtggccgacggcgagaaggtgcggacgctgcccaagtgcgggcacgcgttccacgtggagtgcatcgacatgtggttccactcccacgacacctgcccgctctgccgcgcccccgtcggcggcgacctcgacgcgctgccgcgggaggagcccttcggcgcgtcgctcgagttccccaccaacgtcctgttctggggcacccacgacgaggtcgccaacgccggcctcgccacgcccccgcccccgccgccgcccgtcgccagcgccgtctccgcgagctcctcggcctccgggcgtaggaaggagaacctggtcatcgacatcccgacgcggcccgtggccctgaccaccacgccgcccttcaactccccgctgccgacgagccgggtggctgggagcgccgacgagacgcggtccccggtctccgccaggctgcggtcgctgcgccggctgctgagcagaggcaagcaggccgtggtcggcacctcctacagcccgcgcggcgccggtgacgtcgagcaggggctcgcaggagccgaggccgcccgcccgcccaagacgcctccggcgtcggactgattcagatccccccgagctccgggtcgcatttggctcgactcgccgatcaccggagcgcgcgtagcgtatgcgttcatttttgttccccctttttcttttttttatttacatcttgattcgaaaaaggaactatcggtcaaaaggttcctgtgtaaacagaggaaaagaccgatgctggttggttgttgttgggggaaaaaatggtggatttgttcatatgtttaccaagaaacttttcttgaaaa

SEQ ID NO: 4355 - DNA, 1399 bp, Zea mays
  Clone ID: TF_ZmC9623_1
ccggccggagctcttgcattaaacatcccttgtggacggatttgatttgagggtagatataggttggaacccctcgaggccggccgggacggagccaatccctcctgctggttcgatccaaaccctaccaaatcgatggccgacggcggcaactgcgggccgggcggcggcaatgcatcggcgccggtgtgcagtttcgtgaggaaaccacccaagaacatccggaagcgccccgccgcgcccgcggggtctgatgacgacgacgacggcggcggcggcgccctcgccgccgcgcgctccaagaaggggccaccgtcctcaaccgctggcaagctcgttttctccaccgcaggtgcttcctccgaggcgccgcggttccagtacgaatcgtcccggacgatccagtccacggacacccgcgcaactgccacgctcgagacggagacggagtttgaccgcgacgcgcgctccatccgcgagagacagctcaagcaggccgaggagtccctcaagaagaacccctccgctgttgctgcttccgcctccgcctccaccgctggagaggtgtacaaggggatccacggctacacggactacaaggctgggttccgacgggagcacacggtatctagcgagaaggccggcggttcgcatggtccgctccgggcgtccgcgcacattcgcctctcccagcggtttgactaccagcccgacatctgcaaggactacaaggagacggggtactgtggttacggcgattcctgcaaattcatgcacgaccgaggggattacaaatccgggtggcagctcgagaaggaatatgaggaggctgagaaggcccgcaagcgacgaattgccatgggtggtggtggtgagagtgatgatgaggcagcagatgacgaggatgaggaggaggcgctgccctttgcctgcttcatttgtcgggagccattcgttgatccagtggtcaccaaatgcaagcactacttttgtgaacattgcgctttgaagcaccactcgaagaacaagaagtgctacgtctgcaacaaaccgacgctgggcatcttcaacgctgcacaggagatccgcaagaagatggcacaggacaagaagcagcagcagcaggagtaggagagctcaaaacacaccgttgctaatttagctgtgttgtacaacgatgattggtgcgataactagagtccggtatttttcgccatcagataaaagagaccaagttttgaacgatcacaatgaatgcattcagatccagtcactagatccccacccccagacaggccatggtgcctgttggttcctggcgatgggcaaagctccaaaggtacagtgctagactgccaatgtgtttgtttgttgcagggcacccgaagctctttttttg

SEQ ID NO: 4356 - DNA, 788 bp, Zea mays
  Clone ID: TF_ZmC38394_1
ggccgcttttttttttttttttttagttttagcattcgaaactttgtagatgaagctgctgcagaggttgaacaaattcagacactgccgtgaaaaaacagtagttaatgggtcagtgaccagatgctaaaacgctggcacgttactatcttcttggtgccgctgacaggatgccggggaggcgttcgatctccttcgggttggttagcttgcgaccctgttgttgctggcaccagtcggcctgggattgccgcctcaccaagacgtgcctcgcccagccctatcttctcccgggcattcggctgcatcgtctcctgcaccttctgtggctccactggcagcgcctgcgcctccgctctgcgctggtgcgctgtgttgttgcgccacagacacaacaccaccaccagtcgtgctccgtggcgaatcatactcagcagcgtcacccgttgggagctggaaccggcagacaggacaggtgttcctgatggcaagccacgggcggatgcactccccatggaagtagtgcttgcaggggagcctaaggacactctgccccgccacaacgccgtccttgcacacagcgcagccgtgcgaggcctcctggtcgctgagcgcaacctctggtaagccgtccaccaccgcacgggatgccggcagccgccgtgtagcctccccgacgcggcgcgcgagcgcgtcgacgaggttgaggtcggcgtcgtcggagtcggtgtcctcgccgcccaccaccattcggaagggccgcgtggcctgtggcgctcggaggtcga

SEQ ID NO: 4357 - DNA, 343 bp, Zea mays
  Clone ID: TF_uC-zmroteosinte020e08a1
ggaatgcacaatatctatttttgtaaaatgagtgctttgagtaaaaaaaggaaggaaaatagttccaaaagggaaaaggaaggaaaagaattccaaaagggaaaatgtgagaggtgcggaggggatagaggacatgaagaatctatacacttcatttctgaagaaacatgaaacacgttgctacttgattttcagggcaacagatttgcatataggacaccagttcttctgtcgaagccagtgctctatgcaggaaaggtggtagtagtgtttacatgccatcttgcccacatcctcacccaataaatactcctcctggcatatgctgcattttgtttcacaa

SEQ ID NO: 4358 - DNA, 1666 bp, Zea mays
  unsure (1)..(1666): unsure at all n locations
  Clone ID: TF_ZmC28409_1
gcacgagccggactcctgttttatttcggatcgcgacgccacaatcccaccggccacagcacagaccaggccgccgccgccgccgccgctctgccttgttcgcagctctgttggccgctcgctttcgcaacattattatacccacccaatcgaccgacgcaatcgaaaccgcctcccatctcatccgtctctctcgaatcccaccgtgcgctcactgcgatggacggctcatccaagcggatcggcggtggcggcgacgacatgcccagccccgaccacgaccagaacgccagccccaacgtcccgccgtccgccgctggtgacggcggcgcatcagccactgcggcggcagcgcccgccgccgggaggcggccgttcaccagcctcagccaggaggaggccgacctcgcccttgcccgcgtcctccaggagcaggagcgggcgtacatgatgctgaccggcggcgagtacgcgatctcggacgccgagagctacgactacgacgaggaggaagacggcgatgggagcgactacgaggaggaaggcgaggcgctcgacgaggacgagcaggttggggacgcggaagcggagggggctgagggggacctggacctggacccttctcagtacgaggacgacggggagggcgacgtctccgacaggctcatggcgctcgtcgggatcggtgattggcgagcaatggagcaggatgatgctggggacgaggaggacgacgaagatgctgaggttcatacacagggtgcatgggaagatgttgacccagacgaatactcttacgaggagctaattgcgctgggtgaagttgtcggtacggaaagcaaaggccttgctgctgacactattgcctcattaccttgggtgacttaccaggcacaagacaagcaagatggcaacatggaacagtgtgttatttgtcgtgtggagtttgacgagggcgagtcattagttgcactcccttgcaaacatccgtaccattctgagtgcataaaccagtggctgcagctaaacaaggtatgcccgatgtgcagtgctgaagttcccacttctgtgaacaagcaggcatgactactcaacctgaagaagatagcggtggcttggtatttatctgccattgatggaatgaaagaagcgccaactgttaaattgttcagggaagcaagggaattggctgggttctgattccctgttttcttcagttcttatcccccctcccctgtacgcatgctaattctatggccataccgctggttatttatgcattccattagatgcggaggattcattgcttgtagatgtaaatcaacaatcataccaccatagtcaatagcagttgttttaatgccaatagcaacgttcatgtttaaaatggtagcatttttgttccttgttttctagaccggacattttatgttcctgaagaaaatgattgtgttacaaaaaaaaaaaaaaaanaaaaanaaaanaaaaanaaaaaaaaanaaaaaaaaanaaaaaaaaaaaaaaaaaccttgggggggggcgcggggcccaaattccccttatggggaggggattaacccgccgccctggcgcggggtttaaaacgggggggaggggaaaaaccggggggtcccccaattaaatgcctttggaaaaaacccccttt

SEQ ID NO: 4359 - DNA, 1255 bp, Zea mays
  Clone ID: TF_ZmC1149_45
cctgccgggatctcccgttcaggcgttcatccctctttctctcgtggcgacgaagacgaccgacgccaggtgccaggttccgtcgggtccttcgccggcgaagagcatccaccaggcgacccagtgctgttctggtgcggtttcattgcggaagttttgttgtgggattttccggtggcgaagatgatccgactacccatgtacgcggcgttcagcctgctggcgacggcttcggcggcgtactacgcgttcagcagccgggagcagttctacccggcgatggtgtacctctccacctccaagatctgcttcgtgctgctcctcaacacgggcctggtcgccatgtgcgtcgcctggcagctcgccaggcgcctcttcctcggctccctccgggaggccgaggtcgagcgcctcaacgagcagtcctggcgggaggtcatcgagattctcttcgccgtcaccatcttccggcaggacttctcggtgtccttccttgccatggtcgctgcactgcttcttgttaaggcactgcactggctcgcgcagaagagggtcgagtacatcgagaccacaccctccgtgcccttgctctcgcacatcaggattgtctccttcatggttttcctgctcaccgtcgattgcctcttcctgtcaaactcactcaggtcactcatacagaagcgggaggcgtctgttgccatcttcttctcctttgaatatacgatactagcaacatccactttatcaacatttgtgaagtacatattctatgtcagtgacatgctaatggaaggtcaatgggagagaaaggcagtttatacattttacttggagctcatcagtgaccttgtgcacttgtcattatacatgctcttcttcatagctatcttcttgaactatggtgtcccgctgcacttgattcgtgagctatatgagaccttccgcagcttcagaattcgcattgcagattacatacgttacagaaagatcacttccaacatgaatgaacgctttccagaagctacatcagaagagctcgatgcgagtgatgctacatgtattatttgccgtgaggagatgactacagcaaagaaactgctctgtgggcatctgttccatgtgcattgtctgaggtcatggctagagcgccaacacacttgccccacgtgcagagctccaatcgttcctgcagataatggacgtgctgcatcatcacgacaacatggagcccaggctggggttcaacctggtactg

SEQ ID NO: 4360 - DNA, 1365 bp, Zea mays
  Clone ID: TF_ZmC1149_78
tgggaccctcgagccgccgggcaagagtttccaggcctactccaatctccaggcccaggcaaaacagcaccggaccgcgtgcgtttcgcttccgccccctgctgtttctgtttcttggcgttcaccccctctctctctcgtggcgacgacggcgaccgtcgccgcccccctacgcgctaggtgccagggtccgtcgggtccttcgctggcgacgagcacctaccaggcgacccagtggtgtgtttgggaaggtttccgcggtcgggcggcgccccccagtggcgaagatgatccgactaccgacgtacgcggcgttcagcctgctggcgacggcatcggcggcgtactacgcgttcagcagccgtgagcagttctacccggcgatggtgtacctctccacctccaagatctgcttcgtgctgctcctcaacacgggcctcgtcgccatgtgcgttgcctggcagctcgccaggcgcctcttcctcggctcgctccgggaggccgaggtcgagcgcctcaacgagcagtcctggcgggaggtcatcgaaatcctctttgctgtcaccatcttccggcaggatttctctgtgtcctttctcgccatggtcgccgcgcttctcctcgtcaaggcgctgcactggcttgcgcagaagagggtcgagtacattgagaccacaccctctgtgcccttgctctcgcacatcaggatcgtctccttcatggctttcctgcttactgtcgactgcctcttcctgtcaaactcgctcaggtcactcatacagaagcaggaggcgtccgttgccatcttcttctcctttgagtatatgatactagcaacatccacagtaccaacattcgtgaagtatatattctatgttagtgacatgctaatggaaggtcaatgggagaaaaaggcagtgtatacattttacttggagctcataagtgaccttgtgcacttgtcattatacatgctcttcttcatagctatcttcctgaactatggtgtcccgctgcacttgattcgtgagctatatgagactttccgcaacttcagaattcgcattgcagattatgtgcgctacagaaagatcacttccaacatgaatgaacgctttccagatgctacatcagaagagctcgatgtgagtgatgctacatgtattatttgccgtgaggagatgactacagcaaagaaactgctctgtgggcatctgttccatgtgcattgtctaaggtcgtggctagaacgccaacacacttgccccacgtgcagagctccaatcattcccgcagataatggacatgctgtatcagcacgacaacatggagccccagctggggttcagcctggtactgccactc

SEQ ID NO: 4361 - DNA, 1373 bp, Zea mays
  Clone ID: TF_ZmC9227_1
agcatagtcaccaaccctccaaaaatccggccaaaacatcagtttcccccaggtaaagccaatcctttgatgccttctttttatccccaccccaatctcgcctaatgtcattatacatgctcttcttcatagctatcttcttgaactatggtgtcccgctgcacttgattcgtgagctatatgagaccttccgcacttagaattcgcattgcagattatgtgcgctacagaaagacacttccaacatgaatgaacgctttccagatgctacatcagaagagctcgatgtgagtgatgctacatgtattatttgccgtgaggagatgactacagcaaagaaactgctctgtgggcatctgttccatgtgcattgtctaaggtcgtggctagaacgccaacacacttgccccacgtgcagagctccaatcattcccgcagataatggacatgctgtatcagcacgacaacatggagcccaggctggggttcagcctgctgcaggtactgccactccatcctcagaaggagcaccaggtgagaacatgagcaggcaccaagcaaaacttgaagctgctgcagcggcagcttctttatatggaaggtcttttgtttatcctccagcaaacaccctaaaaaggtctgttcctccccagcctgcatcaagtacaccacaatctgaagcaagtagctccaatcatcagtcacaaaaagaccaagaaatgcagtcccgaaacagcagcgatggtttagtgcctctgcctcttaatgcagatggtgctgttggttcaggaacaagcacaagggaccttgaaaattcactgcagaaggcacaagaaaactttattaagagccagattgagatgttacaaatccaactgcaaatggtgcagcgtggcgctgctgggttgagcagtagcgagaacactgagcacacagaagactgactgaatctgtaaacaggcactcctgcatcgtggagtaataatgagaatactgagcacacgcagctgaatctgtaaataggcggagatgaggatggggataaaagaaagcaatcaaagaattggctatacctgggggaaactgatgttttgcctggattttggtaggcttgttgactatgctttcctgttactgtgttagtgccttcttgccagcgttagatgtttctctacgtgtggtggtttctgtaggttgggtacatctaattgctagtttaattatacgattacacaaaattcttgtaccgagggaaaatagaaaggataattgtacaaatgattttttgtgtgcatatccatgataacgggattgtctgtagattttgtgtttactggagtaaaacagaaaatttggctgctgattggatgttg

SEQ ID NO: 4362 - DNA, 717 bp, Zea mays
  Clone ID: TF_LIB4826-094-A1-N1-H5
ccggccggggtccaccatatcctctccagctttccgctccgtgtccgcccttgtcgctcgtccagccaccgtgcccgtgcccgtgcccgtgcccgtgccgccgagaattctatccagaagcaagcaacaagagcccacccccgcttcgcgcttgctttcgtgccagagagacacagagcacagctatctgctcgtgtcccggtccgtccaactcgctcgctcgctcgctcaatccactgatgatggggatcccgctggtgtgctactgcctcgccgtgcccaagccggtcatcgccttctgcaggctgctcagcgccgtcagggacgccgccctgctgatgctggccgtggtggggctgtgccgcttcccgcccgacagcgcggtggacgccggccaccagcccggcgaggtgaaggcccggctccccgccgtggagtacggccagctcctggccgagcacgacgagcagcagcagtccggcgaccacaactgcgacggggacgccgcgtcgtcggattgcatcgtgtgcctcgagacgctggaggcggcggaccaggtgcggcggctgggcaactgcgcgcacgccttccaccgcgcccgcatcgaccgctggatcgacctcggccgcgcgacctgcccgctctgccgctccgacctcctgccgcgcgcgccgggctgggccagccggctcggcctgggccggctcacgcgcgttc

SEQ ID NO: 4363 - DNA, 1614 bp, Zea mays
  Clone ID: TF_ZmC3771_2
cattgggtccctcgaggccggccgggcagcggccttgtgatgacggtctcgcattaatggccgctccctcgctatcccctttgtcgtctcgtctcgcccccttccggcttaaccctcaagattctccctcgcctcctcctccttcccgcttgggcgggcgcggcaccttccggttccggtttccggggcctcgggcctcggcctcctatatatatacacgcgcgcggccgtctcctctctatactccctagcatgctcggctcgctccccggattgatcgagctcgctcgttgcagagatggacccggtgcctgccccctcctcttctcgccgggccgccgctgctcccggcccctgctgccgctttgacgcgctgcggcgggcgtgcgccgggaacgccgccgccgccgcgcgggccgccgggtgggcgatcggcgcgctgctcacctgcatcttcgccgtcgtgggctcactcgtcggaatcttcattggtgccttcatggggatgtctacggaaagcggcatgttccgcggggctggtgttggagcagtttctggagcagtcttctccatagaggctgttgagtcctgcatcgagatttggaggtccagccattcaggaaaatacagcattctctttgtgctggacatcatcttgagcctcttcagcggaagaattgtgtgggagaaagtcagtccagcgctacagcgtgcagtgcaaagccagatgagtctaatgagcacaccgttcatcgacaacagtgacttttcgaaaccggcagtacaggaggcatgtcaagggatttgattgataggatcccaaagacgaggttcagtgctgctagcaactgtgatcaggaaactgatagcagctgctgcccagtctgcctccaggatttcggagcacggcaattcgtgagggccctgcctcagtgccaacacatattccacgtgcggtgcatcgacagttggctcctccggcacgcgtcctgcccgctatgccgggccggtgttcacatagaccatatacatatgtaaatgaactcgcagggtggcacctggtgtattttcgtagcgaatacccgtgctcctgttggatatcacaagtatagctgtatacataggggttttttgctctctctttttgtcacttcttgagacttgcttgtgtggggctatgctttcagctgcacgtttttgtcgaagcatgatgccttgatatgtacatctggaaaatggaccgactaacaagctccctgaattctggcactgtgcttcaaaaaaaaaaaaaaaaaaaaaaaaaaaaaaaaaaaaaaaaaaaaaaaaaaaaaaaaaaaaaaaaaaaaaaaaaaaaaaaaaaaaaaaaaaaaaacaaaaaaaaaaaaaaaaaaaaaaaaaaaagggcccttgggtttttacccctgttaaagggcaaattccaacaaactgggggccgtaacaaagggatccaactttggacccaattttggggaaataagggaaaaagcgtttccctggggaaaagggtaacccgttaacaattcccaaaaacaaacaacccgaaagaataaagggaaaagcctgggggcccaaaggagggaccaaacccaaata

SEQ ID NO: 4364 - DNA, 699 bp, Zea mays
  Clone ID: TF_700345248_FLI
agcaagtatatcaagaattgtcatgttaactgaggcgctatttgaggtgttggatgaaattcaccgtcaacctgcatcactttcactttccatggtgtctgttcaggctcctgaatctgtagttgattcgttgccatgtgccatatctgcctaaccgaatatgaggacggagaccagataagaacccttccgtgcaagcacgagttccacctgcaatgcgttgacaagtggctgaaagaaatacacagggtgtgccctctgtgccgtggagacgtctgcgaagtcgcctcgtgaagaccttggcgctgccatccttccgatgtggcgccggtggatagggcaccaccgccaggcgccagctgttccgtggttgaagctggttcggtcaggcaatggtgatcttgtcaacttggacagttgacaccgcaagagcacgtcaactttgactgtctccctgccgaagagaatggccaaaccaaccctgcgaccgatgagtcgctgttcctgtcatcaacttttaagataccgagactttgtatacagtagcttttgtagcctcccgcctcgtgtatgacagcctgtacatatttgtaaattctggaatcaaatgtcacaatcccctgttctcgtgacctgatgttgtagggaacatattcggtgctgatggagccgggaacagagatgtgctgatggagatgg

SEQ ID NO: 4365 - DNA, 1329 bp, Zea mays
  Clone ID: TF_UC-ZMFLB73175A10_FLI
tagggagcatcgccgtgctgtttttgatagtggtaatgaacaaaacactgctgcatgtcctttggggattcatcaaattggccgatgcacctgtaattctttctttattgctgaagaatctagcgcccgagcaagtatatcaagaattgtcatgttaactgaggcgctatttgaggtatcgtttccttcgtcttcatttgattatcatcagcattaacattctacgtgattatgacacataattggcaacaacagagaaacctttttaggattgaactccagttccaggctttagtcttataatgctataatctactctggccagtttgaactggtgttactcatctgtgctgtagttttgaagtttcatagttaaaaaaacatatattcatataggaataacatgtcagaacaacaaataaatagtacacccaaaacttagatggttttatgacaattgaaaattttgtgaggccaatgcacatcaataaagtttgcaggcaatcatgggatggttcaggcatgtttgaagcacagtagatagaacgtttttaaaagtaaagttgtactttagttctgaaatttcaaaggaaattgttgcagtgtttggactatgaactccattgctactgtcacattttcagtacattactagttattactctaggtatgtgataatggcctacacgattcttttcaggtgttggatgaaattcaccgtcaacctgcatcactttcactttccatggtctctgttcaggctcctgaatctgtagttgattcgttgccatgtaagagctacaaaaagcttgagacaccccaatgcagtgatgatatggaacagtgccatatctgcctaaccgaatatgaggacggagaccagataagaacccttccgtgcaagcacgagttccacctgcaatgcgttgacaagtggctgaaagaaatacacagggtgtgccctctgtgccgtggagacgtctgcgaagtcgcctcgtgaagaccttggcgctgccatccttccgatgtggcgccggtggatagggcaccaccgccaggcgccagctgttccgtggttgaagctggttcggtcaggcaatggtgatccaacttggacagttgacaccgcaagagcacgtcaactttgactgtctccctgccgaagagaatggccaaaccaaccctgcgaccgatgagtcgctgttcctgtcatcaacttttaagataccgagactttgtatacagtagcttttgtagcctcccgcctcgtgtatgacagcctgtacatatttgtaaattctggaatcaaatgtcacaatcccctgttct

SEQ ID NO: 4366 - DNA, 1234 bp, Zea mays
  Clone ID: TF_ZmC3219_1
ccgcgccatgtcaggccctcgctcggcgccgatcgagcgccggcgggcgatccgccgcggaccgctgcatcccggcagtgcgccggaggactcctggaagaggtaaggatgtttcggacaagagtggtactgggagaagtgaacatgtatgaccgctaccaggattggcgcctgcacgtcggcgtccgcgcatacggcgtgttgctcgggggtggagacaaaattggatatcttaacataggcgttacgcggccaaggtcggcgccggaaacgtgggagggacaaagggcacaagcgtgaggggcgcaggggtggaggcagagttaccggtgggatcggcgacgacgtgtggtgcgcacccggcaaaccatgagcggcgaagggtatactgcgtgaactgcgaggtggcgcgctaccagatggtgtggaggtgcggccgcggcgccgagggggacaggtcccacagagaaaggccgtgcttgtcccggagggtgaccgtgcaggagcagatatcctcgtcattcatggactcgccgccgccgccgcacctcgatgcccccttattcggcgccgatctcatcccctccggccgcctccgccggatgcgcgggtggcgccactcccccggaggactcgaggaagagataaggatgtttcagacaagagtgttactgggaggaatgaacatgtatgatcgctaccaggattggcgccttgacgttgataacatgacatacgaggagttgctcgagcttggagacaaaattggatatgtcaacacagggttacgtgacgacgagattactcgcaaccttaggaaggtcaagcacccatccttcagttccttacggttcgcaacagaaatggaaagaaaatgcagcatttgccaagaagaatttgaaacaaatgaagagatgggaaggctagactgtggccatagctaccatgtgtactgcatcaagcagtggctctcgcagaagaacatttgcccagtttgcaagactgccgtcagcaagaattgaaatccaaactccagtcacgctgtctgtagatctgggtgaaaacagcaaattctgttgtcctgtacagcccgttatatatattattattgtatgaacacaatccattcgtttcatcttgcagaaagaaaatgccatgttttggtcatgttccatcaaaaaaaaagggcggccgctcgcgctagttctagatcgcgagcggcccacaccgtctg

SEQ ID NO: 4367 - DNA, 1096 bp, Zea mays
  unsure (1)..(1096): unsure at all n locations
  Clone ID: TF_ZmC3219_2
cgtcaccggtgggatcggcgccgacgtgtggtgcgcacccggcatacccttcgcggcggaggcgtcctccgtgaactgcgtggtggcgcgccaccagatgttgnnnnnnnnnnnnnnnnnnnnnnnnnnnnnnnnnncccacagagagaggccgtgcttgtcccggagggtgaccgtgcaggagcagatatcctcgtccttcatggacnnnnnnnnnnnnnnnnnnngcgatgtcgccttattcggcgccgatctcnnnnnnnnnnnnncatgtcaggggacccgcggctcacggtagagcgccggaggactcgaggaagagataaggatgtttcagacaagagtgttactgggaggaatgaacatgtatgaccgctaccaggattggcgccttgacgttgataacatgacatacgaggagttgctcgagcttggagacaaaattggatatgtcaacacagggttacgtgacgacgagattactcgcaaccttcggaaggtcaagcacccatccttcagttccttacggttcgcaacagaaatggaaagaaaatgcagcatttgccaagaagaatttgaaacaaatgaagagatgggaaggctagactgtggccatagctaccatgtgtactgcatcaagcagtggctctcgcagaagaacatttgcccagtttgcaagactgccgtcagcaagaattgaaatccaaactccagtcacgctgtctgtagatctcggtgaaaacagcaaattctgttgtcctgtacagtccgttatatatattattattgtatgaacacaatccatttgtttcatcttgcagaaagaaaatgccatgttttggtcatgtttagggctgacaaaaaaaaaaaaaaaaaaaaaaaaaaaaaaaaaaaaaaaaaaaaaaaaaaaaaaaataaaaaaactaacaaatcaaggttacccctacctgcaacaacgccccataacaaaagaaaaatagaagaaaactaaatgaaatacgacgaataaaaataaacactgaaaagtaacatgataaaataattggggcgctggtttaaaaagataaaatttacaaccacccagctttgaacttat

SEQ ID NO: 4368 - DNA, 2286 bp, Zea mays
  Clone ID: TF_ZmC4668_1
gggcattgcttacctcgaggccggccgggctcccttcttcgattgccgtcttctctggcttccattttcgcgaggaggcgaggtggacagagacgccgccgccgcttccgcttcgacctcgacctcggcttcggcttccacgagaattctagcaagtcttctggagaatataatccacatctgtttattttgctgcattttggtatggacgaatctgcctgtagatccactgccccagttgggtttcttagaagaggttcgggcatttccttgagaaatcaaagcaatgaggataggtcaaatcagtacaacaagcagccagggaagagttcaaatcccaatcctgtaaaattacggttcactgaaaataaagagaaaccaaggtattttcaagggacatttcattcatcaggctccagggcctcatctgtaagctcttcaaaagctcctgctagaaaatactgcgacgagagacagaaacagccctttttggcagagacagacattgctgaaagcagtaacagaagaactgaggttagacgcctacaaagtggcaagaaagcttctgtatttggtgatgggcatccatacacacagaagagtatctcagaagcttcatcatcctcaacaattactggaggcttgccagaagagcatgatcttggagctttatatgtttctggttcttcaggtagttctgcacatccagttaatcccaggaatgctgcattgaatgcttcggcacatatgcaaaaggataaagaagaaatgagttcaggtagacctcaaggtgctcccacttttgttcgtcggcatactttacctcaaagtttttccactggtgtcaagtcaccaactgcccctggcactggagcacagagacgtggcctcaaaaatcttggttgcacttcaatatctgatgttctgccttcaggatgctcttcatctgattctgctcgtgataggagaatcgaagttacaaagaagagaacttctggtgcaggaagttcttcaagatcaaggataagtgaacaatctaatttcagtcagccacgtgctagttatcctggcagtactggtcctagagctagagctgctgaacaatcagcttctcaacaaacagcaaggaccaatagccgaaatattccggatcatacagattcaataaggactagacgaccttttactctgcgtgccagggagaggatgatgccaggtgaaagggaggacagtgtatttgctctgcatgagactgttgcaagcattcatccagaatgcggacattttcacatggatggtactcccccagagagattaggaagacccttttatgcagaactacctcatgcaatttattcatctaatcgtcaaggatcaagtagtcagacagcaaggagaagatctacgtctcgtactgaagaaagccctcaacggatgtttcatggtatgttttgggagagagatggctacagggggataaacatggaaggaattgcacaggcgttgctagcattggataggattgaacatgatgttgaattgacttatgagcaactgcttctgctagaaactaatctgctcttaagtggccttgatttgcacgatcaacatgaagatatgagattggatatcgacaatatgtcttatgaggaactgcttgctttggaagagcatattggctcagtgactactgcccttactgaagagcaatttaccaagtgtgtaaaccaaagtgtgtatgaagcaagaaattcttatagagatgtaagcaagatcgcagcagatgatgtgaaatgtagcgtatgtcaggaggaatacgttgatggtgaagagattggtacaatgcaatgtgaacatcagtaccatgtgcgctgcattcacgaatggcttaagcagaagaattggtgtccaatatgcaaagcttcagctataccttcagagatgaccaagggagacgcatgaatcttggcccaaacttgtaaatagcgtggatttattattagacattgtagatgctgacgcagttcaccccaatatgtggatacgatagtctctcccgaacggtcgaacgcctggaaccttttgttactgcatcttttatcttcttagcacacccttgctgcttgacagcagtacgggtcagaaactcgaaaataaccgtggttctcaagaaatttttccagattctaaaaaaaaaaaaaaaaaaaaaaaaaaaaaaaaaaaaaaaaaaaaaaaaaaaaaaaaaaaaaaaaaaaaaaaggaagacaaaaaaaaaaaaacaaaaat

SEQ ID NO: 4369 - DNA, 339 bp, Zea mays
  unsure (1)..(339): unsure at all n locations
  Clone ID: TF_LIB4829-029-R1-N1-G3
ccggccgggnaaagccgccaccggcgttgacgacgaggcgagctccaactcgtcgcccaacatctcgaccgccgcgacacgcggcggcgcggaagctgcggtggcccggtcctcggcccgcgccggcggctcggccttgccgcggcagaccgggcacgacgcgcgcgtcgcgagccacacgtcgatgcactcctggtggaacacgtgcttgcagccggagagctgcctcaccatctgcccctcgcccaggacgccgaggcagaccgcgcactcagcggcgccggngccgnngccgncagcatcagcagccactgaggntgagccgncggcgccggctcg

SEQ ID NO: 4370 - DNA, 1724 bp, Zea mays
  Clone ID: TF_ZmC3804_1
cattgggtacctcgaggccggccggggaataattcaaactctccgagagaaaagcgcaaaaaaaaaaaaaagcaggacggcaatcgcatgcttgcgacgatgaccgccagcaagtgaagaatccagccacctgacctcgtaacttcttcttcttcttcttctttcgtcgttctactcccatcgaagctactactgaggacgggcgcaggcggagaacgagcggatccgctagcaggggaacagccggcgcggaggaagggtttggaggatgacagaagctgcagttattacaaggtactggtgccatggatgcgagaaggtcatcgaggaggccatgggggaggagatcaagtgcccgttttgcggtggtggattcatcgaagagatggccggggaggattccgaggggttgcagttagagcgggagtggggaacgccgccaggggacagcgaggacgacgatgacgacgatatagcccatgagttcgagggctttatcaggaggcacggacgggcatcggctctgcgccgggtgctcgacagcatccaggacgaccttagagccgacagggaaagggacaactccgtcctcatcaacgccttcaaccaagccctcgcctcgcaaggctcggcgctgctggatgccgacgaggcccgagacggccgaggtggatccagcaacagcaacgacgatggcttgctggaagagtatgatgtcctgggggctgggctgagcctactgcttcagcatctggccgagaacgacccgaaccggtacggcacccctccggcgaagagagaggcggtcgaagctctgcccactgtccagatagcggaggccgtcagctgttcggtctgcctcgacgatcttgagctggggtccccggcgaagcaaatgccctgtgggcataggttccactcttcttgcatcctgccatggcttgagctccacagctcttgccccgtgtgccggttcgagctgccgtctgaagagacgaaagatctgaacgagcctagcgatgtgcacagaagaacagagagcacccgagagaacgacagcgagagcggtaacagcgcgtggccccttgtcccttggttcttcagcgggctgttctcggtacctgaaccgtcgcacactgacagaggcactctcaccaccgatcaacagagtccttccaccaacccaaatgctggaggaaattgatttcgtcatcctttgtgaataatgctcatacatctgagaatagcaaggagccttgtcagtagatggcttattttttttctgtactgataatccttctcggatgaatcgcaaggtacggagtctgtgtctgctctattgtcaggattctagcgatcgtttcgcctctagttaatctcatagctactgagactgtctgtctgcatcctatgcaaaagatcggttgctttctttgttcttggctcttctgactggatgtctttgagctatttctggaatatgtaaactatcatgccttgtatttattcattgtttagttgaaatatatcttcatatcaagtaacaagtaaaaaaacctctgggcggccgttcttgtgggtcctcgctttcgtccgcgtgcttgcttcgtcctcgcttcttctttgtgttgccttttttcttttcactggccggtgtttccttcgttcgtgctgttcccccctggcgttcccctcttttcgccttgctgtctttcctctttctt

SEQ ID NO: 4371 - DNA, 1534 bp, Zea mays
  Clone ID: TF_ZmC60532_1
cccccccggccgcccgcccggccccgcccccccgcccgcccgcccggctgccgttggccgcggcccaaccccccccgccacgctcaggactcgggccgcccgcccgcccgtgtgccgtttaccggagcacaacacaacgcggccccctcacggcgtggagtggattgggccgacgccgatcgagagcagaggagaggagcgcggtcggatagggtttgtctgggtgaggttttgagcgagagcgcagggcgagggaaggaggaggaggaggactggctcctggaggaggaggccggccggggcttggatggtcgcggagcgctcccgtaggtggtgtccatgggaaggtcgttcagggactcgctcaaggtgctcgaggccgacatccagcacgccaactccattgcttctgaatttcggagggaatatgatggcgcctcccttcagatgaggatggcatattgccctgctgcccactttttcctttttcttgtgcagtggacagactgcaaccttgctggtgcacttgggctgttgaggattctaatttataaggtttacgctgatgggacaaccaccatgtgtactcatgaaagaaaagcaagcattagggaattttatgctgtcatatttccctccttgatgcaattacatgaaagaatcaatgaagtggaggatagaaaacagaaagcaatatgtctagagaggtacagaagacgggatgaggatccgaaaactgtggtatcagagattgatgataatatagaggaggaatgtggcatatgcatggaaataaatgtcaaagttgttcttccaacctgtagccacgctatgtgcattaaatgctatcgtgaatggaggtcaaggtcccagtcctgtccgttctgccgcgacagcctcaagagggtaaactctgctgacctgtggatatacacggacagcaatgacatcgtggatatggcgacagtccgaagagagaacctgaggcgactcttcatgtacatagacaagctgcccaccgtcatcccagaatctgtatttgacgtctacgactcccatgtaaagtgacgcagttgagcacgtctgccagttgttttatgtatttgctacgtctactggtgctgattcctgggcctctggtgctgttgtgccttttttttaaagagtttcgaagcaactgggagccgaggaggctaatatacactgaatgtacgtagaacttgttctatcatcttgtgccatgcgatttcggcctgtatggtggtttagggtcctagcatttgacgctgtatatgtcagtgggggtatcatggttatgggcttatggcaagaaaggtataggcgttctcctgatgcatattctgatccatgatttttttactcatggatggatggatggactttgtttgaaggtcagaggctagtcaaatgcatgaactgtcgaatcaactactcccttattctgcatgcaaatgtgaggtgtccttaggttatctataactgttactcgaaaaaaaaaaaaaaaaaagcggcc

SEQ ID NO: 4372 - DNA, 682 bp, Zea mays
  unsure (1)..(682): unsure at all n locations
  Clone ID: TF_ZmC12601_2
tgaattcggcacgaggcctcatccgccgctgcctactccccatggcctcagcgaacaacgacgaccgcgaggcggcgggcatcctgcggctgctgatggggatggcggcggcggcggcgcccgcctcggcattgcctcggggcggcggcctgatgatggtgcagcacgtcatcctcgacgtcaacggggaactgttctcgggcggggtcggcggcggcggcgtgccgccggcgtcgaaggccgcgatcgccgcgctgaaggaggtgaaggccggggagggcgaggacgcgctgggcgagtgcgccatctgcctggacgcggtggagggcaccggcaaggagatgccgtgcgggcactgcttccacgggcgctgcctggagcggtggctaggcgtgcacggcaactgccccgtctgccgccgcgagctgccagcgccggccaaggaggaggaggaggaggacagcgcggcgtcggcggagggcggcgaggaggagaggcggaggcccagggccgcggtcgtcgtcagctacctcgtgttcngaggcgggcgggccggaggtgcagcaggagcccggagagngaggagccgtggaacattagaatagaggatgtggattagcattgatcactttgccattggntttcagaatggtttgatggcggaggagggtatgtacatact

SEQ ID NO: 4373 - DNA, 1639 bp, Zea mays
  Clone ID: TF_ZmC8390_1
agctcggaattcggctcgtggagcaatcaatcagagcgggcggggaggagaatacaaggccccttcgtctcgcctcccaccaccaacccttcctccgcctccgccgccgccgcctggagctgaaagtatcccagatctgagcccgccttccgatggcgatgccttcctccccttcccccacacgccttccaacggcctcctcctcctactggtgctaccagtgcgaccgcttcgtgcgcgccgcctccccgctctcctcccccgcctgcccctcctgcggcggcggcttcctcgaggagatgagcgcgccgccgccacgaccggcctacctccgccgcccccgcgcgcaccacgccgccgactcccgcgcggcctcgcccttcaaccccgtcatcgtgctccgtcgctccccgcccgccgccgccagcttcgagctcctgtacgacgacggcgcggggtcgggcctccgcccgctcccggagaccatgtccgacttcctcatgggctcgggcttccagcgcctgctggaccagctggcgcagatcgaggccgccggcgggctggcggccggcgcccgcgacgccccgccgccggcgtccaaggccgccgtccaggccatgcccgttgtctccgtcgccgccgccgacgcgcactgcgccgtctgcaaggaggccttccacctgggcgccgaggccagggaaatgccctgcgcccacatctaccacgccgactgcatcctcccatggctcgcgctccgcaactcctgccccgtctgccgccaccagatgcccaccgacgccatcccccttgagcaggaggaggaggccacggtcgggctcaccatctggaggctccccggcggtgggttcgcggtcggtagattcgccggcgggcggacgcccgaggagcgggagctccccgtcgtgtacacggagatggacggcgccgggttcaacagcggccgccgacccaggcgggtctcgtgggggtccaggcaggccgcgtccacgaacaggggcaccgtccgccgcttcctccgcaacgtcttcgcctgcttcgggcgcggccacgcctcgtcctcctcgcgctcccacgccgtgcctgagctcaacgacgacgcgttcagccatgggtccaggagccggagcaccagctggaggctcgaggacgggcatgccgacgccacggtgcagagttgacggacgaaccaactcctgctgcctgcctccctgtctctagtacagcacgctgcaagaagcgaatcttgttgcttttgtttcataattcattcgtcttgtattgtgtttaccatactgctgctcctactcctgcctgctacttagaagaaaaagaggaaggggaaggggaaggcgaaggaggaattggaggatttgtagaacaggtcgattgcaaggagaccatgcaagggttttcattgtaggtgggggattgttttttttttgcttcttctgtagctgtatgtatccatgctagtcctatcctttcctatgttgcagcaggatacttgtgctggctgcttgcttggcagggcagcggcatcactgtcccggccgttgtctgtcctggcttggcaatgaagcagcagagcacagaaagtcagaaagtggcatccccatgg

SEQ ID NO: 4374 - DNA, 491 bp, Zea mays
  Clone ID: TF_LIB3354-124-Q1-N6-A1
gagcggccggtgctgacgtcgtcctgggagccgaagaagaggacgttggtggggaagttgggggactcccggtcggccacgggcgtggccacggcgggcgggtcgtcgacggcggggcaccggcagagcgggcaggtggagtgggagcggagccacgcgtcgacgcagccgacgtggaaggcgtggccgcaccgcggcagcacgcgcgccgcctccccggccgccacctccgcgatgcacacggcgcagtccagcgcctcgcccgcgcccaccttccgccggggcagtctcgccatggccttgtcgtcgagcccgccctcttggcaccactcggtggcgccgacgtcgccgtccgcacccccgcctccgaacacggtgcgcagcagccacaccctggagccgccgacggcgccgtcgaccgcgcggggcgcctcttcccggtattgcttggctcacaggtcgatgtataagcagcacaccactttgaggaa

SEQ ID NO: 4375 - DNA, 733 bp, Zea mays
  Clone ID: TF_LIB4721-008-R1-K1-E4
ggtaccctccgaggtcgtccgtgtgatgagcattttctaaatgacggtctaggacgctctagggattctagcagcagtgaaacaaggaggagtcacagaaggattctatgggacacgttttccaggcgtggctcaagaggttatccagaatttgatgctgatgacctcggattttacagcacatggctagaccttggtgatgacatttttgaagagttgggggaatcaagatattttcatcgcaggcgacatggttcgatcagagtaagccagtattcaagatcccggattagggacatcgccgtgctgtttttgatagtggtaatgaacaaggcactgctgcatgtcctttggggattcatcaaactggccgatgcacatgtgattctttcttggttgctgaagaatctagtgcccgagcaagtatatcaagaattgtcatgttaactgaagcgtttttgaggtgttggatgaaattcaccgtcaacctgcatcactttcactttccatggtctctgttcaggctcctgaatctgtagtcattcgttgtcgtgcaagagctacaaaaagctagaggcaccccaacgcagtgatgatatggaacagtgccatatctgcctaactgaatatgaggatggagaccagatacgaattctttcttgcaagcacgagttccacctgcaatgtgttgacaaatggctgaaagaaatcacagggtgtgccctctgtgccg

SEQ ID NO: 4376 - DNA, 1172 bp, Zea mays
  Clone ID: TF_ZmC97939_1
aattcggcacgaggcgcgaaacccagctcagttcggtgagcgcagcgctcgaccatcagacatgggcgtcagcgacggcgacggcaacggcccccaaggcgagcgaggaggcggtctcgtgcgaagggagtcccgagtataggttgccgttctccaagccgcacgtccccagcccaccgcaggtgtccgacccgacgaactacgccatgactggcaagatcctgctcgccgcggcgggggcgttcgcgggcgtgctcctggcgctcgtcgcgctgcacctctacaacagcacacggcggcggcgcctcggcggcaaccagcggcggctgttccggagcctggccatcgccggtggcgacgaggaccgccgcgacggtgacggagagggagcgcctcccccccatcgcggcctcgattccgctgtgctcgccgcgataccggtcgtgctgatcgaagcgggcgcggatgcggggggcggggactgcgcggtctgcctcgcggagctcgagcccggggagaaggcccgcgcgctgccgcggtgcggccaccgcttccacatcgagtgcattggcgcctggttccgggggaacgccacgtgcccgctctgccgcgccgacgtcgtcgtcgtggcgccgggcgctatcgtgccagccgagggcggggcgctgtcggaggaggtgcggatagacgtggccggggacgccgtcgccgcgacgcccaatggatccacggtagtgccggtgatggggaggttgcatagcggccgggatcttgagaaagccaggcgggtctttgcttccacccgattctcttccttctgacagggctccattggctcccacagccacagactacaggacctcggaagcttcctctgattttcgcacatggacacctcgattgtttcggagcgttctgccattagactgtacatagatttgttggtgatgccagctgtgttttgccatgatttgtagtacgattttttgcggacgaactcatggacatatctgtctcgacgttgactcgagacatgtaaactgcttggatgctatttgcttcacaacattaatgattgatagttgtaataaatttgaataggtggagctactaatgtgatattttatttcggctgaatctaaacaaatataatctaacgttatcaattatct

SEQ ID NO: 4377 - DNA, 1142 bp, Zea mays
  Clone ID: TF_ZmC3485_1
cccggggtcgcacccacgccgtccgggaaaaaaaaaagaacaaaaaggaagacagcgaagttgtctacatcacttgacttgcgagcgaccgcggctcacgtcggctgcataaattgcttcgtagactagtaccacacagtttgcgagaaggggagaggtagaggttccgaggtagagagatagagaggaggagagggagggcgaggcggcggatccgtcactccgttcttctccgctgatctggaggaaggaggcgaggggagttgcaaatccatcaatggccactccaaccacctattcagtccgcatatcctcggagacccacaagattgaagcctgggtggtgtctgacgaagctttggccaggcaactgcaggaggaggagaacacgcgtgacgctgctgccgacaccagagaagtcgccggcaatgtacccttggagtcatcgtcaccggctgttgagtacaggcctgcacagaatgcagctcaggttgcaagggaagacaatgtggacccagataatatgtcatatgagcaactacaagcattaggggaagcagtaggaattcagtccagagggttatctgatgagctgatatcttatttggagccatttaggaacaagtgcactttcttctccaggaaaaagaacagtgaggaatgtgtgatctgcaagacaacatatagaagccggcagaaattgataagactaccctgcagccactgttatcacgcagattgcataactcgttggcttaagatcaacaaggcatgcccagtctgcaacgaggaggtgtttggatgaactgcaaggttcctggcagatgctgcggtttcatcgttacttgcttgcggcatgcttttgagaagacgttggacgcataaggtccattgtttgtgattatgttgtgagcctagtttggtgccctttgcttaagaggactggctctgcccatgcatgggtcggtctacacgtgtgctagtaactggaccaggtcgcgttttgtgatgcgtctatccatcttggttttatcacaaattgatagatctgttgtgtgggtagtttggttgccgttttctgaatataatggatggtgtttttgcccccttttgggagaagttcaagcaaagagcagttcaat

SEQ ID NO: 4378 - DNA, 1470 bp, Zea mays
  Clone ID: TF_ZmC26130_1
ccggccgggaaaaaaaaaaaaaaaaaaaaaaaaaaaaaaaaaaaaaaaaaaaaaaaaaaaaaaaaacccctaggccccccaaccaaagcagaggaaagagccgaggacgcgagggcgacgacccggaggagcaccggacccgaaggcggagccccccaagccagaacccggcgagggggtcggtgccgaccatgtcctcgcccgcgccctccccgcccgccggggcgccgtcggagccgctcctgctcccgctcccgcccccggagttctactgctaccagtgcgaggccacggtgtcgctgcccgagccggccgcgccctcctcggccaggctcctctgcccgctctgccatagcgacttcatcgaggagaaccctagcaccccgtctccaccaccacctccgccgccgccgcccccaccgcttttcctctccgactcctcctcctcctcgctctcggacgaccccgacgacgacttcgaccttgtcatggaccccgacgtggtgcgcgcctaccttagccgcttcgcccaccgccaccacctccagcagatcggccacggccccggcccgcacggccgaggggagccgcccgccacggccgcctccatcgccgcgctgcccacggtcgaggttgctgagcccaccgccgtctgcgccatctgcaaggacgacctgcccctcgcctccgaggcgcggaagctcccctgcgcccacctctatcactccttctgcatcgtcacctggctcgggatgcacaactcctgccccgtctgccgcttccgcatcccccccgccgacgaccccgaccaggccgcaccgtcgcagcaggacccgccgcccacgcggatcaccatccgcttcagcaccaccacacgccgccgcgtccgcatcggcagcgatgcgccactggcgtctcatatctcggcgtcgcccacgcagctcgcacaggctattaccggggatggagctggtggacctgccaatagcggcgagactgtgtcatctgagtggcctccgcaccccgaatcggatacagtcatgtcggaggcacgcgaggggggtggcttttttgattgagccagaggttccaattatcaggcgataaggtagctgctgttagctgtcagccaacaggagtaaaaggaggctaccacctaccatacgcttcctgtcttcgttcggacgaggtttctcgcaaggtgatggcgtgctgttacagctgaaactaaagctgtccttgttcggacgaggtttctggcgagcgagaagatggcatgttggttacagctgaactaaagttgtcctgttaggagaacaagagcattcatcgcatgggttcccggtgtcttgtatattggttaaacgtatttattcgtaataaatatataggcatgtacaatgtgcagtactcaaaaaaaaaaaaaaaaaacccctccatgcaacttggtaggtacatatggaatgaatc

SEQ ID NO: 4379 - DNA, 783 bp, Zea mays
  Clone ID: TF_ZmC828795_1
cattgggaccctcgaggccggccgggtctgctccatgggatactctcagaggacaatatatactgaagtattgacgcaacaagcactatacaccggcggcaatggcagagctagcattattgtccccgcctcaaagaccctacaacaacacgcacagcgtcatctcttcgggcagcaaagagaacctgccgggggacgtgatcaccccgtgcagccgctgctccaggaagctgctcctggcaggcgccgcgtccttcgcgttctgcctcctgtccgtcgccgcgtgcctcctactgcgcttcctccttcggcgctggtgccgtcgccgccgcggtccaggtctcgtgcagcaggaggaggaggaggcgcagctaaagctcggcggcggcggcggccttgacgccgaagccattgctctgctgccttcttccttcccgtaccaccggcgaggcaacgacaaccccgaggtggagtgcgccgtgtgcctcggcgtcctggacgaagggcagacggctaggcagctccctggctgcgcgcacgtgttccaccagcagtgcgtcgacgcctggcttgcgtcgaacgcgtcgtgcccggtctgccgccggaggactggcccgcaggctgaggaggaagccgcggcggcgccggtcgacgtgtagacgtatagtaattactgcagtgccggcagcgttgtcctaccatgagctcaagctagagctgtcgccacaatgactcaataatgaaagtggtttgggttgaaaataattttttttatgccagaag

SEQ ID NO: 4380 - DNA, 467 bp, Zea mays
  unsure (1)..(467): unsure at all n locations
  Clone ID: TF_LIB3354-042-P1-K1-E1
ctcaaacctttgttatcttctgggaagttattatgttgagctcctgtttttattattattattttttgctacttgcttaaaccgagtaaatacatagtattacatacatttgagttactcggtttgatcatcccttttttaatacaggagtgctgtatctgcctatgcccgtatgaagatggcgnggaactacgtgagcttccttgcaaccaccattttcactgcagctgcattgacaagtggcttcacataaatgctacatgcccattgtgcaagttcgacatcatcaagagcaaccgtgacatagaagaggtctaggtcactaaggaaaaaacnccgcaaaacttttcgtcatgtctctgctgtgttcttcagtactaccgctaccacatttgcgatcctgagttgtgattaccggtcctttaggtgatgcacaaatggtactcgtgagtttctttttattagca

SEQ ID NO: 4381 - DNA, 1461 bp, Zea mays
  Clone ID: TF_ZmC42210_2
attgggccggagctcgccggccccctcccgtcccgtcccgtcccctcccctcccctcccctccgctcccgtcgtctaccctcactcgaaactccgaatcgaaaccggcggagttcaatttggggatttcggcacctcgttccccgaaattttctggatctgagtctgtcggccgttctcgatttgcgtctggagtgagcctgcgagttttcaggctcgatttggtcggggcctcgggggtcccggtcttcgatttcggggatggactcgtctccggtgtcctattggtgctacagctgcagccgcttcgtgagggtatctccgtcaactgtcgtctgcccggagtgtgatggcggcttcctagagcagtttacgcagccgccgccccgcggcggcggtgggagcggccggcgcgggacgatgaacccggtcatcgtgctccgcggcggatcgctttcagggttcgagctctactacgacgacggcgcgggcgaagggctgcggccgctgcccggtgacgtccagcacctcctcatggggtccggtttccaccgcctgctcgaccagttctcgcggttggaggccgcggctccgcgtccaccggcgtcgaaggctgcggtggagtccatgccatcggtgacggtggccggaggtggtgctcactgtgccgtgtgccaggaggcctgccggcctggccgggccggacgggagatgccgtgcaagcacgtttaccaccaggactgcatccttccctggctctcactccgcaactcctgccccgtctgccgccaagagcttccggctgcagccaccccagatgcggaggcggatgctgggctcaccatatggcgacttcctcgcggtggatttgccgtggggaggttcgccggcgggcctagagagcagctcccggtcgtctacactgagctggatggtggcttcagtaacggggttgggccgaggcgggtgacatggccagagggagatggccaagtggatggtggtgaaggtcggattcgccgcctacttagaaatctatttggttgttttggtcatggcagccgaccagcaagttcgtcgcagtcccgtagtggctgagcacagttttccttgtaccattttttcaattgatagcactgaagaactagggctagtgtaagaatgaaacccagattataatttcttggggcttttgatgtaaatgaaggcctattgtctcattaagaattattaagagatggctatgagcaaacatcaaaaaaaaaaaaaaaaaaccaaatttggtcaaacataagtgcaagccttcaagaaaggaatatcaatgaatgttttggggaaacaaatccttggcaataatgtaggtagaaagaacaattggtgtatttgcatccctacaccctactgtttgtgtacatactgaattggttgaacatgaatttccattctgttatatcttatattg

SEQ ID NO: 4382 - DNA, 1157 bp, Zea mays
  Clone ID: TF_ZmC13117_1
caggccaccaccactgcaccaccgtccacaccagagcacggcacggtacggaagcgaggtgcacccgcttagtcccccgccattactccgattccccttctcggcttctcctccttccccggcaattaatgcggccaacaaccagatccagccccccggaaacctaagctcccgcaaacaaatacccttttcccattctgcccctcccccgcgcagcatgccatcccgccccacgaccacagccccgccgccgccgccgccgccgcccacgaccaccacgtggggagcgagagaggcatgtccttccttgacccgctcgcctcgctcggcctcgggtacgcgatcgccatcgcgttcggattcctcgtgctcctcgcgtcggtgctgctcgcctcctacttctgcctccgccgcggggccgccagccaggggttcggcgccggagccggcgtcggcgtcggctcggctccgcccggcacgccgcctcctccgcctccagctccggccacatctccatcaccgtgccccgcgtcgtcttcgtcgcggaggactacgactcgcctgggtcctcctcccgcggccccgccgccgcggcctcccccgtcgggctcgacgcctccgtcatcgcgtcgtatccgatggtgcccttctccaaggccggggcgggggcggacacggaggtcgcgtgctccatctgcctctgcgagtacaaggagggcgagatgctgcgggtgatgccagagtgcaggcacaggttccacctcacgtgcctcgacgcgtggctgcgtcgtagcgcgtcgtgccccgtctgccgttcgtcgcccatcccgacccccgtcgccacgccgctctctaccccactctcggagcttgtcccgctgtcgcagtatgccgccgaccgtcgccggagcaggtttgggtgattaatgggtgatggagatgtgaactgttcggctagagctaccataactaggacaaaagtttttgcttgacagcagtacattattggacccaggaggaagacatgcagtgtacatacattgttcttctgttctaagatagtgtctatcaagtgaggttacctgtgatcttatagttgtacgcggaagattgttctatgaatcatcttatttcatccatgacttgcattgcagtgt

SEQ ID NO: 4383 - DNA, 534 bp, Zea mays
  Clone ID: TF_LIB4073-011-Q6-K1-C3
ttggacgcgtgttgtcgatttgttccgtcgtctagagatctcatcgttgtgctcagtgaaatcaatccttggatgaattccaattcccgcgggcaaaatcgacgcatcgatctcgtttttaggccgagggccaggacggtgcagccatcctttttcgacgatcctgattacgatcccctgtgggacgatgatctggccgccgccgccgccgtgttcggcgatgatgatgatgattatctggtggcagcccccgctcatggcagcagcagcaagcgtcctcacgtcgctgccgctagcgaggaggccatcctgaggctgcaggaggtgacgggtcgttctcgcttggggtccgccggggaggagcagtgcgccgtctgccggcaagacttccgcgccgacgagacgctgagggccatgccctgctcccacgccttccaccagcactgcatctcggagtggctgcgccgcaacgccgactgccctctctgtcgctgccggctgcccgacgaggaggaagaggacaagcagaggagg

SEQ ID NO: 4384 - DNA, 1092 bp, Zea mays
  Clone ID: TF_ZmC13088_2
tgcaagataagggcgccgtgctgcggcgaggtatttggttgcaggcactgccacaacgaagccaaggactcgctggaggtcagcgtccacgaccgccacgtgcttccccgtcacgacatcaagctggttatctgctctctctgcaacaaagaacaggatgtgcagcaagactgtgcgaactgcggagcatgtctcggcaaatacttctgcgcgaaatgcaacctcttcgacgacgatgactggtggcgcagagaatttctatcactgtggcagatgtggatgctgctacgcgactccgctgaaggattctcaccgctgtgtggacggagctatgcatcacaactgcatcacaactgccctgtctgcatggagtatctattcgactcgatgaaagctatcagcgtgctccactgcggacacaccatccacctggaatgcctttacgagatgagagcgcaccagcagttttcatgcccggtgtgcctgaggtctgcctgcaacatgtccgacatctggcaaaagctggatcagcaggttgcagcgtccccgatgccagcgatctatcagaagaagatggtatggatcctttgcaacgactgtggcgtgacgtccaacgtgcagttccacatcttggcgcacaagtgccctggatgcagctcttacaacacccggcagacgaggggcgatccagccgcatgctctagagtatgagagcaaataaaactgctgtactgcactgcacataaactcgtggggttgtggggtcgatcgataggtagcttgcagggaggaaattaaagactaccattgcgcatggacacgattggtgccggcagttgagtacgtgtattaggcctgtcatatgtagatgtatcatatgctatgcattcccaaagaagaatttggcgcacggcagatgagaacatgtattaggcctgtcatatgtagatgtatcatatgctatgccttcacaaagaagaatttggcgcagcggacagggtatatatttttttgttgctatatacacataatttttgttgcgcggtgcttgtgccaatgatggagagttcgtacgttgtttttcttatattt

SEQ ID NO: 4385 - DNA, 2844 bp, Zea mays
  Clone ID: TF_ZmC10261_1
cgcgcgtccgcccgggcggcgctccccgccggccgccgccgcgtcccgtccgacctgtggaagaggagagaagactgaagagaagggaagacatggccgtgacggcggaagcggcggcagagatggtgttggagcggcgggcgtacgcgcgggtggggctcctcggcaaccccagcgacgtgtacggcggcagggccctgtccttcgccatcgccgacttttccgccaccgtccacctccgcccttcgcccgagctgctcatccagccgcatccgcaccacgacctcgtcgccttcccctctctccctcaactcgtgagccgttcgcaaagtgaaggatattatggaggcgtccggctactggttgttatctaaaccacttccatgcactattggggttcaaaatagcaacaagctggaaacatcataacctcaacctacactcatgtgggaatattcttctaaagttggtctatgtcatttgactgctgtcattggttctggaccacggagtctcatccactttttgtataaacagacatctaataatagttgaaatgagacctaatctgattctcaatgctgagaaagagcttgggattgttgctggacttcaggaccgagtggcacaggtttatggtggactagtttatatggattttagccagggtcatatggacaagctgggtcatggcatatacatgccattggatgtcaatctgcttcctcctctatacctcatctatgccgataaccccagtgactctggcaaggtccacagcactgttagacaaagatggctgtcaggtgatgattttataacatcacgtatgaaggaagtagcgcagctagcgctcgatggccacaaggctttgctgcagaaggattatactgagctagcgatgtacatggtaatggacaatcaagtgcaaatactgttacagcccacaggggctctttcataactgagcatattctgcatcatggagtttcttcggatgctataggaagttcttcaaggaatgcagaatgttttgttggtgcagcaggccaagacagtcatcatgcagcctttaagagaaagtatcttgatggatgtcatgcagagtcttctgctaacggaagctcacgcaatcgtcaccagaataatagtactctgctacctcctccgaccacctgtgaaagttttactatacccaccacgacaaattttagtgttccgtaccatcctgtggagcagctaaaccagagtactaatattgctgcaaattctactttgtctgatcactattcttcatacagtgatccacatggaaacgaattcgtgcgaaatacacggatgcgaataaaccctagtgattatgatcaatcgctgcccagcctattacctgaggggagtttcaggtgctcagcttaccaatctacacagcagcagtcatcatttattccagcgcaacctagacaagttagctcttcttctggttctcatagtcgatctcatgtgcctgctgttactcagttttcacaaaatcttcaccgtcaggacttgggcagattggactgaggaattgggagttcttccacttctggttctacaatactgatacctgcttcacaagatcctggtacaagcttgttgggaagcgattatcctgagccacttttgttaggttctttgtttacagctgattcaacaaatttcttatctgcatctggaagcataagtaaccagcaaaattctggatccagctctagttccatgctcaggcctgctgttaatgttggaacacaagtccctgagttcaacgtatctcagccaagtacaactttaagaggttcatctgatgtgttcaggaggtccttaatttctgctggcatttctcattctagaagttcaagcatcccattgcagcaccgtggaaattcatccacatcacatgagattaggaatcatcagccaggatcaagctctcgtgcacatcagcagcaccccttaagacccggtcattcctctgtagacaggcagagctctggttacttggaccttcagtcttttatgcagaccatagcttcaagggaaggaggcagaccaatgtcagagatccgcaatgtcttcgatcagattcgtcaggggagaaatgcacgattggaggatttgcttctcattgaccggtcacttattatgagacgagctaatttgattgatagacatcgggatatgaggcttgatgtggataatatgtcctatgaggaattgctggcactaggtgaacgcattgggtacgtaaacacaggacttactgaagaaaagattttgagtaacttgaaacaatggaaatgtgtcttaaaatcattggatgatcctccaacaagtgttgaaccatgctgtatttgccaggaagactatgtggaaggcgaggacctgggcaggctggattgtggtcatgacttccacaccgcatgtatcaaacaatggctggttataaaaaacctgtgcccaatctgcaagaaaacagcactggacacctaaaaacatggctgcctttttccttaggaaaaagccggtagcggcagggcaagtggttgccatctaaccacaccctcccatgactagcaaagtatgttacacctttcccatcatcaacatacatgtgggaatctatactataggtggtacatggcacttgcctgaagccaatggctgtagaccatggagttttatcctttgtttttttcaatcttagatttgggatttaaaatttattcaatgacatttgatttacttgggcaatcagcaatatttgctatcatcattaatcgctaatcatctgtgttttttttaacc

SEQ ID NO: 4386 - DNA, 1497 bp, Zea mays
  unsure (1)..(1497): unsure at all n locations
  Clone ID: TF_ZmC26137_1
atccacctaattcggcaggttcctaacccccacccacctcgcccaaattgcaaccttccccgagtgctccaggtcccgtggccggcccccagatcctctccaatcccaatccaagtatcgaacggatcccatcggtggcgctcgagcgagcgagtgcggccggaaccgagcgaagatgggcatctcgagcatgccggcgcccgaggacagcctgctggggttcgtgctgtacaacacggcggcgtcggtggcgatcctggcggggctggtgcgcgccgcgctgctgttcctgggcctggcggcggcggaggacgaggagccgcggcagcaggcggaggccgtgacggtcacggccgtggggcccagcctcgcggaccggttccggagcaggttccggccgtcgcgctacgggcggcgccggggcggggactgccgcgtgtgcctggtgcggttcgagacggagtcggtggtgcagcggctcccctgcggccacctcttccaccgcgcctgcctcgagacctggatcgactacgaccacgccacctgcccgctgtgccgccaccgcctcctgccccccgccgctgccgccgacgaggtgccccggattgcctgattagcgccctaggaattgagagtaggcgtagcactctgcacctcgcagcagcagtgtctctgtacaggtttttttttcttttcctttttgttcgggggagagagaggacagaacggagattgaaggaagaaaatggtggcaacaaagctgttccccctttcgtttctccgaagctctctgttgtctttattcattccaaaagtataatctactcgtatgaaccaagtactcaaaattgtctttgggcttgtgctggggtggacgcaaaaaccactatcttgctgtgaataagggattctataatagtggcacgactagattaccctttcgtatgtggttgctttatttgtgattgtacacgcattgatgtttttaaaagaatttttgggggggaaagtaagaaaagataatcaaaggggtcactttaataagctcttttgtttggctttgattaaaaaacatcanaaaagtctggtggacagcggcgttgggtcttttttagtgccggaaattttctttatccactccaaaccgaaggagagtggatttttggaaaccaagtttattaaaatttttattgttatgaccatttttttttataggtccccacgggatttgtttaatatggggcggtgcgtggtttttaattatacaaanaagggggtgcacgcccaaaaactggtagttctccacaaatttctcgaaacctcaagtatgtgtccgaacctccttctttttattggaatccattctgggtcacaattttgggggtggcgtgggttttatggaaacgtctttctgactggaaatattttgaccgtgttaaaggacagacctttctggtttgtaaaacccaatctccttaataaaaaaacttggtattt

SEQ ID NO: 4387 - DNA, 504 bp, Zea mays
  Clone ID: TF_LIB3245-012-P2-N1-A7
agagctatgacgtcgcatgcacgcgatcacgtaatgcacgcgtacgtaagctcggaattcggctcgaggcaagggacagacgccgctgctctcgtcctgcgctagcaagcgaatcgctggcccgacgccgcggcgggaggtatctcgctttcgatcaggattttggtcggggcgtcgttctccggtgcttatctcatttctatttatcggtgcctcgggttcacggccaaattcgctgctgcgtggggctttggagattggagccaattttatcattgttcctgcgtggagaaaaagcaggatggtttaaaagcagatggaactggcaaaactccacagaatgaactgacatgtagtgtttgcttagaacaagtcatggtgggtgatctgttgagaagcctaccatgcttgcatcagtttcacgtaaactgcatcgacccatggctgcgccaacagggtacatgcccaatctgcaagcaccaggtcagtgatgggtggcatgcc

SEQ ID NO: 4388 - DNA, 600 bp, Zea mays
  Clone ID: TF_ZmC3298_15
gttcccctctctcttccccgtcctgcaggctccaggcgctgctgctctcgtcctccgctagcgagcgaatcgctggcccgacgccgcggcgggaggtatctcgctttcgatcagaaaaagcaggatggtttaaaagcagatggaactggcaaaactccacagaatgaactgacatgtagtgtttgcttagaacaagtcatggtgggtgatctgttgagaagcctaccatgcttgcatcagtttcacgtaaactgcatcgacccatggctgcgccaacagggtacatgcccaatctgcaagcaccaggtcagtgatgggtggcatgccacaggcaacggtgaagaggatgcttcatacatggtgtaagtagctgcccaggagtaggccataggtaactagtagtagatgctaacagaatccgtggaaacgctgttttggaggtgacggtttggacttgcaatctagggatgtggtctaatccctatctatcctaacaaaaaaccgagtgtggaatcagctgtccagtgcactgagttcttgtacaactcatgtttatttctctcattctctgtgatgttgatgcataaaaaggttgctaac

SEQ ID NO: 4389 - DNA, 1068 bp, Zea mays
  Clone ID: TF_ZmC3298_6
tggacgcctttcgagctccggccgggctgctgttagtgctgttcccctctctcttccccgtcctgcaggctccaggcgctgctgctctcgtcctccgctagcgagcgaatcgctggcccgacgccgcggcgggaggtatctcgctttcgatcaggattttggtcggggcgtcgttctccggtgcttatctcatttctatttatcggtgcctcgggttcacggccaaattcgctgctgcgtggggctttggagattggagccaattttatcattgttcctgcgtggagaaaaagcaggatggtttaaaagcagatggaactggcaaaactccacagaatgaactgacatgtagtgtttgcttagaacaagtcatggtgggtgatctgttgagaagcctaccatgcttgcatcagtttcacgtaaactgcatcgacccatggctgcgccaacagggtacatgcccaatctgcaagcaccaggtcagtgatgggtggcatgccacaggcaacggtgaagaggatgcttcatacatggtgtaagtagctgcccaggagtaggccataggtaactagtagtagatgctaacagaatccgtggaaacgctgttttggaggtgacggtttggacttgcaatctagggatgtggtctaatccctatctaccctaacaaaaaaccgagtgtggaatcagctgtccagtgcactgagttcttgtacaactcatgtttatttctctcattctctgtgatgttgatgcataaaaaggttgctgataataaaaataactcaaattcagggggtagaggatgagaaatgattttatgcattattagaatttgtttctactctgtcatgtcacttacatgacactcttcgtctcagttctctatagtaaaatgtaccacaaatatctccgatatcttactaataatagtatacaaatatattttgcataaaaccgaattaacttaattgatatatgcctaaattactattattagaatggaattcaattccaataaaaattaagggctgaagtttagaccattttaactcatttgtttgaggt

SEQ ID NO: 4390 - DNA, 473 bp, Zea mays
  Clone ID: TF_ZmC3855_1
gccgcagcaggaggaggacgcggacgccccgcccgtcctgacaccgctgctggggtcgccggacggcgcgcggccgtcgacgctggccaaccgttgcttcgccgtcgtgttcatggtcttcgtgccgctggtcatcgtcgtcttcgagcggagccaggccgacgtcgtggcctacgcgctctgcctcgccaacatcatcgtcatggtcgtctggctctcgccggacaccgggtcaacggtctcggccgccaagtcgctcctgcgtctcagcgacgacgaggatgaaggcagcgggggcagctccggcgcagaggacaagtgctgcgtctgcctcgccggcatgcgggaggaccaggcgcttcgggcgctgccgcggtgcggccacagcttccacgacaagtgcatcggcaagtggctcaaggcgcacccaacgtgccctgtgtgccgggccaccgccgtgccgaattcgagct

SEQ ID NO: 4391 - DNA, 790 bp, Zea mays
  unsure (1)..(790): unsure at all n locations
  Clone ID: TF_LIB4764-025-R1-K1-F2
attgggtacctcgaggccggccgggtccgatttgccaggtacgtgcgaatttctcgtccctctaccgcgtggattgattaccaacgttgatttggcgaggcaatcgcgggggatggaggggttcgatcgctgcgccgccgattctcccggtccttaggttcattgtgaagttgaggtgggtggtataagcatcgaagagagcatgagcactgccagtggtacaaggcgtgcaccaagaagacagtcgcaggatgggtctgctgataaagtagtggtgatcatcgaagcaacctccccggtggtggggagccgtcgtggaccaccgacccctgttcctggcgcccaaaactcacccattgatgtggaggccatcgaagatgaagttcaggcagtatctccctcgcgagtgcccccaccgaggagggacaggagaaccaggagggaacctataacagtggttgacttggaggttgacgctagccaggaagggaacaaacgccagagggttgtggcagtagatcacctctctcccgattggggagcagggtccagcttgcagccaaatggcgtacaaaccggcaaagagcctgctaaggaggttcccaaggaaccatcttttacctgcccaatatgttggaataagatggaggagccatccacaacgacttgtggncatatcttctgcgacacgtgcatcaaacaggccatcaaggttcagaagaaatgccctacttgcaggaaggggctgaaaatgaatagggttcatcgtattttccttccgaacgcttct

SEQ ID NO: 4392 - DNA, 1841 bp, Zea mays
  Clone ID: TF_ZmC2205_4
cgaggccggccggggttcctcacgccgcctgcacgcctccaaccgaataaccctaagctgccctcgctccgacgccgccacctcgtcgtccgaccgtatcaattcgatggcccgcatctccgccgtcgttgccgccgtgatctccgccgccgttgtcggtgacgcgctgttcacagctcgcctccgccaccgatgcggcggcccccgccccgatggccggcgggggctgccctctcagcgcaggtctccgtcggctgcctctcgaccggtcctctggcgccttttcctccgccgactgtatcgaccgtgcgacgccccgctctgtcgtgctccgatcttacactatctagagccacagcgctaccgcgagctgcaggcgactgttacgcccaggaatccgaacgagggtgtgagcgtgatctacatgacgctgtaggcgttgaccacgtagcgggacgagtggatgacgctacccgtgtcgatagccgttgatctaccagtgccacaaggacgtgcattgggtcggtcgagcgggggccgggatattcacccaattgaaaggaagaagcgctccctacccaccgcggttgccccctttcggcctttccccttctcgatcgaactcgggtccttcggcgacgtgcggatttttcgtccctcccgatgcttcgcctgtatctgtccggggtgcgtggattgactaccggtgttgatttggcgaggcaatcggcggggagggagggggtattaatttcgatcgctgcgccgccgattcccccggtccttaggttcattgtgaagctgaggtgagtgtataggcataaagagagcatgaacactgttagtggtacaaagcgtgcaccaaggagacagtcgcaagatgggtctggtgataaactagtggtgatcgtggaagcaagttcccggggggtggggagccgtcgtggaccacatacccctattcctggcgccctaaactcacccattgatgtggaggccatcgaagatgaagttcaggcagtatctccttcgcgagtgcccctgccaaggaggaacaggagaaccaggagggaacctataacagtggttgacttggaggttgaagctagccgggaagggagcaaacgccagagggttgaaccagtaggacgtcacctctatcccgattggggagcaaggtctagcttgcagtcaaatggcgtacaaaccggcaaagagcctgctaaggaggttcccaaggaaccatcttttacctgcccaatatgttggaataagatggaggagccttccacaacgacttgtggccatatcttctgcgacacgtgcatcaaacaggccatcaaggttcagaagaaatgccctacttgcaggaaggggctgaaaatgaatagtgttcatcgtattttccttccgaacgcttctagttaaggtcgattggctttgtcaaaggaacttctggtaacatataaggctgtgcaatgtacagtgaggatcagaagttcttgggtgaacagcagatagatgtttcatcctagtctgtatcatttaacagcatcactaggagctcattatgaaaacttcctgactagggaagtggatatcagcctcagtattactggcctcttattgcatccgtggttcataatgttatttcgctgttgtatgtattaggttaataccgtggtggattagtgtaactgggatttgcttcattgtaaaatgataatggcgagttgaaacgtttagcatttttggatgcttttgtttgttacgtactctattccatttagccattccaatattctatgctaaaaaaaaaaaaaaaaaaaaaaacccaaacc

SEQ ID NO: 4393 - DNA, 1062 bp, Zea mays
  Clone ID: TF_ZmC2205_9
ccggccgggtccggtcccttcttgaactcctccgctcttatcgaactcagttccgattcggcaggttcattgtgaagttgaggtgggtggtataagcatcgaagagagcatgagcactgccagtggtacaaggcgtgcaccaagaagacagtcgcaagatgggtctgctgataaagtagtggtgatcatcgaagcaacctccccggtggtggggagccgtcgtggaccaccgacccctgttcctggcgcccaaaactcacccattgatgtggaggccatcgaagatgaagttcaggcagtatctccctcgcgagtgcccccaccgaggagggacaggagaaccaggagggaacctataacagtggttgacttggaggttgacgctagccaggaagggaacaaacgccagagggttgtggcagtagatcacctctctcccgattggggagcagggtccagcttgcagccaaatggcgtacaaaccggcaaagagcctgctaaggaggttcccaaggaaccatcttttacctgcccaatatgttggaataagatggaggagccttccacaacgacttgtggccatatcttctgcgacacgtgcatcaaacaggccatcaaggttcagaagaaatgccctacttgcaggaaggggctgaaaatgaatagtgttcatcgtattttccttccgaacgcttctagttaaggttacagccgattggctttgtcaaagaaacttctggtaacgtaaggctgtgcaatgtactgtgaggatcagaaattcttagcctgaacagcagatatatgttccatccagtctgtattatttatcggcatcaccaggagttcatcatgagaacttcctgactagggaagtcgatatcagccttagttttactctcttattgcatccatggttcccagaatgtgttgttttgttaggatgtgaccctcagatggtgtatatgacagtgcaaaacattattttgcaccgtattctgtatcatttatgtagtagagttttaaaatataaatggtgagtaaagccgctgaagatagccttat

SEQ ID NO: 4394 - DNA, 261 bp, Zea mays
  Clone ID: TF_uC-zmroB73070d02b1
gctgtagaacagagcaacccttgcgccatatgcctgggtgccatgggcgccgacggagggcaggctatggccaccttcacggcagagtgctcccacacgttccacttccactgcatctccgcgagcgtggcgcatggccacctcgtctgcccgctctgcaacgcgcagtggcgcgagctgccctccgtgcgcccgtcgcatccactttctatgccacccattctaccatgagcatcaataggtttgatggctcctactcac

SEQ ID NO: 4395 - DNA, 1223 bp, Zea mays
  Clone ID: TF_ZmC36740_1
gcaaaatatgggataacactacacctgtaaacaatgtcgattctgccaatgttgtcctgcagggtggtgaagctccccgcacaacggtcaaatactattaacatggaatgcatccaacaggtaaaaaaacctcaaacccctgccctccacacatacacaacggcgccgtagcctatgtgagtacgaccatgaccgagacgggctttagacttgtgctttgacgtgggacatacaagggggtttttttaaccacaacctaaaattcgctcctagaaggagccaaactcaggacctaaggagggctactcagaccacctaaccaactcagctagaggtcctttcgcagctactgttcattgataagcactgaaacatgtttgctgcagtttattgcacatatgttacgtaagatcacatttgtgttgtctgctgcagatgtctgttatttccagttgcttcactgaaaattgttattatgtttgtaggttgtttggcaagacaacattgagcctgataatatgacatatgaggaactgttggatttgggtgaggcagttggaacccaaagccgtggtctctcccaagaacgcatttcatcgcttcctgtcacgaagtataagtgtggttttttttcaaggaagaaaacacgccgtgagaggtgtgtgatttgccaaatggagtacaggagaggaaatttgcagatgacacttccatgcaagcatgtataccatgccagctgcgtgacaagatggcttggcataaacaaggtatgccctgtttgctttgctgaagttcctggcgaggatcctgaggcaatgagtcaacagttatgaggccaccgggaagttgttgcactttgaagctgagtactgcccccaatgaacgcatgatgtttgcttgaaggcagcttattgtccccactttataattgtgtattagcaccgtattaccaaatgtaggttattgttagatcagatgtatttagtgtttggttcagcgttttgtaacgtaatcaaatcaggaacagagagataccgttacttgcgtttggttggacgaggcccataatgcaaatctataactaaaaaaggctccccctagggggtaaaaaaaaaaaaaaaaaaaaaaaaaaaaaaaaaaaaaaaaaaaaaaaattccgttcaaggaaggaaacacacctttcacggcttgcacggtccctgctgttgtcgaccgtggtgacc

SEQ ID NO: 4396 - DNA, 1804 bp, Zea mays
  Clone ID: TF_ZmC38633_1
ccggccgagaggccctcttcttgccccctacgcagccgcgtgtgccactgtgccgtacaccgtgcacgcacgccgctcctcgcctccctgcaccatggacgccggcgagtgctccacctccaaacctcctcagccctctgccgcctccccgtcctcccccaccgtatgggctaggctggtgcccgccgattctgcgtgcccgacggtggaggtggccgaagacgactccgtggtctgctccctcgttgcgccgccctgcggcggggaggaggtcgcgtggtgcgagatcaggcggaatgccggggacgcgtcgttcgccactattcggaaccttagcttggatgcaattattgttgatggaagaattgtcaaacaagaatgcgtaggcatcaaaccaggcagtgagattgtctctggaccccagaaagaagggcatttaatatatacatttgaaattacagaggcagaggatcatgaaaaaaagaatgtcaagattgttctagatatcgagaatgcaaaatgcagcatatgcctgaatttgtggcatgatgttgttactgttgctccatgcctgcacaacttctgcaatggatgtttctcagagtggttaaggaggtcttcatctaattcacgtgataaaagccagagcgctgcatgcccacaatgtaggacaacagttcaatcagttgcaaggaatcaccgcatgcgtgggcttttgtaggctatattgcaagctttttcctcactacagagatctgatgaggagattgcgttgttagagtcgtatgcttcagttaagtcgaatatggttttgggtcaacagaaaaaccaatcaaggaaaagacgtttttcacgttctagtgatgataccgacaattcagatctaccatgtcctcaatgccgtaatgaatttggtggatttagatgcagcccaggatctgtgcacttgcaatgcagtggatgtggaggaatgatgccagccagatctaacatcagtatatcacaaaaatgcttggggtgtgataaaacgttttgtggggcttattggtattcgcaaggtgtgagttcaagtcattgcaatctgatctgcaaccaggatactttgaagagtatttctcagcgacatatctctgcacttcctgacacaattcatgggggcaatccatatgaaaaagatattacagaaagatgtatacagcaatcaggcaaaacattgcaagttgtaatctcagagtggatatcaaaatttgacaacatggaaattgatcgttcaaggttgcaattgaataatgtggatgcaattacttccaggacatatatctgcaaccattgctacagcaagtttgttgatttcctgctctactggttccgtgtatcattgccccaaaatcttcttccacgagatgctgcggagagggagagctgctggtacggcttcatgtgccgcacccagcaccatcggcctgaccacgccaagaagctgaaccacgtgtgtcgcccgacaagaggcaaccagccctagcctccggcacaaagtagaaccacatgtaacgatgtcacgtgagacttgactgtttctgtgaccattgtcatcaccatccattgtatgtgtgtgtcatcaaaatggtcaggaagtgtggcgtccatgtttggaacccttttttggtttgatcctggctggacctgacaaggaaattatattgctgctggtgccggaaccgccgctctgtcggcaggtcgggggggatggttgaattgaatgaaaataccccaggctagtttcacaaaaaaaaaaaaaaaaaaa

SEQ ID NO: 4397 - DNA, 636 bp, Zea mays
  Clone ID: TF_LIB5116-043-A1-PF1-G8
ttatcagcgaccttgtgcacttgtctttatatatgctattcttcatagcgatcttcctgaactatggtgtcccactgcacttgattcgtgagctgtatgagaccttccgcaacttcagaattcgcatttcagattatgtgcgctacagaaaggtgacttccaacatgaatgaacgctttccagatgctacaccagatgagctcgatgcgagtgatgtcacatgtattatttgccgtgaagagatgaccacagcaaagaagctgctttgtgggcacttgttccatgtacattgtttgaggtcatggctacagcgccaacatacttgcccaacatgtagagctccaattatccccccagataatggacgtgcagcatcagcacaacagcatggagctcaacctggagttcagcctggcactggtactccaagttcaggaggagcaccaactgagaacgtgaacatgcgtcaattaaaacttgaggctgctgcttcagctgcttccttgtatgggagatcatttgcttatcctccagtgaacactttgaataggcactcaggacctctgcacgcaacaccaagtacctcacaatcaggagaagcaagtacttccactggccatccattagaacctcagc

SEQ ID NO: 4398 - DNA, 636 bp, Zea mays
  Clone ID: TF_ZM4578.C2.o3.fg
atgagctccggcgggacgccgcccgtggggctggcaccggtggacggcaactccggcggcatgttcagcaccgaccgcatcggcggcttcggctacggcgtcggcgtctccgtcggcatcctcctgctcatcaccaccatcacgctcgcctcctacttctgcacccgggcgcccgtcgacgcggcgggggaggctgctgctgccgccgccgccccgtcgtcgtcccggcgccacggcggcggcggcggcggcggcgaaggggcgcaggcgcacgacgtcgagctcggcatcgacgaggacacgctcaaagggtacccagaggtggtgtacgagaaggaggccaaggccgccgccgccaacaagaagggcaccacgtgcacgtgctgctccatctgcctcgacaactacggcgacggcgaggtgctccggatgctgcccgactgcggccacctgttccaccgcgagtgcgtcgacccgtggctccgctaccacccgacgtgccccgtgtgccggacgtcgccggtgccgagccccatgccgacgccgctcgccgaggtcacgccgctggcgatggccggtgtaattgtaaatttgggatgggctcaggcgctcagcgtattttccatttctccttga

SEQ ID NO: 4399 - DNA, 1214 bp, Zea mays
  Clone ID: TF_ZmC21544_4
cattgggtacctcgaggccggccgggctttttgactctctcaccagggcttgctgctgcttgcaacctcaccctcctctccgggagagcctctcgcctacagctccccagctgcccttccacgccacgccgaccaaggcgccaaaagcaaacgctacgccagtacgtggtgagggagcttgtcacggctgcgttgcttgccacctcgtcttcgcggaggtcctcgccgcgacgacgacgatggaggttgccgaggcgcccgacgaggacggcctggacgagcgtggcgtggcgctgcacctgcacctcccgaggctgctggccggcgtcgtctccggtgccctcactggcctcttcgctctcgctggagctctgacgggggcggtcaccggcgcggtggcgggcagagcttccgacagcggcgcgttctgcggggagctgggctgggggcggtcgccggagccgtcctctccatcgaggttctcgaggcttctcgcgcctactggtgctcggaccggctgcggctgggctcgcacggcgcgtcgtccatggctaatttcattgagcagcttcttcgtgcccggtttgtgcaagagcagtttacaacttcaggatatgcatcatatcgctggcaggtgagcatatcggattttggtcacgatgacctatacgacatattcggggacatctcatcgaaagggctcccacaagagtcgctgaagaaactaccacactatgtggtcactgaccagacgcgcgcggactcgttcggccagatcctgtcctgccctatctgtctacaggacatcgtagccggcgacacagcgaggaggctgcccagttgctcccacactttccaccagccttgcgtggatagatggctcgtggatcgcggatcgtgccccgtctgcaggcaggacgtgtgagatagccagataggtgatcgacctgagtagatggagcaatagctgggtgatgcgaaatgtttgctcctacactaagttcatatatatagctactagagagaagatgcgtactgtggtgtaaattagcagagaatctgcctgtcctgttccactaccagccagcgtaaacggccgtgcgcatcggacttcgtttcttgcacccggttccaacgtgtaatgaaataataacactgctgttgggaagcagtactacctgtttctgtaaaaaaaaaaaaaaaaaaggccccta

SEQ ID NO: 4400 - DNA, 576 bp, Zea mays
  unsure (1)..(576): unsure at all n locations
  Clone ID: TF_uC-zmflteosinte051b01a1
ggaacagaacaggcagattgtgtgctaatttacaccacaggacgtatcttctctctagtagctatatatatatatatgaacttagtgtaggagcaaacatttcgcatcacccagacccagctattgctccatctatctggctatctcacacgtcctgcctgcagacggggcacgatccgcgatccacgagccatctgtccacgcaaggctggtggaaagtgtgggagcaactgggcagcctcctcgctgtgtcgccggctacgatgtcctgtagacagatagggcaggacaggatctggccgaacgagtccgcgcgcgtctggtcagtgaccaatatggggggtagtttcttcagcgactcttgtgggagccctttcgatgagatgtccccgaatatgtcgtataggtcatcgtgaccaaaatccgatatgctcacctgccagcgatatgatgcatatcctgaagttgtaaactgctcttgcacagaccgngcacgaagaagctgctcaatganaatagccatgaacgacgcgccgtgcgagcccagccgcagccggtccgagcacagtaggcgcg

SEQ ID NO: 4401 - DNA, 1773 bp, Zea mays
  Clone ID: TF_ZmC21204_1
ggaagaattcgagtccaagtcttggagctctcgcattaggcctcgaggccggccggggttgttgaccgccgctggagactgaagggaaagaggaggaagaattcgagtccaagtcttggagctctcgctttaggtgaagtggatctgacctactgtaggggaaagagcaaagtacattatcttgtacaaatgtgcattacgctacctttatcataaaccaaatcatctctgtttctgggaacagcaaccagtaatttcccatgcaacctcttggttgatggatgttcttcctgttgggtcagaaagagaaagtcaaacagatagtcaccctttactcatggagcatgcgattggcatcccaaggcatgatgttgcttctacttcgacacctcatcgagacaataatgatggcatggatcaactgccccgtgattcagaaagttcttctggaacaactgatgcatcttactctccgaatgctcctctagcaaggagagatgataatcgccttcggcgtcagcaaagtctaaattctggcttctggatatcaattgaactagctgtaaatcttagccagattatagctgctatctgtgttctgtctgtgtcaaagaatgaacatcctcatgctccattgtttgagtgggtcattggttatacaataggctgcattgcaactcttcctcatctatactggcgctatctccagcgcaaccagctggccactgtgcaagggtcaaatcagaactacgttccagacaacagctttgagagtagttcttttactgggatttcgccccctcctgtgtctgaagctggtgttgtaactgtatcaaatggagtcttgagaaacaatgtggttatcacaaatccaagggcccaagcttttgctgatcacttcaagatggcgctggactgcttcttcgctgtatggtttgttgtgggaaatgtgtgggtgtttggtggacattcttccgcccatgacgcacccaacctgtacaggttgtgcatagccttcctcactttcagctgcattggctatgcgatgcccttcatcctctgcgcgctgatatgctgctgcttaccctgcataatctccctgatgggcttccgggaagatctggacgaaaacagaggtgctacttcggatgcgatcaacgccctgggcacatacaggttcaggtcaaagaagcctcgtaacggggaggcaaacgaaggtggcggtggagtctttgctcctggaacggacaaggaacgcgctgtttctgctgaagacgccgtttgctgtatctgcttggcgaggtacgtggataacgatgatctccggttgctcccttgcgggcacttcttccacaaggactgtgtcgacaaatggctcaagataaatgcgctgtgcccactctgcaaagctgagatcgacgtcgtcccgaggaccgctcctccagccattggctttgggcgccgcgacagccacaggagggtaggaaacgacattgaatcacaacggcttccatgatgtatagtgagacagcaacttgccttgggcgtgtgtgtggcttccagaagagcaccttgtaaattatatagtgagagatagaaagagattatgtcatggaccaacgagtccttacatgatccagcaagtaatcgcctgactgaaaatatgtcgttgttgtcaatatgtgtgaatgtgtcccaaaaaaaaaaaaaaaaaactctccaaaatgtaccttgtcatagctaccgtgacgtcaattaactaatctattttat

SEQ ID NO: 4402 - DNA, 1299 bp, Zea mays
  Clone ID: TF_ZmC483_1
cattgggtacctcgaggccggccgggaaaaggagggaggtcacgtaaacttaatccaatccaccaaaccccaaatctctgtctcgcgctggcgcagcgcagggcaccgccacgcgcgcctcatccggtaccggcatgacgagcgcctccgagctcttcaccgcgcgccgtgccgcccgtggggcccgcctctccgacctcgacctggatccgcacgccgacgcgctccgggaccagcacggacttggcgcccggcaccggcgccgcgggtgccgcccgcgacgccagctcgacgccgccggggacgtgcggcagcacctgcacaccggggccccgccaccgcgtcgccgcgggtcgtacaccgatcagatcttatcgtacatagacaacaacaaccttggggttggggattctgcagctcggaggaacagacttgataggctgatgttcaggacaaatgagcggcttcctggtgctgtactgcaagcacaagcgcgtgtcctggagagactcagaggcatttctcttggttcatctgcgtccaggccatccatctcattagatgaattttcagctagcgatgtattcagaatcatcgacttcagaaacagggaagcacggcatgaagcaaatcggcaccactcatcgtcgttccacccaagcagtgaatcagatgaagaaagaccaaccgtcagttccactcactccaaccggtcaaccggacttaccaaggcggctttcctgcgtctgcaggtcgagatttttgaggctagcaaagatgatagcagagaggcatcgcctgaatgttctatttgccttgatggattttacgatggagatgagctgataaggttgcgctgtgggcacaggttccactcgacatgcttggagccatgggcgcggaaatgtgcagactgcccatactgtcgaacgaacatacggtcacgatcctgacgacaaacccttagttcagaataagcttataaccaccatggagtttcactgttgtaaaattcgctgttgtgggcatgccagttaatccggtgctcctatggcgacatgtaatttctaatatcctgaatattttgtgttgtgtcgctcagagaggtttatggtgttgtgtgcgagtggaggctgatagcagtatagcttagaaagcacccttttgtgtgtatgtagcgagggatcacgcaaatgatcctgtactactcatgataatgttctgatgtctgaatttcagttgttactgcatgcttcttgttatggagggtgaggaacatgactttgctatgatgcggtt

SEQ ID NO: 4403 - DNA, 629 bp, Zea mays
  Clone ID: TF_LIB3354-120-Q1-K6-F6
ttcccgtgtcccgtagtcgtctcctctccgcttcgctcatcagctgcgcctgcggcgtcgtcagccagcggcaagaaacaaaagcgccgcgataagtccgttcgttgaaggcaggcagccatgatccctaggccgtcctcgcggttcctcttcgttgccgcgtccccgctcccgcagcgcggcctgcccgcctccgtcctgcaatccctccccgtcaccgtctacggctcccccggcggcaaggacaaggacgcgctggagtgcgcggtgtgcctgtccgaggtgggcgacggcgagaaggtgcggacgctgcccaagtgctcccacgggttccacgtggagtgcatcgacatgtggttccattcccacgacacgtgccccctctgccgcgcccccgtgggcgacctcgacgcgctgccgcgggaggagccctccggcgcgccgctggagttgcccgtgttccccaccaacgtcctgttctggggcacccacgacgaggtcaccaacgccgggctcgtcgcgccgccgcgcgccgccccgtcggccagctcctcggcctccgggcgcaggaaggagaacctggtcatcgacatcccgacgcgggccgtggccacgaccacgaccacgcc

SEQ ID NO: 4404 - DNA, 1175 bp, Zea mays
  Clone ID: TF_ZmC9505_2
cccacgcgtccgcccacgcgtccgcccccgtgtccgctggcaagtccggggtgctcctcgccgccgtcatcttcctcttcatggtcgtcgtcttcgtcttcctcctctacctctacgccaagcgctacctgggcgcgaacccgctgctggcgccgtcgtcgccgtcctcgcggttcctcttcgttgccgcgtccccgctcccgcagcgcggcctgcccgcctccgtcctgcaatccctccccgtcaccgtctacggctcccccggcggcaaggacaaggacgcgctggagtgcgcggtgtgcctgtccgaggtgggcgacggcgagaaggtgcggacgctgcccaagtgctcccacgggttccacgtggagtgcatcgacatgtggttccattcccacgacacgtgccccctctgccgcgcccccgtgggcgacctcgacgcgctgccgcgggaggagccctccggcgcgccgctggagttgcccgtgttccccaccaacgtcctgttctggggcacccacgacgaggtcaccaacgccgggctcgtcgcgccgccgcgcgccgccccgtcggccagctcctcggcctccgggcgcaggaaggagaacctggtcatcgacatcccgacgcgggccgtggccacgaccacgaccacgccgccgcccgccaactccccgctgccggccagccggatgcccgggagcgccgacgagatgcggtccccggtgtccgccaggctgcggtcgctgcgccggctgctgagcagaggaaagcaggccatggtcggcacctcctcctcctacagcccgcgcgacatcgaacaggggctcgcggggggcgaggccgccgccgccgccaccgcccgcccgccaaagactccgaagacgcctccgtcggcgcacgcgcactgatccatccagatcccccccatcccgagctctgctccgggacgcatttggcccgactcgccgatcgccggagcgcgcgcagcgcatgcgttcattctttcttcttcccccttttttttcttttacctttcatgattcgaaaaaggagttttttggttcgaaaattcctatgtaaacagaggaaaatattggtgttgattggttgccgttggtggtggggatgaatggtgaatttgttcatatgttgatcaggagtctcttttcttg

SEQ ID NO: 4405 - DNA, 609 bp, Zea mays
  Clone ID: TF_700577710_FLI
agctagtgttgtagagcttgaaactgttgttgctgctttgtgaggcggttcatgatggaccagttggtcttttacgaatcaagagcagcagccgctgacccccacagggacatgagactggacatcgacaacatgagctacgaggacctgttggctttgggagaatctatgggcaatgtcaacacaggcttggccgatgagaaaatttcgaagtgcgtgaaagaagtggtctgctgcagttccgaccagacgcaaaccgatcaagatgaccaggatgacggaagctgcgtcatctgcctggagggttacagagacaaggatatgctggggatactgaaatgcaggcacgacttccacgccggctgcatcaagaagtggctgcagacgaagaactcgtgcccggtgtgcaaagccgccgccgcctaggacgacaccagaggagcgagcaactattttgtgctcctcctcgatctattcatttttttaggctcaggtcgaattatatatgtcgttccattcttttgattccagccagtcgtgtaaataaatgccgtgtgttggttattttagttatcacttgggttacattagcccaaattctcctgttgc

SEQ ID NO: 4406 - DNA, 849 bp, Zea mays
  unsure (1)..(849): unsure at all n locations
  Clone ID: TF_LIB4974-022-Q1-K1-D10
cctcgaggccggccgggccgggagttataaaataatgtcctactcctaccccgccaccacgccgcggcagcacaagcccctctccgcccccagccagccctcctcagatctcaatcccggcgctccctccctccctcctcgcctcgggacagcgagcgccgccgtccgccgtccatggagcacgacgccgaggcgcgccgcgggttcgccaggatgggcttcgggtgcaagcactaccggaggcggtgccggatccgcgcgccctgctgcggcgacgtcttccactgccgccattgccacaacgagtccacgaaagacgggcacgagctggatcggcacgacgtccaatcggttatctgcctcgtctgtgacaccgagcagccgatcgcgcaggtgtgctgcaactgcggcgtctgcatgggggagtacttctgcgcagcctgcaacttcttggacgatgacgttgacaaggagcagttccattgcgacgattgcggcatctgcagagtaggaggaaaggagaacttcttccactgccaaaagtgtggatcctgctactcgacgacccttcgcgacaggcactgctgcatcgagaactcgatgaagaacaactgccccatctgctacgagtacctgttcgattcgctgagggagacgtcggtgctccgctgcggccacaccatgcacctgcagtgcttccacgagatgttgaagcacgacaagttctcgtgccccatatgcgccacgcccatcttcgacatggacaagttcttcaaggncctcgacgcagagatgggagcaagctacttgtacacgggaaagggatgggtcgtgtgcaacgactgcagg

SEQ ID NO: 4407 - DNA, 2376 bp, Zea mays
  Clone ID: TF_ZmC9878_1
aggcgaagaagaccaaccaaagccaagcgaccgggatctccctctcattccagaggactccgcgtcgccaggcccgcttcgcgtgcgacgccggcatatagggtttcgccggcgccggcgatggacccaccccccgtgagccccgatcgctgggggcccagtcagggcgctggcgtcgggccctccggcctccgccgatatggcctcaatttctccgcctccagcctcctccaggcccccatcgcggccctccttgagtactccggcgtagtccagtccggccctgccctgtcggcgcaccacccgtccgcggggccctcgtcgccgttgtccgcgtcggaggtcgatggtcttctctccgctgccgccgctggggacggggaggtttcgatccggattcagggcggcccaggcgacacggaggccacgggcgggccggatgcggggacctcgtccgaggatttgatcgaggcgaccgccggctctgaggttgaccaggcctccgctgcgggcaggggtgcaggcgctacggatgcggaggcaaacggtggcggggccggcacgtcggggaacgggggcggggaccgcgcgtaccagcgctacgacgtgcaccacgttgcgcggtggttcgaacagatattgccgttctcgctgcttctactcgtcgtcttcatacggcagcatcttcaaggtttctttgtcacaatttggattgctgcggtaatgttcaagtcgaacgatatattgaggaagcaaactgccttgaagggcgagagaaaaatatctgtactcattggtattacagtaatcttcatgattcatgtgtttggcgtatattggtggtacaggaatgatgatcttctcagacctttgttcatgcttcctccaaaagatataccaccattctggcatgcgatttttgtcatcatggtcaacgatacaatggttcgccaagctgcaatggctgtcaagtgcatgctgcttctgtactacaagaactgcagaggtcgtaactaccgtagacagggccaaatgttaacccttgtggagtaccttctgcttctttatcgtgctttgttgccaacttctgtttggtatcgtttctttctgaacaaggaatatgggagtctcttctcatctttaaccactggactgtatctgactttcaagttgacttcggtagttgaaaaggttcagtcattcttggccgcggtgaaagcactgtcacgtaaagatgtgcattatgggtcttatgcgactgcagaacaggtacttgctgctggtgatatgtgtgccatttgccaggagaagatgcatgtgcctgttctccttcgctgtaaacatattttctgtgaagactgtgtttccgaatggttcgagcgagagcggacttgccccttgtgcagagcattggtaaaacctgctgatatccggtcatttggtgatggttctacaagtctattcttccagttgttctagactgcaagcggtaaaatcctaacataacaatggacgagctattgcatgaaaactcgagtggaggtccttttaacgccatcatgtgaaaccatcttccgcaatgttgagatcaatgtgagaaggttcatgacagtcacgacagtgcagtcgttatttgtttatatattcaaccaaatagtttacagagctttttagttgcaacagaggcaaaatgtttccagcagactgctttcagagcctttagaactctgctggacaaacaatttgatcgttgaggtctgctgagccgacaaccgtatgcctcctgtaaaattctggtatttttttttaattttttttttgcatatgtgggcttacgtgggtgtaactgaaatttgaaagtaccgcttgcacagcaagaattgccggtgggggttgaaagtggtaaatgaatgtaactgtaaagcgttgttacatgaagacaaaaatttccacccgttgcaacatagtaaatgctgacagacgcgacttgtgtacttttttattaaaatataaaaaattctaaaaaaagtgctttctttttgacacacaacagtgcacttgctgctggtgatatgtgtgccatttgccaggagaagatgcatgtgcctgctctccttagctggaaacatattttctgtgaagactgtgtttccgaatgggccttatcattttgtgaagaagcatttggatcgcgattcattaccacccctacgtgtgagttatcttaggacaaggcgcttcatgggggagcgaggggtgcttgacaggagtgaggtcaagccttgctaccctggagctgagagtgaaagagataaatactggcaagaccaactttgtcttgctttatttatggttcgagcgagagcggacttgccc

SEQ ID NO: 4408 - DNA, 1447 bp, Zea mays
  unsure (1)..(1447): unsure at all n locations
  Clone ID: TF_ZmC279877_1
cccaaaaaaagcgagctttctattgtggcgacgtgggggaggggtgtcggcagaagttcaaggggtacgatgcagctgggacgataaggggaaaattacgcaaacattcttgtgttattgttgcgggttangcaggcttgtgaccaccctcttcttttgaacgggacatgaatcagatctaggtgaggggaattccatagaaaggggaaagcaacttcctaaggaaacagtgacaaatttgcttgaaaaggtggaaaaaggcgcgggaatttgttccatatgcaatgatccacctgaggatgctgttgtcacgacatgcggtcatgtgttctgctaccagtgtgtgcatgagaggttaacaagcgacggacatgtttgcccctatgcactctgtggaaacaagctaagttttcgatctgtttttacaccagcggtattaaaactctgtatttcgccaaagccggagtttggtgaagaaactagctgttccacagcagccgacaaaccatcctcgatctgtgaaagcagttacatctcctcgaagatccgggcagcagtggaaatacttaattcaatcatcaagacacctgcccttacagcgggggacactactgaatcgattcccagcatggcaccccctgtcaaggcaatagtcttctcccagtggactggcatgctggacctgctagagctttcactgagcagaaatggtatacagtttaggaggctggatggtgcaatgtccctcgacttgagagaaaaggaagtgaacgggtttaaaactgatcctgaggtgagagtaatgcttatgtcactgaaggctggcaatctgggtctaaacatggtagctgcttgccatgtgatcatgcttgatccgtggtggaatccttacgctgaggaccaggcggtggacagagcacacaggatcggtcagacccgtcctgttactgtttcacggttcacagttaaagacactgtggaagaccgcattttggctctgcaggagaagaagagagagatggtggaatccgcgttcggcgaggacggttccagaggcactgctaccaagctgacggtggaagatctcagatacctcttcatggtgtgatggcagcttgtgatcatccgtagggctgatgacttttgttgtgacaatcctaacaaataggctagggtagacttgatcacagtacttggcaccgcagtttgtgcaaaagtagtaggcatcttgaagctgaggtagcgtgtgtttatgttaatcccctctaatccgcttcagtccatcgcatcagtaacggtctaaccaaacagtcctttcgangttctgttgacctgtattcctgtgggatggagctcgtcctgctcggcaagctggttaatctgggagtttaaaggaacagctttaaggcttgtttggtgattgagtatcaagctggttaatctggac

SEQ ID NO: 4409 - DNA, 1212 bp, Zea mays
  Clone ID: TF_ZmC18703_1
gccgccgtgctctcgtcctctgccgaggagagccccgtcaagccgctccgcctgtgggtcgtcgggtacgccgcccagtgcctggtccacgtggggctcgtctgcgccgacacccgcggcgagacgcggggcgcccggagatcggcgtatgactgtgcgtcctagatgcgctgggacagacagctctgacgccgacagcgaagatgacgaaaggggtctagggaggagcagctatacaggtcgtggcgagtcgatgaacacgttgatatcatttctgtaggatgctattggttgttactgtctatcatcatacggagatggagctgagttagctgctctcccttgcagacatcacttccactggagtcgtattaccacatggtgttttgctgtgttttgtgttgctgtggcctgtttgcttgggattgcactgtgttgctgcttgccttgtgtcattgctattctgtatgctctggctggccaggagggtgcatcagatgcagatattagtgttcttctgagatatagatattctgatccaagcgaagatggtgagaagggggtcgatgaaggactgatgatccctatcctgaataatagtggaatgtcaacaagtgagcgtattctccttcgcgaggatgctgaatgctgtatctgtctatcatcatatgaagatggagctgagttatctgctctcccctgcaatcatcacttccactggccttgtattaccaaatggctgcgcatgaatgcgacgtgtccactctgcaagtataacattctcaaaggcagtgacagtgcatgaccaacttattctgacataacttccgtacacagcttcctttcaagtggcgttctcaaagcaatgctgttttcacagctgtgttattaagtgacagtgatctgtgtttttctgtttaggatgtggtgataacctgtagatggatgaaaccttatttacaattgtccttgttaatatcgcttgtaaatacctttcgagttgttttctacgtatgatggaattggaattgctgaaaaactttgtgattctggtttgactttatgcaaaaaaaaaagcaaaatttttaagtgacagtgatgtgtgttctgctgtttaggatgtggtgagtggtgacaacctgtaaatggatgaaacctaactcagtcaccctaatatcgtttgtaaatatctttggagttgttttcaaaaaa

SEQ ID NO: 4410 - DNA, 589 bp, Zea mays
  Clone ID: TF_LIB4764-042-Q2-K1-E12
ggcgcctcaggggcaggtctatctcgcccacgtccacgtccacgaccatcagcttggccaccggcccgagcccaacagcaggcgccggctccagctccggggagagggacagggacagcgacgccaacatctccgacccggagaagctggccgtggaggcgcccccgcccccgcccccgccagccctggtttactccgcggtcgggaccaagctggtgggcgccgcgatggagtgtgccatctgcctggccgagttcgcagacggggacaccgtgcgcgtcatgccggtctgcggtcacggcttccacgcgcgatgcatcgagctctggctcgcggggggacgccgctcctcctgcccgacgtgccgcgcaccggacggagctgccgcggccacgccatcgtcgtcgtgaataatggctcgatttggccatggtcagttgcgacgatgttcactgttcttggcacaggcgcacagctagcatgtgtcggttcggcgttccttcattttcagattgcgtgctgcagaggatccttctatatattctaatatactgtgtccatatatcccgcaacaaactaaatagcggcc

SEQ ID NO: 4411 - DNA, 1784 bp, Zea mays
  Clone ID: TF_ZmC11659_1
actagtttctttcttttgtgcgcgcatccactccaccaccacctgcccccgaccaccgaaaaaaggtccaagaattcgaggacacctcctcctcctcctcctccacgatggccatgccaagatccttccccaaaccgtagcctttgtttgttcccccaaaaggaaggatttcattccttgccgttccatcgttccgacttgccgtcaagcaaatgcgaagcgtctcgcctgtgatcttcttgcaccttgccgagctgtgcgactgactggttgatccaggctgtacatacatagggtcaattaatgagcggcgccaattcttcgttgccgatgccgccaccggcgcccgctgcgtcggcgctcgacaacgtggaggccaagataagccccagcatcgtcttcgtcgtggccatcctggcgatcgtcttcttcgtctgcggcctgctgcacctgctggtgcgccacctgctgcggctgcggcgccggcgccgccgcgcgcgggaggacgcggacagcgtcacggcgttccagggccagctgcagcagctcttccacctgcacgacgccggcgtggaccaggccttcatcgacgcgctcccggtcttcctctaccgcaacgtcgtcggggccgcgccgggcggcaaggatccgttcgactgcgccgtgtgcctgtgcgagttctcgcccgacgaccggctccggctgctgccccagtgcagccacgcgttccacctcgagtgcatcgacacgtggctgctgtcccactccacctgcccgctctgccgccggaacctcctcgctgatctctcgccggcgtcgtccagccccgtcgtggtggtgcagctcgggtccgggagcgcccgcgacatggccgcgtcggcgggtggtgccacccacgacgatgccgacggcggcgagccaagcgaccgggccacgccggcgcaggagatggtcgaggtgaagctggggaagttcgtgtgcgtcgaaggcaacagtgacagcgcgagcgccaccgccacggacgcagcaggcaccagcggcgacggcgacggcggtgccagtgcagaggaaggtctcgggcagagaaggtgccactccatggggtcctacgagtacgtcatggacgaccgcgcctcgctccgcgtggcgatcaagccggagcccaagaagaagcccgcggcctccaagtcgcgccgccgaggcgccatgtcggagtgcgagttgggcgcgtccaagcgcggggagacctcgctccgcctgccattcccagcaacggtgcccaagcagcagcagcagtccgactccgacgcgaccatggcgaagctcgccaaggacagcttctcggtgtcgaagatctggatggtgccgtcgtccaaggaagaccccgacgcggccggcgagaggcgcacggtgtcgttccggtggccggtgaggagcaaggacgagggagacggcaggaaccggaagagcgggagcgaggccgactgggacgtggaggccgggagcggcggcggcggcaacagcgccgcgtcgtcgctggcggaggagaggccctccttcgccaggaggaccctgctctgggtcgtcggaggccggcaacagagcagagtcgggagctgttcatgatcggcgcaccactgtttgaagacacacaaaacacacacaaaacaaaggcaaaggaattcttttgtgctcttttggcacattggtaagtgcgagtagtgattgcaatagctagaaatttgtaaaacaggaaagactctgaaaaaatttctttctttcgc

SEQ ID NO: 4412 - DNA, 1881 bp, Zea mays
  Clone ID: TF_ZmC22803_1
ttgcacaccctgtctctacagtctctctctctctctctctctgctgcgcccgcggctattaagcccgatctggatgagtcggtgagggagtgcgacgaggagagccggcgacatctaatcactggcgagggtcctcactttgagcgacagaaaggtggcgggcatgacggaactatatggcacgggcttagaaatcaattgaaaacgcggggttggcaatttgggcctggtgaaggtcctgatgtgggcgctcgaattccgttgctgtcgcagggaagcgaggccaagggagcggagcggggcttcggctgggttccgcgcgcggccgctcgctacttccagtgttccatggtgtgggtgtgggcggctgtggcgatagccggagcctgaagcggcgggtggtgtgtggtgggcgcaaggagccacacggagcaggccgccacggcgaggaggaggaggaagaggaggagatggtcgtctgctccacgcgcaagtcgttcaaggactcgctcaaggtgctcgaggccgacatccagcacgccaacaccctgtgagtgcccccggccccgtttccatcccggccgccccgaattcacgctcgccgcagctgccgcctgccgcagatcgatctccgcgggctccgcccgccccgattccatcctgaccgaaaccggggcggcgaaataaagttgctccagtgggtgggtggggtgggtatgctacagtggcggttgagctctcatgtcatgtcatgtcgtgtcacgccgcgcgcatgagcgagcggtgggcgccgacgatcgggctggcacaccacctgccttcctgacgcgtgccttccctcgtgctgactgctcgctcgctcaaacaactcgacagtgcagcggatttctcgagggactacgacggggcctgcctccagatgcgcatgtcctacagccccgccgcccacttcttcctcttcctcgtgcagtggacggactgcagcctagccggcgcgctcgggctgctcaggatcctaatctacaaggtttatgtagatgggagtaccaccatgtcgacgcacgagaggaaagcgagcatcagggagttttatgctgttatctttccctccctgatgcaactgcccaaggggatcagcgacgtggacgaccggaggcagaaggcggcgtgcacggagaggtaccggaggagggacgaggacgagggcaagaggccggtttcggaggccgacatcgaaagggaggaagagtgcggcatctgcatggagatgaacggcaaggtggtgctgcccagctgcagccatgccatgtgcatcaagtgctaccgccaatggcgatcaagatcgcaatcctgccccttctgtcgggacagcctgaaacgagtgaactccggggacctgtggatgctcaccgactgccgggacgtggtcgacatggcgacggtgacgagggagaacatcaggcgtctgttcatgtacgtcgagaagctgcccctcgtcgccccggacaacatcttctacgcctacgattctcatgtaaaatagctggagctagctgtagtgtagcagcacaccatctgtgctgtgctgtgctgtgctgtgttgtgttctgagagtgatgacgcatgatttatcgattattcatgcagaggggtagagggtgttcctcgtcctagctaggacgtggctaaacgcttggaccggggtgcggactctgacgacagacctttttcagtctatctaactgggtgtacagtctgctcaggtcctgtaaatataatgtctgtgcatatttatggcttcaaatgccccgttgtttttcagctggataaaaatgtgtctcccataaaaagccatagagttgcacagacattatatttaca

SEQ ID NO: 4413 - DNA, 1003 bp, Zea mays
  Clone ID: TF_ZmC22803_3
agcgtccgcggccgcgtgggctgctccagcgcagtcgttcagggctcgctcaagtgctcgaggccgacatccagcacgccaacacccttgcagcgggtttctcgagggactacgacggggcctgcctccagatgcgcatgtcctacagccccgccgcccacttcttcctcttcctcgtgcagtggacggactgcagcctagccggcgcgctcgggctgctcaggatactaatctacaaggtttatgtagatgggagtaccaccatgtcgacgcacgagaggaaagcgagcatcagggagttttatgctgttatctttccctccctgatgcaactgcccaagggatcagcgacgtggacgaccggaggcagaaggcggcgtgcacggagaggtaccggaggagggacgaggacgagggcaagaggccggtttcggaggccgacatcgaaagggaggaagagtgcggcatctgcatggagatgaacggcaaggtggtgctgcccagctgcagccatgccatgtgcatcaagtgctaccgccaatggcgatcaagatcgcaatcctgccccttctgtcgggacagcctgaaacgagtgaactccggggacctgtggatgctcaccgactgccgggacgtggtcgacatggcgacggtgacgagggagaacatcaggcgtctgttcatgtacgtcgagaagctgcccctcgtcgccccggacaacatcttctacgcctacgattctcatgtaaaatagctggagctagctgtgctgtgttctgagagtgatgacgcatggcttatcgattcttcatgcagaggagtagagggtgttcctcgtcctagctaggacgtggctaaacgcttggaccggggtgcggactctgacgacagaccttttcagtctatctaactgggtgtgggtgtacagtctgctcaggtcctgtaaatataatgtctgtgcatatttatggcttcaaatgccccgttgtttttcagcttggat

SEQ ID NO: 4414 - DNA, 375 bp, Zea mays
  unsure (1)..(375): unsure at all n locations
  Clone ID: TF_LIB3069-029-Q1-K1-D11-TCA
gacctcaccgctnaaggcattcttccnccgcagcgtgatcaacggagcgcactacatctgccacagtggcggccactgccccatggacacctacatgcgtcccatgtgccaggagtgtgggcttctcaaatgccgccaggctgccatgcatcaagagtgtgtcctgtcagaagaacagatccgcctgaataatctgatgctgtaagaggaggaacaggctcatgccacatccttgccccccagggcttactaacccccccaaatcctgccccagttaactccggaacaactggggatgatcgagaaacttatctcttgccagcatcagtgtaacccgggctccttttctgaccggtcttcgaattaacggccttg

SEQ ID NO: 4415 - DNA, 1355 bp, Zea mays
  Clone ID: TF_ZmC3751_3
cccacgcgtccggagaggggaattcagacttcgcatctttgctctgagtagtgaatactgccatactgcttaggcgtttactaccttgcattgttaatggcgttgggaagaccacaggtatggagtacccagagcgccctggacagccactctgtgagtactatgcaaagaatggcacatgcaaatttggttccaattgcaagtttgatcatcccagggaaagtggttttgtacctgtcgctttaaacaacagtggattccctctacgtctgggtgaaaaggaatgttcctattacatgaaaactggacattgcaaatttggaggtacatgtaaattccatcacccagaacttggttttcttacagagacgcctggcatgtacccaccagttcaaccatcacctatttcctccccacatccatatccacatcattccaactggcaaatggggaggcctgctgttgtgccagggtcatttttaccaggcccgtatccaccaatgatgcttccacctacagttatgccaatgcagggatggaacccttatgtttcacctatgaaccaaactacaccagctgggggccagcaagctgttccagcagggccatcttatggcttgtcgcaccaggagccaacctctgcagtgacttatggcagtcattatgcgcaattgtattcttctgggacttcaagcagcaacatacaagaatatgtgtttccagagcggcctgggcagcctgaatgtgaacattacatgaagacaggaacctgtaaatatggagcagcctgcaaatatcatcatcctcaatacttcagtggaccaaagtctaactgtatactgagccctctgggtcttcccctgcgtcctggttctcagcgatgtgcttactacgcacaccatggcttttgcaagtttgggccgacatgcaagtttgatcacccgatgggtactccaaactacagtcttccagcaccatcacttactgatttgccagtcgctccatatcctcacactttctctgttactcctattgctccatatctgctgccccctgatccgcggccgcaattctgactgtagtcggattcagagctccgttattatctcgtgtaacgtgcacaattgcaggggattcgaatgggaaagctgatgggttccatagctctagcccaaatcttttgtttatctcgtcatcttattacatatatgatatgatgtttatctcgccaagcttactaaagtttagtaaggggaaccaagacccttctaacataatatgtaaaacgatttgtgaagcgaggtggctatatatatgagctatctctataatttatacacagccggctccgttct

SEQ ID NO: 4416 - DNA, 835 bp, Zea mays
  Clone ID: TF_ZmC39160_3
gcatagatggctgaacatgtaattggtcttaggagtgctccaatctcgaggatggttatatttacacgtagttccaaatttgcaatcgccagtcctcatataatattgacactcaggctgccctggtcgctcaggaaatccatgttcttgatgattattgcttgattgtccagctgaggaagaatatggcaagtatgtaccgccataagcaattgcggtggaagatccatggtgtcctataccatataacggtccagcttgaacagtttgttgtgctccacctgatgccacatgatttaccgatgccggataagggctccatccttgcaatggaaccattccagatgagatcatcattggagtgtatgagcctggtatatatgatccaggaactgcaggtgatcttcccatttgccaatttgaagcatatgtaaggggggagggcacagatgctgattgtaatgctggatatatgccaggggttaccggaataccaccaaattctggatgatgaaatttacatgtagaaccaaacttgcattgcccagtcttcatatagtaggagcattctttctcacccggacgtagagggaatccattgttgtttaatataacagactgcacagatccatcttgcttaggatggtgatatttgcaattggaaccaaatttacaagtcccagtcttcaaataatactcgcatacaggttgcccttgtcgttctggaaagtattgtgctgctccatttttggcacctccaccaaactcaagtgccgccacgattgcgggggtggttgtaacggcagcgctccccgaaaccgcaggcggccgtggc

SEQ ID NO: 4417 - DNA, 576 bp, Zea mays
  Clone ID: TF_ZmC2870_1
aattcggcacgaggcacagccgactgccgccgccatggaggacgttctgacaccgccgccgcagccggaactcgccggagagaagcgtaagagggaggagagttcgctggatgcgtccatcgaagacgctccatccgcccccgcctccacctgcagcgctgaggatgcggccggcagcgacgtcgcccggcacccgatgtggaagacgagcctgtgctccttcttccgccgccgcggcgccggcgccgaagggtgcagtcacggggactcctgccgctacgcgcacaccgaggaggagctccgcccacggcccgacggcacctgggaccccacctccgaccgcgccaaggagctgcgcaaggtcgccgcggaggcccaggaggaggccgaggaggaggtcacggtggatgagcagtcactcgacaagtgcctcgtcgggctccccaggggctggacggctgataggctcaagtccttgctccaggatcagggaatctcgtatgcaacagcgtgggataagaagggaatgacagttgggttttgggacttttgagagtgggtgacaactaacaaatg

SEQ ID NO: 4418 - DNA, 1815 bp, Zea mays
  Clone ID: TF_ZmC493_3
cattgggtacctcgaggccggccgggattctattcctccacaccgatcactcgctgctcccctctctcgccggagctccgggccggatggcggcggcagcagcagctcctcccgcctccgtgatcgcgtgatggacgcacacaccgccgcgctccgccgatggacgacgccggaaggccaccaccacacgctcccgtggcggtgaccgcctccgcctccgcctccgccaccgccgcgcccgcccctccccaaccctcagccactgctgccgtcgacaggtcctcccccgaccccgacgcgctctatgaagaggggatgtggcaacagatggccatggacagcggtgccactatgcaacctgggtcatatcctgagcgaccaggtgaacccgactgcacttactatctcaggactggattgtgtcgatttggcatgagctgccgattcaatcatcctcccgataggaatctggctattgcctctgccagaatgaagggagaatatcctgagagagcaggacagccagagtgtcagtattatctgaagactggaacatgcaagtttggccctacatgcaaatttcaccatcccagggaaaaggctggaattgcagggagggtgcagctaaacacatcaggatatccactccgcccggacactgtaaatatgcaaatacttgtaaattccaccatccggaacttttcaatgtggtgccttcgtcacgtggttctcctatttatacctctgtacattcctctgcgagtgctggtccgcagtcctatactggaactatgccaagctgggctttcccacgagcttcttttataccaagccctaggtggcaaagtccttcaaattatgcgccgatgattgtacctcagggccttgttcaaatgccgagctggaattcatatactggtcagctgcagtcacctggggctcaacaaacttatggaagttcacaacaaggcgaagctagtacaggaaatcagggaatgctatcaccctacagatctagttcgtttcctgtgcctcaatatgcgctgcagagagagaatgtatttcctgagagacctgatgaaccagaatgccaatattacatgaagacaggagattgtaaattcggtgcagtgtgcaagttccatcatccccgggtgagatcactgccccctccagattgtgtcttaagtccaatgggtcttccactacgtccaggtgaagaactgtgcaaattctattctcgttacggcatctgcaagttcggcgccaactgtaaattcgaccatcctacagtggttgctccaatggtctatgcgtatggtttctccgcgtctgcttcccctgcatccgcttcgactaatgtacctatggcgcgacgccttctgggatccccaccggggtctggatatacatcttaggcgtcgttttttttttcagttgacctacttcgatttataaaatccatggcactgcctcaggcgctgtgaatgtttctcctaacttcctgccgggatcaaagttctgtaaattgagttgctaccggagatgtacagccccgttttttttggttttaatccagatctttgggaataactcccgaaaccgaataaactttggatacagagatgccagttttcaggtgcctgcactatttgacattattgctgcccctatggttccgaacagaggaacagttgaattctctggaggggctgaagcctgcccttgtgcagttgagattatatcatcgcgtcgatttaaaaaaaaaaaaaaaaaaaaaaaaaaaaaaaaaaaaaaaaaaaaaaaaaaaaaaaa

SEQ ID NO: 4419 - DNA, 855 bp, Zea mays
  Clone ID: TF_ZmC5498_5
ccggccgggagtcccgtcccgtcccaccctatcagttgcgggcgcgcgtccctgtttcgctcgtgccgttgcgctgcgccaagcctccccacctctctcgtctcttctccacccgccgccctcgtgggagtgaaaccctagctagggttctgcccgccgccgccttcgatcaagacgcctgcagccttagcgcgagcccgccatggacacaggacgcaagcgcatcgcgccggggggcgccaacggcgcgggcggcccgaagcgcgcgagagcactgcgggttgtccctttggttcaaattgccattttctccataacttcccgggtggctacctggcggtttcaaagatgaccaacttgggtgggccacctgttccggctcccccaggaaggatgcctatgggacctggtggtcctgatgggccaccttcacctgctctgaagactcgcttgtgtaacaagtacaacactgcagaaggatgtaaatgggggagcaaatgccactttgctcatggagagagggagcttggaaagcccctgcagatggacaactcgatgggagctcctccaatgggtccagggccaaacggtcacttcatgccacctccaatgcctatcccagacatggttcctcactccacattcggtgcttcggccacagccaagatcagtgtcgatgcatcccttgctggcgccatcattgggaagagtggtatcaacacaaagcatatatcccgagtgactggggccaagttagccatccgggaaaatgaggctgatcccaccataaaacatcgagctcgaggggacgtttgaccagatcagcacgctagcgcaatggtcacagagttgatt

SEQ ID NO: 4420 - DNA, 1472 bp, Zea mays
  unsure (1)..(1472): unsure at all n locations
  Clone ID: TF_ZmC493_7
ctcgatcgcggccgaggtccatcgtcctcgtccattccgatcactcgctgctcccctctctcgccggagcgagccccgggccggatggcggcggcagcagcagctcctcccgccgccgcgatcgcgtgatggacgccgacgccgacgccgccgcgatccgccgatggacgacgccggaagggcaccaccacccgcgccagcggcggtgaccgtctccgccaccgccgcacccgcgcctaccccgccctccgccacggtcgccgccgacaagtcctccctcgaccccgacgcgctttatgaagaggggatgtggcaacagatggccatgaacagcggtgccacaatgcaacctgggtcatatcctgagcgaccaggtgaaccggactgcacttactacctcaggactggattgtgtcgatttggcatgagctgcaggttcaatcatcctccggataggaatctggctattgcctctgccagaatgaagggagaatatcctgagagagtgggacagccagagtgtcagtattatctgaagaccggaacatgcaagtttggtcctacatgcaaatttcaccatcccagggaaaaggccggaattgcagggagggtgcagctaaacacattaggatatccacttcgcccgaatgaaaaggagtgtgcgtattatttaaaaacaggacaatgtaaatacgcaaatacttgtaaattccaccacccagaacttttcgatgtggtgccttcgtcacgtggttcacctatttatacttctgtacattcctctgcaagcgctggttcacagtcatatactggaactatgtcaagctggacttttcacgagcttcttggggttttttgggagggggtttttttggggggggtttatgtttttttctttttttttttttgggtggtttttttttttataaaatccatggcactgcctcaggcgctgtgattgtttctcctaacttcctgccgggatcaaaactctgtaaattgagttgctaccggagatttacatagcccgttttctgcacctcattgaatggcatgtcgtcttgattatcctgtccccaatggtttttcagggtgaagaactgtgcaaattctattctcgttacggcatctgcaagttcggcgccaactgtaaattcgaccatcctacagtggttgctccaatggtctatgcgtatggtttctccgcgtctgcttcccctgcatccgcttcgactaatgtacctatggcgcgacgccttctgggatccccaccggggtctggatatacatcttaggcgtcgttttttttttcagttgacctacttcgatttataaaatccatggcactgcctcaggcgctgtgaatgtttctcctaacttcctgccgggatcaaagttctgtaaattgagttgctaccggagatgtacagccccttttttttggttaatccagatntttgggaataactctc

SEQ ID NO: 4421 - DNA, 695 bp, Zea mays
  unsure (1)..(695): unsure at all n locations
  Clone ID: TF_ZmC2222_1
gggaagnactactgcgactactgcgacaagcagttccaggacacccccgccgcccggaagcgccacctccagggcgtgcagcaccaacgcgcccgcgccctctggtacgactccattcgccaccaagaccagcatggcggcgcttcctccctcctcctgcctgacggcaccctcgccaagggcatatgccaccacttcgtccgcacggggacttgcaagtatggggattcatgtagatacttccatccgaagccagatggtgccaatccagcattagctgcaccagggcctgggtctgggcctggacccatggtgcagcagtctgattttattgcgaaccaacccaatttcgttggataccagggagtagacataaattcttcctcagggaagatactggggggacacgcctcttggggcaacctgccgccatcactgcaacctcctcctgaaggcggctaccctcccctcccgttcatcgactggggctgaaggggcgttgtctcgctgaaattcgaaccatttagcatttcataccttgattggttgtgctaaatcgcatatacttggagcgcagtagagtaaaggtgatcccagtttattttgatcttaaatttatctctgtaatagatatttacagtcaaaggtacacttcgcagattgcgttgatgtttgaatgaactcacatttgcatc

SEQ ID NO: 4422 - DNA, 689 bp, Zea mays
  unsure (1)..(689): unsure at all n locations
  Clone ID: TF_ZmC2222_2
ctcgccaagggcatatgccaccacttcgtccgcacggggacttgcaagtatggggattcatgtagatacttccatccgaagccagatggtgccaatccagcagtctgattttattgcgaaccaacccaatttcgttggataccagggagtagacataaattcttcctcagaaagaattgtgatgtatgacaagctagatgcttatcatattctcacttcagtcagctgtcatgccatgatgtgagcccttgccacacaatcatcctatttggacattccaatttactccatcatgtgccagcgggtccattggttagtgacttggcgcctaccagagactgatcgtgtgctgtttggatgtttcgaggctatttgattgcaagcggtcctgtcggttggtgcctcaggatgactaggaaggagggcctacagattaaagaccttaaatttgtttggtttggagctgttgtcagcttcatggcctgcaggaaccatgctcctgatgctttctctgaattttgaaatgtcgtgatgctttcaagtgcttaagcttccagggcagcatagggttcaccgattgcaaatgctccatcatgatttatctcgttaggctgttntgggtgaacccggaaaattgagaggatctatgggggaggaatntncnnttactatttaaataggaaggggat

SEQ ID NO: 4423 - DNA, 1245 bp, Zea mays
  Clone ID: TF_ZmC35732_1
gacgagacagatatcgcgcaccaggaggttctgaagggttctaaagataaaagaaaggaaacctttgcagaaggcaacactcaggaggaatgcaagtattattcaacacctggaggatgcaaattcggtaaaacttgcaaatacctccaccgtgagggaaatggagggaaaacagaggttgaaaaagctgagctaaactttctaggtcttccactgcgaccaggtgaaaaggagtgcccatactatatgcgcactgggagctgcaaatttgcgactaactgcaagtttcaccacccagatcctactaatgcatcttcaaaagaaccagggttggaacatgagaatggcgatgtaccactgcaaaatgtccaaggatcctctcagcctagccttcagatgtggcctgaccagagagcattgaatgaacagcatgttccttttcttgctccagcaccgtcatacagtggagggatggttccacctcaaggaatgtatccatcttctgattggagtgggtatcatcaggtacctttgaatccatattaccctcccggtgttcctttcccgcattttccagctgcccatatgaatcacccgatgtacaaggctgcagatataccaggacatcaaccaccaccatctgatgagtatcccgagagacctggccaacctgaatgccagcatttcgttaagagcggtttctgtaaatacaggatgaaatgcagatatcaccatccaaggtcgcgccagtctgcaccaccaccagcaggtcttagccccatcggcttgcctatcaaacctgatcaacctgtgtgcacttactatggacgctatggcttctgcaagtatgggccagcctgcatgttcaaccaccccttcaacttcgggcctcccgtgccggcagcaggaccacccctccctgggcagtaccctacgcatggaaacttcgcctagcaggcacgtgacgagcgattttctgagtcgccacgattgcttgtaataacctcctccacctgtaaagtagcgtagacaaaagctgtacgtggttggcagtagacatccagcatgtaggcgcaacgaagttgcatggagatgggtacgttacagttggtattgcaaactttacgctgtacaagttacagtccatacataagctgccatcgcatttaaaaaaaaaaaaaaaaaagcggccaaaaaaaaaaaaaaaagagagtacttaaaaaaacggccgcgggcccggggttt

SEQ ID NO: 4424 - DNA, 678 bp, Zea mays
  unsure (1)..(678): unsure at all n locations
  Clone ID: TF_jC-zmshLIB3587P032f11b1
cccacgcgtccgcccacgcgtccgcccacgcgtccgcccacgcgtccggcctctccaaccaggcgccactcgccagggcctaggctggtcatggaaggaaacgccgcagccgggaagaggtcccggacggagacggcgaacggggctgccggcggcgggaagcgctccaaagtacgattgggtgcccgtttggtgagggatgtcgttttctgcactttgtccctggcggttacccggcagttgcaaaaatgctcaatctaggtagccctgctgtatctgcgccatcaagaactcatgtggatcacgccgctcttactggcgcctctcattcagcttcgtcaggcaagacacgcatgtgcaccaagtacaatactacagaaggctgcagatttggtgataagtgccactttgctcatagcgaaagagaacttgggaaaccagcgtacatgccttatggagaacctcctatgggcggtcgatttggaggccgacctgaacctgtgcagccagctgccatgggccctccagcaggaaactntggtgcctcggcgactgccaagatcagtgtggatgcgtctcttgccggtggcantattggtaaggggcggggtcaacactaagcagataagcagagttacaggcgtcaagctctgtatccgcgaacacgaatctagcccc

SEQ ID NO: 4425 - DNA, 820 bp, Zea mays
  unsure (1)..(820): unsure at all n locations
  Clone ID: TF_LIB4766-083-R1-K1-H10
ccggccgggaatagtaaatctcttggttttggctaggcttcggattagcaaaggaaattctcagtttttttgtaaaaaatcgtgtggaaattctcagtgagaccagagctgccaacacccaacacgatgcccttggggaagtactactgcgactactgcgacaagcagttccaggacacccccgccgcccggaagcgccacctccagggcgtgcagcaccaacgcgcccgcgccctctggtacgactccatccgccaccaagaccagcatggcggcggttcctccctcctcctgcccgacggcaccctcgccaagggcatctgtcaccacttcgtccgcacgggggcttgcaagtatggggattcatgcagatacttccatccgaagccaaatggtgtcaatccagcattagctgcaccagggcttgggtctgggcctgcacccatggtgcagcagtctgatattattgggaaccaacccaattttgttgtataccagggagtagacatattacatcaaaaaatacatcaagaatctcactgctgtgttggagccagagaaagcggatgagttcaaaaagggtgtcgagggtgcaaccaagtttctccttagcaagctgaaggacctccaattttttgttggtgagtccatgaaggatgatgcgtctgtggtattcgcctattacaaggatggtgccactaatccgacattcctctatttctctcatggtcttaaggagatcaagtgctaggcgtgcggcgaaattagttacccatggtgngtactatctatgtactattattatatccaaaactatagt

SEQ ID NO: 4426 - DNA, 606 bp, Zea mays
  Clone ID: TF_700424071_FLI
cacccttttgaccggtctgcacctcattccaaagaaaacgaggatacacagcagcctgtggcacttactcttgctggccttccaaggagagaggatgctgaggcctgtgccttctacatgaggtctggcacgtgcgggttcggtgcgcgctgcaagttcgaccaccctcctcgccagcgacaactaaaaaaacggaggaagtatcctgtatcaggatgtggtaccatgcgaatcgcactgttaatgcttgatgctgtcactgccatggtgggagcctgacttgtaaagttcagtatcaccggaagtgtttgtcggcgcgtgctggtactaacggtgtaccttcggcggttggatggtgtcaagagtaaaaatacaccgcctgttctcaaactttgactggatgctaatctccaaaatgtgagaaccaagttaccgtaacttgagttaatccgcttgcatggttatgtgatgataaggcgttgggacgtggagtctacatgatggtagggatataggagatcgaatcgcatgttcgcctcacatgttgatgcaatgccaacgtgcaattagcttgtcaacagattaatttagcattattggcatatt

SEQ ID NO: 4427 - DNA, 695 bp, Zea mays
  Clone ID: TF_ZmC292_11
cggacgcgtgggacagcagcctgtggcacttactcttgctggccttccgaggagagaggatgctgaggcctgtgccttctacatgaggtctggcacgtgcgggttcggtgcgcgctgcaagttcgaccaccctcctcgccaggacgatgtctaatacggtgtactccctccgtttcgttttagttgtcgctggatagtacaaaattgaactatccagcgacaacttaaaaaaaccggaggaagtatcctgtatcaggatgtggtaccatgcgaatcgcactgttaatgcttgatgctgtcactgccatggtgggagcctgacttgtaaagttcagtatcaccggaagtgtttgtcggcgcgtgctggtactaacggtgtaccttcggcggttggatggtgtcaagagtaaaaatacaccgcctgttctcaaactttgactggatgctaatctccaaaatgtgagaaccaagttaccgtaacttgagttaatccgcttgcatggttatgtgatgataaggcgttgggacgtggagtctacatgatggtagggatataggagatcgaatcgcatgttcgcctcacatgttgatgcaatgccaacgtgcaattagcttgtcaacagattaatttagcattattggcatattaaagagtttaggccttcaggtatcaggatatacattttggaattttg

SEQ ID NO: 4428 - DNA, 1894 bp, Zea mays
  Clone ID: TF_ZmC292_3
tcctctagagcggccgccaccgccggcggcggcgagacgtcggtgctcgacctgccggagctggccatggattgcattctggaccagcgcgtccgggcggagctgcggagcatggccgccgtctgccgctccatgcgcgagcgctgccgcggcgaccacctctgggagcggcacatgacaaacaggtggggccgtgtcctgggccgcgccgccagggacgaatggaggacgcacctggcgtccgccagcgagtcccgcgccgcgggcggcggcggcggcggcaagcgccggaggtggctcgccgcgctgtcctgcgtttgcccggtggtgtcctggatgcggcccagggccgacggtggcaagtcgtccgcccccgtgctggacgattccatcatgtcgtggtacctgtccgtggagagcggcaagttctggttcccggctcaggtctacaaccgcgagcatgggcatgttgggttcatgatgtcatgctatgatgcagcgctcagttacgatttccatacggacacattccgtgcaaggtacccaccacacggtcgacgaaccgtggtgttggaggatggcgtgcaatgggacagggtgagggcaccgcctgttgacacccttgcgcatgacctgcacacctctgactgcctgcatgagctccggcccggcgaccacatcgagattcagtggagaaggaacaaagaattcccatacggctggtggtatggagttgttgggcacttggagtcatgtgatggaagcgaacacttttgtcggtgccatcttagtgataccgtggtgctggagtttaatcagtacacgccgggctcaaggtggaggcaagcgttggtgaaacggaaggagcatagggaggagggcaacgagggcgacgggttctacggcggcataaggaagctccgcggcaacgatgacatctccaagtggaggcagctgtggccaacagacgtcctggagtaagcaggaaccgcatcccttctcacaccgacattgatccatcgctcaaatgacacgcctttctttcatcatcatattgaccaaattcgtcgtctctgtcgcgctgttgtaaacgggttagtagaagaacaaatcccgtagctggacaagggtgtaacacttactctctccgtttcgttttagttgtcgctggatagtgcaaaattgaactatccagctacaactaaaaagaaacggatggagtatttgttaggcgtaccaggcgcagactgcttcctatttgttcgtggggctgtaactgtaagccttgtttgtgacccctaagcagtctgcgtcttgtgcctgctgctgtagcggtagagcagagagagatcaaatgtaaattacatttttttagctcaaattcacgacaaattggttgtcgaaaacgaggatcacagcagcctgtggcacttactcttgctggccttccaaggagagaggatgctgaggcctgtgccttctacatgaggtctggcacgtgcgggttcggtgcgcgctgcaagttcgaccaccctcctcgccaggacgatgtcctgcccgaccctgatgtctaatacggtactccttctgtttcgttttagttgtcgctggatagtacaaaattgaactatccagcgacaactaaaaaaacggaggaagtatcctgtatcaggatgtggtaccatgcgaatcgcactgttaatgcttgatgctgtcactgccatggtgggagcctgacttgtaaagttcagtatcaccggaagtgtttgtcggcgcgtgctggtactaacggtgtaccttcggcggttggatggtgtcaagagtaaaaatacaccgcttgttctcaaactttgactggatgctaatctccaaaatgtgagaaccaagttaccgt

SEQ ID NO: 4429 - DNA, 832 bp, Zea mays
  Clone ID: TF_LIB4746-091-R1-K1-D4
attgggtacctcgaggccggccggaagtatatacgaggggcagggcccccctcctctcccttcgtccatcgtcctcgtccattccgatcactcgctgctcccctctctcgccggagcgagccccgggccggatggcggcggcagcagcagctcctcccgccgccgcgatcgcgtgatggacgccgacgccgacgccgccgcgatccgccgatggacgacgccggaagggcaccaccacccgcgccagcggcggtgaccgtctccgccaccgccgcacccgcgcctaccccgccctccgccacggtcgccgccgacaagtcctccctcgaccccgacgcgctttatgaagaggggatgtggcaacagatggccatgaacagcggtgccacaatgcaacctgggtcatatcctgagcgaccaggtgaaccggactgcacttactacctcaggactggattgtgtcgatttggcatgagctgcaggttcaatcatcctccggataggaatctggctattgcctctgccagaatgaagggagaatatcctgagagagtgggacagccagagtgtcagtattatctgaagaccggaacatgcaagtttggtcctacatgcaaatttcaccatcccagggaaaaggccggaattgcagggagggtgcagctaaacacattaggatatccacttcgcccgaatgaaaaggagtgtgcgtattatttaaaaacaggacaatgtaaatacgcaaatacttgtaaattccaccaccccagaactttttcatgtggtgccttcgtcacgtggttcacctatttatacttctgtacactcctct

SEQ ID NO: 4430 - DNA, 584 bp, Zea mays
  Clone ID: TF_ZmC292_8
caacagcctgcgacacttgctagcctgccaaggagagaggacgctgaggcttgtgccttctacatgaggtctggcatgtgcaggttcggtgcgcactgcaagttcgaccaccctcctcgcgaggaggctatttccgagctgcaggcagccggaaaggaaggaatagaagggccgagcctcgtccagcgcgaccatgatgtctaatactgtatcctgcttcagtatgtaataccatgtgaatcgcactgttagttaatgcttggtgctttcagtcttgttgggagtctgactcgtaaagctcattatcatcggaagtgtttgtcggaggagtgctggcactaactatttatcttcagttggttgtcgtgttgccaacttgcgatgtcaaggtgcatatttcagtttttttagagtaaaaatgcactttacatcctgccgccaaacttaactatgggcctgtttatggccctgtttggtttagcttttttttaccagcttttctaaaaatctggttgtggaaagaatttgagtatcgtgaagattacatgtggagaagatgaagtggtccaaagggtccatgatct

SEQ ID NO: 4431 - DNA, 777 bp, Zea mays
  unsure (1)..(777): unsure at all n locations
  Clone ID: TF_ZmC1553_10
tgggaccctcgggccggccaggcccacaatctcgcagtcctttcttcctccgacctccgcagcgaatcggaattcggctcagggttccgccgcgcctctttaaccaggcgccgctcgccagggcctaggctggtcatggaaggaaacgccgcagccgggaagaggtcccggacggagacggcgaacggggctgccggcggcgggaagcgctccaaagtacgattgggtgcccgtttggtgagggatgtcgttttctgcactttgtccctggcggttacccggcagttgcaaaaatgctcaatctaggtagccctgctgtatctgcgccatcaagaactcatgtggatcacgccgctcttactggcgcctctcattcagcttcgtcaggcaagacacgcatgtgcaccaagtacaatactacagaaggctgcggatttggtgataagtgccactttgctcatagcgaaagagaacttgggaaaccagcgtacatgccttatggagaacctcctatgggcggtcgatttggaggccgacctgaacctgtgcagccagctgccatgggccctccagcaggaaactttggtgcctcggcgactgccaagatcagtgtggatgcgtctcttgccggtggcataattggtaagggcggggtcaacactaagcagataagcagagtcacaggcgtcaagctctgtatccgcgaccacgagtctagccccaacctgaagaacattgagctggaaggcaattntgaccagatcaagcaagcccgcg

SEQ ID NO: 4432 - DNA, 1106 bp, Zea mays
  Clone ID: TF_ZmC1553_3
cctcggggatctttcgatcgttcatcctttcttctccaacacccgtcgctctcttctccaactcgaagatgtcggccgccaccgccctgcttcatcgaggcccaagacccgatctctgtttttgataaagaaaccaaacaacaacctagcagtcttccttcacttctctgcttccgacctcgtagcgaatcagatcggggggctagggttccggtgcgcctctacaactggacgcgaggctaggctgggcatggagggaatcgtcacggcctgaaagaggtcccggccggagacgacgaacggggttgcagccgccgggaagcgctacaaagtgtggacgcctctctggccggttgcataatcgacaagggtggggtcaacactaagcagagttacaggcgtcaagctatccatccgcgaccacgagtctaaccccaacctaaagaacatcgagctggaaggcaattttgaccagatcaagcaagccagcgacttgttgcgtgatctcatcgcaaccatcagcgcaagcatgccagcgaaaaatccatcttctgctgtggcgccagcaggaggaggccaaggcagtggtccggggggcacgagcagcaactacaagacaaagctgtgcgagaacttcttgaagctatgcgagaacttccaacacgactatgtatgagatattatctcttattatgactggatgagatgtgtcttatggctatagatgagacttttgtggtgtaattgatgagactatagatttaaatgttgttatgtgattgtgtgtgagatgttttatgtgaaaatatgttgtgatatagttgtttatatatttgttatgttttggaatgtggtgttagatttaaatactgtgaagggtgcttgtgttttcggttttatgtgccactttgcccatggcgagttcgagcttcggaaaggtgctgttttagagttgaggtgccaactctaggcatgacatgtcctgtgctctccatttgcttctctgaatttcctccttgtagcgttagacggttagactgtcgtattgcgatttcaatggattcaattgagttcagctttaaggaaacgttaatcccctgtgcccc

SEQ ID NO: 4433 - DNA, 1999 bp, Zea mays
  Clone ID: TF_ZmC3751_2
cagtgcagtgcaggcaggcaggccgagagaagagccggctccggttaatggcgttgggaagaccacaggtatggagtacccagagcgccctggacagccactctgtgagtactatgcaaagaatggcacatgcaaatttggttccaattgcaagtttgatcatcccagggaaagtggttttgtacctgtcgctttaaacaacagtggattccctctacgtctgggtgaaaaggaatgttcgtattacatgaaaactggacattgcaaatttggaggtacatgtaaattccatcacccagaacttggttttcttacagagacgcctggcatgtacccaccagttcaaccatcacctatttcctccccacatccatatccacatcattccaactggcaaatggggaggcctgctgttgtgccagggtcatttttaccaggcccatatccaccaatgatgcttccacctacagttatgccaatgcagggatggaacccttatgttgtaagtttctattacttgtcattttgtactttattactttaaagaaggcacttgcgtgccttatataaattaggaagatatctttgttctaaattggcatctccaatattgcggtaaatagtgagaattcagtggtaagttcataacaaaatagaggcaatgggctaaaatggaggttttataggaccacatataattggatgtaagttagtaattccttcatgccttgaaaacacaatcttagccatgaatagaagacaccactgactgcctgatgatttttaaaaactctttttggttctcagtcacctatgaaccaaactacaccagctgggggccagcaagctgttccagcagggccatcttatggcttgtcgcaccaggagccaacctctgcagtgacttatggcagtcattatgcgcaattgtattcttcttctgggacttcaagcagcaacatacaagaatatgtgtttccagagcggcctgggcagcctgaatgtgaacattacatgaagacaggaacctgtaaatatggagcagcctgcaaatatcatcatcctcaatacttcagtggaccaaagtctaactgtatactgagccctctgggtcttcccctgcgtcctggttctcagcgatgtgcttactacgcacatcatggcttttgcaagtttgggccgacatgcaagtttgatcacccgatgggtactccaaactacagtcttccagcaccatcacttactgatgtgccagtcgctccatatcctcacactttctctgttactcctattgctccatatctgctgccccctgatccgcggccgcaatacactctagccaaggatccctctgcttatccaccacaagcgcccggaactacgtacggacctgttggggcgatatcaaaggtttatgcccgccacacgcttatccgatccccgacttctggagctgctggcatgcaagcgtcgtaatgagacaagagttgagagcactagtcccctctctgtcatgaagatagatcttgggcaaaccttctcaggatttttctgccataggtggaatggggtctcggattcttttttttgctccaattcgacttcccatcaactgtgaataacggccgcagctgacatagaaaggtctcaataaatggaaagatagggattggcaagctcattcacttgccatttttctgtccatctctgaaacgagaggaggtaattctgactgtagtcggattcagagctccgttattatctcgtgtaacgtgcacaattgcaggggattcgaatgggaaagctgatgggttccatagctctagcccaaatcttttgtttatctcgtcatcttattacatatatgatatgatgtgtatcccccgtcggaacagcaacatgtatatctatctatatatattactctaaactcatgttactgttaaaaaaaaaaaaaaaaaaggcccctaatgagctatctctataatttatacacaga

SEQ ID NO: 4434 - DNA, 2688 bp, Zea mays
  unsure (1)..(2688): unsure at all n locations
  Clone ID: TF_ZmC5023_1
gaccgactgcctcgttgggggccgcggcgacgtttgggactgtcccgttcgtcgtgtcccaaagtccaaaacccaacccacaatggccgccacctcgccggccccggcgccgccgcgcatcctcctcgccggggatgcccacggccgactccaccagctcttcaagcgcgtcaaatcggtgaaccagtcaacggggccgttccacgcgctgctctgcgtggggcagtttttctcccccgagggtgctgcagagggctcaccggaggacgtcaccgactacctcgaggggcgcgcttccgtgcccatcccgacctacttcaccggcgactacggcccagccgcgccgcgattgctatcgaaggccgccgctggtgctcgcgggttcgcacccggtggcatcgagatatgccccaacgtcttctggcttaggggaagcaaccgcttcaccctccacggtttgtcggtggtttatttgtcagggaggaaagggttaggagggcctggctgttacagccaggatgatgtggatgccctacgggctcttgcagaagagccagggattgacgatctgttcttgactaatgaatggccgactggagtggtcagtgggtctgacacttccaatgtgcctaatcaggttttggatcccaatgggtatgatcctattgttgctgaattggttgctgagattaaaccaagatatcacattgctggcacaaaaggtgtcttttactcaagggaaccatatgtcaatgattctgctgctcatgttacccgctttattggacttgctaatgttggaaacaaagagaagcagaaatttattcatgcgatttctcctactccagcatctgtcatgtccagtgctgatatcaatgccaagcctccaaacgccactttgtcaccatatgttggttcagcaaaatcagttcctatcgaagaagctccaaaacgtgcagcggagaacatagattcacaatattggcgttatgatgtcaagcggcaaaggcatggggaagctggtgggggtggattgtgtttcaaatttgtatcctcaggatcctgtcaaagagggagtagatgcagttataggcatgatgaagaggcagtggagcattaccagagaaatgtctgttttgattttctaaacaaaggaaaatgtgagaggggcccagaatgcaagtttgttcacagtctttctggggagactgctctaagggatgcaagacctcctagtgaaagaagacgagtggagagcagttgctggttctgcttgtcgagtccagatgtcgagtcacatcttgtcattagcatcggtgaaggttactactgcacacttgcaaaggggccacttgttccaaatcacgttctaatgattcccgtggaacactgccccagtacattgatgatgcctccggaagcagaggcagaacttgggagatataagattgctctgagtaagtactttgagaagcaaggaaaaactgcagtctactttgagtgggtttcaccacgctctcaccatgcaaacctgcaggctgttcctgtaccattgtctaaagcagacgctgttaacaagatatttcatctagcagccaaaaaactgggatttgaattctctatggtgaatccagatggtgcaaaaactgctagagaatcattgatgtctcaatgcgaaagcaaatcagggctgttttatgttgagctcccggaaggtagaattctcttgcacatggtcgacagtaacgagaagttccctgttcagtttggacgcgaggtgttagcgggactgctaagcatggcggatcgtgcagattggaggaactgcaagatttcaaaggaggaagagattaaactggtggacgatttcaaacaaggtttccgcgaatttgaccctgcagagtgaaaacaatgctctgcgcctgtgtttttgttttgcaatttgtagtctatttttgaggtctcatttgaaatggacatatatgaagcacaagaatgtagtaacgttttccaatgccgcaatttttgttttagggctagttttggaaccccattttttaagggattttcattctcctaagcaaaattagttcattttcttttgtgaaaataggttggaaaaatggtgttttaaactagcccttagataaacgtatgtctgatctcggcgtgagtgggcnnacgcctagggatgaaaacggacggaaaaacccttcttccgttttcgtatccgtattttatcatcgaaaatgggatccggtccggaatagtcgggaacggaaatgggagcggtataaacggaattgcgaaaacgaaaagaaacagaaatactaatggaaacccataatttaatacaaataagaatgatattgatgtttgactagtgattgattggcatgacaataacataaaataaatagatatagagagacaacattctattattatttgattgctaatagtgtatatttagctatatccgatgttgtttaagattttagacttgtcattgaaaatagtcgatggttacaattgtcatttatgctataatttggcacctaaagacacgaggctttattttttatactaatgcatattaggctcgtcccatatttatcanatacggaataaatacggttttaacccggataaaaactggatctcgcaaaaatggacggnataaatcat

SEQ ID NO: 4435 - DNA, 1394 bp, Zea mays
  Clone ID: TF_ZmC5023_2
ggccgactggagtggtcagtgggtctgacacttccaatgtgcctaatcaggttttggatcccaatgggtatgatcctattgttgctgaattggttgctgagattaaaccaagatatcacattgctggcacaaaaggtgtcttttactcaagggaaccatatgtcaatgattctgctgctcatgttacccgctttattggacttgctaatgttggaaacaaagagaagcagcatctgtcatgtccagtgctgatatcaatgccaagcctccaaacgccactttgtcaccatatgttggttcagcaaaatcagttcctatcgaagaagctccaaaacgtgcagcggagaacatagattcacaatattggcgttatgatgtcaagcggcaaaggcatggggaagctggtgggggtggattgtgtttcaaatttgtatcctcaggatcctgtcaaagagggagtagatgcagttataggcatgatgaagaggcagtggagcattaccagagaaatgtctgttttgattttctaaacaaaggaaaatgtgagaggggcccagaatgcaagtttgttcacagtctttctggggagactgctctaagggatgcaagacctcctagtgaaagaagacgagtggagagcagttgctggttctgcttgtcgagtccagatgtcgagtcacatcttgtcattagcatcggtgaaggttactactgcacacttgcaaaggggccacttgttccaaatcacgttctaatgattcccgtggaacactgccccagtacattgatgatgcctccggaagcagaggcagaacttgggagatataagattgctctgagtaagtactttgagaagcaaggaaaaactgcagtctactttgagtgggtttcaccacgctctcaccatgcaaacctgcaggctgttcctgtaccattgtctaaagcagacgctgttaacaagatatttcatctagcagccaaaaaactgggatttgaattctctatggtgaatccagatggtgcaaaaactgctagagaatcattgatgtctcaatgcgaaagcaaatcagggctgttttatgttgagctcccggaaggtagaattctcttgcacatggtcgacagtaacgagaagttccctgttcagtttggacgcgaggtgttagcgggactgctaagcatggcggatcgtgcagattggaggaactgcaagatttcaaaggaggaagagattaaactggtggacgatttcaaacaaggtttccgcgaatttgaccctgcagagtgaaaacaatgctctgcgcctgtgtttttgttttgcaatttgtagtctatttttgaggtctcatttgaaatggacatatatgaagcacaagaatgtagtaacgttttcc

SEQ ID NO: 4436 - DNA, 2080 bp, Zea mays
  Clone ID: TF_ZmC202_1
gggtacctcgaggccggccgggacctcacccaggacgaggcccagggaggatcctcccgactccgacgctgcgtaggactccccgactccgacggcgtccgcccgcgtcgcgtgccacgcccacgccacgccggccgccgcgaggaaagaacaccgggtacttccccttcccttacgctccagtttcacaagtcgcgagccgtgcgtcgcgtcgacgcgagttccgcgtgagggagcaggcagttgcagttggaggcggtgacgaaaccctaggacttgagctccagcgcacggctcgggtcctcctcaccgttcccggcgatggaccggcggcaggagctctgcaggaacttccagcgcggcagctgcaagtacggatcgcactgcaggtttgtgcacgcctcctctcagcagcagcagcaggcgaagcccaacccgtttgggttcggcttagggagtaggcagcagcaacagcagcagtcttcgtttcgtgcgcagttccagcagcagcagcagcagaagcccaacccgtttggatttggagtgcaaggcagtgcggctgcacagtccagaaacgctcctggccaggcaaagccatttcaaaataaatgggtaagggacccctcagccccaacgaagcaacaggaagcggcacagccaccagcagcagcccacacctcctgtacagatcctgagtcctgcaggcaacagattgccgaggattttaagaatgaaactccactctggaagcttacgtgttatgctcacctcaggagcggtccttgtgacatcacgggagatattagctttgaagagctgagagctaacgcgtatgagcaaggcaggcaagggcatcctctgcagtcaatagtagagggtgaaaaaaaattgaaaaatgcaaagctgacggactttaataatttcctgaacatgccacgtctatcggtatcacaaactccaagctttccaactgtggcttccttccctgaagtgaaaaataactcagcatttggggtttctcaaaataatggaccaccagtgtttagtagtttcagtcaaattggagtaacaactaatatgggacctgggtccagaactacaccaggagtcccaaccaatactctttttggtcaatctacccaaccaagccatccaacatttcctgcacctacttttggtcgttctgatatgaaatttggagtttcaggtccatttggaagccagatatcacaacaatcatctgggagttttcaaggttcaaacatgtccagttttggcaatttctcaaagcctcatgccagctaccagcagtccccttcctcctctagccatcacagagacattgataggcagtcacaagatttacttagtggaattgtggttcctacaagtgccacaaacgaagctcctgttgaggacaataaaaatgaaaatcaggatgatagtatctggttgaaggaaaaatggtcaattggagagattccgctgggtgaaccgccacagaggcacgttagtcatgtgttttagcaacattcttgtatttctgtgtcgtggaaccactgtcaagtcagcttcactgtctccttccatattgtcgggacaccatcttacaatttctcctccaggttcataaccataacacgtcaaattgggggcataaaatgcacctgaaatgctgattgggcagcgtagaaacttcttgtatcctgcatcacatactctgtctctattgttttcttgttagctccatgtacttcgtcacattcagggctcgtaatatcccgatttcttgttttagggtttgttgagtttagctgtgggttttaaaaagccgttgcagctgtttttttttttgcggaaattgtaccatacatggaagcagtagtttttgaagaagcggaatttggttctaaaaaaaaaaaaaaaaaagaaaagggggaggggggcttggcgatttgtttgtttctcttttttgtagaagagacggtttctaaaagttaaactgtacgtccactaggtcaatcttgcagggtttgtgattctagggtcctttgcgcatgcaagacgattttgtttctag

SEQ ID NO: 4437 - DNA, 466 bp, Zea mays
  Clone ID: TF_ZmC493_13
gcggttaggttgaatccccacgcgtccgggctattgcctctgccagaatgaagggagaatatcctgagagagtgggacagccagagtgtcagtattatctgaagaccggaacatgcaagtttggtcctacatgcaaatttcaccatcccagggaaaaggccggaattgcagggagggtgcagctaaacacattaggatatccacttctcccggtttgttttttcttgccagttacatgtcctcttctacatatgtctgtttgttttgctgaaaaggagtctactttacttttgtagaatgaaaaggagtgtgcgtattatttaaaaacaggacaatgtaaatatgcaaatacttgtaaattccaccacccagaacttttcaatgtggtgccttcgtcacgtggttcacctatttatacttctgtacattcctctgcaagcgctggtccacagtcatatactggaac

SEQ ID NO: 4438 - DNA, 813 bp, Zea mays
  Clone ID: TF_LIB4759-098-Q1-K1-E12
gggtacctcgaggccggccgggattctattcctcccaccgatcactcgctgctcccctctctcgccggagctccgggccggatggcggcggcagcagcagctcctcccgcctccgtgatcgcgtgatggacgcacacaccgccgcgctccgccgatggacgacgccggaaggccaccaccacacgctcccgtggcggtgaccgcctccgcctccgcctccggccaccgccgcgcccgcccctccccaaccctcagccactgctgccgtcgacaggtcctcccccgaccccgacgcgctctatgaagaggggatgtggcaacagatggccatggacagcggtgccactatgcaacctgggtcatatcctgagcgaccaggtgaacccgactgcacttactatctcaggactggattgtgtcgatttggcatgagctgccgattcaatcatcctcccgataggaatctgaatgaagggagaatatcctgagagagcaggacagccagagtgtcagtattatctgaagactggaacatgcaagtttggccctacatgcaaatttcaccatcccagggaaaaggctggaattgcagggagggtgcagctaaacacatcaggatatccactccgcccgaatgaaaaggagtgtgcatattatttaaaaacaggacactgtaaatatgcaaatacttgtaaattccaccatccggaacttttcaatgtggtgcctttcgtcacgtggttctcctatttatacctctgtacattcctctgcgagtgctggtccgcagtcctatactggaactatgccaag

SEQ ID NO: 4439 - DNA, 778 bp, Zea mays
  Clone ID: TF_LIB5117-029-A1-PF1-C11
ccaggactagtgggccaagcggaggcctttccagcaccaggcccaatgctgctaggggcttcttaagtcatgccttgggcgtaccggacaggcccaggcccaggcccaatgctgcgaactcgaggttgcctaccgcctcctttcaaaggcgaaagctcgcgggcgtcatatatacagcctccgcctcaccgtcctcttcctcgccctcttcttcacccttcccggagcgagaagcttgcgcgggcatcatatacagcccccttcctcggtgtgctgaacccttcctggagtggagaaagaccaggaaacagaaaatggcttggatgtctgaccagccttgccgctcctacatcattgatggatcttgcaagtatggttcagactgtttgttctctcatggacttgacttatttgggaggatagagatgcaaatcagggcacttctgcatgtgccggatgtatatcaagttccagtagagcacttgccatggagtcgccctgagttgggcataatgcttcggcaagtggggatgggatgggactcttggtcacctaatgagtttgctcgagcgtttcatactatttgtgtggtttataacagctatggatattatgcaatcctggttggagaatgcttcacactacctgggttacttaccttacaatccaaatgtgatggatgctgatagtgaagctcaccagatttatattaacttctctgctcaaagtatagaaatatgcactgaagaaaatgttcgtatctatttcagccatttat

SEQ ID NO: 4440 - DNA, 646 bp, Zea mays
  Clone ID: TF_LIB3969-004-Q1-K1-E7
ccccctgggtcgacccagcgtccgcgtcgtcttggcttcatcctctcgcccgccgtctcgactgtagcaagcggggctgctgtccgccgcattcaggagccatgcgtgaggggatgagggagagggacagaggcgggagcccggatgcgtcaggtcctccgcccttccgcggcccggcgtacaagacgaagctgtgcgcgctttggaggggcaggggcggctgcccccgccccaactgcggtttcgcccacggcgaggctgagctccgaaggccgccccctcgcgcctccttccagcctcgcccacgacctgggagaagggattacagagatcatgagtttagactcaggcctgatagaagacactcaccccatgggaggtattcccctgaaagagatatcaggcgtcgttcatttcatgataagagaccaagttctgaagataggggatctagtcattcaagatcacctattaggaagagtgagagaaaacatagtaaaagtcctgatggtggagaaaccgattcatccgtaagtgttcgaagtcctgataacgaagacagaggaaaagatgaaaggtacttaagcagtgatgagaaaaatggtcatgaagatcatctgaaacaaatgcatctggacatggaaaa

SEQ ID NO: 4441 - DNA, 1793 bp, Zea mays
  Clone ID: TF_ZmC4867_1
cattggggccctcgagggcggccgggatttttccctgtgtcattcgttgtcttcggttcatcctctcggccgccgtctggactgtagcaagcggtgctgctgtccgccgcgctccggagccatgcgggaggggatgaaggagagggacagaggtgggagcccagatgcctcgggccctcctcccttccgcggcccggcgtacaagacgaagctgtgcgctttatggagaggcaggggcggctgcccccgccccaactgcgggttcgcccacggcgaggctgagctccggaggccgccccctcgcgcctccttccagcctcgccctcggcctgggagaagggattacagagataatgactttagagttaggcctgagagaagacactcaccctatgggaggttttcccctgaaagagatatcaggcgtcgttcatttcgtgataagagacagagagcaagttctgaagataggggatctagtcattcaagatcacctattaggaagagtgagagaaaacatagcaaaagtcctgatggtggaaaaaccgattcatccgtaagttttagaagttcagataacgaagacaaaggaaaagatgaaaggtacttaagcagtgatgagaaaaatggccgtgaagaacaattgaaacaaatgcatctggacatggaagcattgcgtgaagataaatcaaagctggaggcgatattggagaagaagactgatgaagagcgcaaactttgtagcagagtagaagatcttgaattgcaattgaacaaagagaaagatgatttccaaaggatgacctccaaaaccaaaaagctaatcaaagcacatgggcgttatataaaagcacaggaggatttaaagaggtctcaggctcgctttgagaggctagcagatttgcttgcttcagatattttgaagccttataccaaggagcagggttccatcggtattactgccaatgacgatccatataatgctaatgaaatgagcccaagcgaccaaagacaaaaccatgtttcagcatcgagaaagagacctatttccctcccaagaagtgaagaagcaaaaactgggaagagacagagagagaatggtgatgatatgattccaacaccagagaactatagacctgaagatgctctagaacatgtccaagatagcaagggaactgatcgactagaatcatttacagtgaagaagttaagagtgggtgactacgatgatgaaggaaacattgtttcttcaagcaatatttttgcggataggtacaagggcgatgatgaggaagttgatgttgattagtgacccgatgccgtcggtcgctgataacgatttgagctgtacgaagcaatttcagcagacgacatcgatgtcagcttctaaaactacttgtatgccttttgcatcgggtaatagggcctggtatatttggtagctatttatgtgcttagactgagttgtgatgctgtcaaacatgattacatgcgatgctagaattttcttcttttctgtgtttcctgagactcgaagaggatattaatctgtattcgcctcatgtattattcttagccagtttgagtattgagatttttggactggtgttattctcagcctcaggttagaaacaccatgcatccatgattcatttacctatcatgaaatgcatgtgtgatcattaagcttactaagggtgtgtttggttgaggagtggagaagaatatggtggatggtggctttatttctattttttggatgttaagggcctgtttgtttaccccaatgaatt

SEQ ID NO: 4442 - DNA, 1748 bp, Zea mays
  Clone ID: TF_ZmC28685_1
gcacctgctcctggccgctggcgcgtccgccgacgcgctcgctttctcgggcctccgcgccggcgacctcctcccgcgcgccaacgccgccgccgacagggaccgcgcgctccgcgtgctcctcaagtcccccgcggcgtcgccgtcgtcctcgcccaagaagtccgcctcgccgccaccgccgacggcggcagctgcggcgccggagccgaggaaggagtacccgcccgacctcacgctcccagacctcaagagcgggctcttcagcaccgacgagttccgcatgtacagcttcaaggtgaagccctgctcgcgcgcctactcccacgactggaccgagtgccccttcgtgcaccccggcgagaacgcgcgccgccgcgacccgcgccgcttctcctacagctgcgtcccctgcccggagttccgcaagggcggcgcctgccgcaagggcgacaactgcgagtacgcgcacggcgtcttcgagtgctggctccacccggcgcagtaccggacgcgcctctgcaaggacgaggtcggctgcgcgcgccgcatctgcttcttcgcgcacaagcccgaggagctgcgcgccgtcaacccgtccgcggtctccgtcgggatgcagcccaccgtttcgtcgccgcgctcctcgccgcccaacggcctcgacatgggcgccatgctcaacccggcctggccctcctccccggccagcaggctcaagactgcgctcgccgccggccgggagctggacttggacctcgagctgctcgcgctcgaccagtaccagcagaagctgttcgacaaggtgtcgtcgccgagggccggctggggaggcgggatgggctcgccgctgcccgccgcggcgcccagcaccagggccgtgccggactacgcggacctgctcggctccgtcgacccggccatgctgtcccagctgcacgcgctgtcgctcaagcaggccggcgacatgccggcgtacagctccatggcggacacgcagctgcacatgccggcgtcgcccatggtcggcccgaactccgcgttcgggctcgaccactccatggccaaggccatcatgagctcccgcgcctcggcgttcgccaagcgcagccagagcttcatcgaccgcggcggccgcgcgccggccgcgcgctcgctcatgtcgcagcagcccaccgccggggcgccgtccatgctttccgactgggggtctccggacggcaggctggactggggcgtccagggcgacgagctgcacaagttccgcaagtccgcgtctttcgcgttccgtgggcagtccccggcccccgcgccggctcccgccgagccggacgtctcgtgggtgaactctcttgtcaaggacggccacgccggcgacatatttgcgcagtggccggagcaggagcaaatggtggcctaatctatcgaccgtcactgctggctcatagcatctagctgaccaaagttcattcctttccttcaattgttttccccctttgtttgcttaattcgattcatatgagatgttttttactagtacatatatataggacgttctataatatttggttcatcgccagaacacccagtggatgaccccaaagggagctctgtattggatgaggaaggatttaccaatattttatgatatcgaatttataaatatttttaaaaaaaatttaaaaaaaaaaaaaaaaaaaaaaaaaaaaaaaaaaaaaaaaaaaaaaactcgagaggggcgcggtacc

SEQ ID NO: 4443 - DNA, 939 bp, Zea mays
  unsure (1)..(939): unsure at all n locations
  Clone ID: TF_ZmC292_7
cggccgggntattcggttatttgcctatgttcgtacccaccgccatcactacgcatgccggtccgttaagcttcctccccagcttaccgcgtgctgaaaccctagccgccgaggagccgacgatgtcggacccttacaacccgtactaccgtggagccttcccaggcggcgacggtgcgccgccgccgctgccgccttactcggactttgatgtcgacctcgtcgcgacccgttacaccggcaccccacggtctcatccatcctctgccgacgtcggcgccttcgaatcgcatctcggcgcgagacgattcgcggaaggtcctgaatgatgaggattcttatcctgagcgaccaggggaaccagattgtccttatttattgagtagtagatgtaagtttaaatctaaatgcaagttcaaccatccaaaggaaatggtgaacgcattaggaacaagaacagacaatgaatgaggccttctgaacccgtttgttcgttctatgcaaaaacaggcaaatgtaaatttggtgccgtttgcaagttcaatcacccaaagctagaagatattaagacatcatctttgattgcaaaggaaaccatatatagagcaacaactgatgcagcagcgcacattggtgggacagatgattctgttcccgcaaagacacatgcaccaattgccccagccgaggcacataatgcaaaggggcttccaataagaccagtatgtatttaccaaatggttgtttagctagagcagtaaacttcagttaacttttttctttgatagaacatttgatacagtaaatttctgttttatccagatcttttatttggaaacctcattagtaaatatgttgcaaaaatgcaaaatatatgcagaaatgtaaagctagaactctgtcccatgcttactgaaaaaaaaaaaaaaaaaagcggcc

SEQ ID NO: 4444 - DNA, 397 bp, Zea mays
  Clone ID: TF_jC-zmX700082717a1
agcagctggtaacttaccgacaagtcacaacatttaggggcccaaaaaaataacctttttttaaagctgaacttagttgaaacccttgaaaaagcaataccacagtttaacccgttaacccttcaagggggaaattcaaaaaaacaaatggggagcccaggacatgttatgcctggagttggcaccttaacttttaaacagcaccttttcgctgttcgtttttgccatgggcaaaagggcaccccttgccgaaaggacaaacccccttcacgaaagtttcgcatagcttcggcttggaggtggttttggcacccaaaccaccgccttggtcttcaaatggagcccccggagcaaaagaatttttctccaacatgctcttgcttatgggcccgaaaag

SEQ ID NO: 4445 - DNA, 2775 bp, Zea mays
  Clone ID: TF_ZmC533_1
gccggccgccgggaagaaactgcgagtcctcccatccgtgctttgtcgcctctctctatctttctctctctcctctcccactgccgttccccaaactcagcctcggcttctcttctctggacggggggcggctgccggcgtcgaccttcgcgaggaaggagaggaggccgttggatctcgctggattcgattgggttaggacgggatcaccgcgggcagatgcgctgaactcttggcgtgtgcagtgcgcgatggtcgatcttgctgatctcgagggtgcgggcgaggcggcgcgctcgcatctcgccgcctgcggccagcgggacaggctggcggcgctgctggagctcgcggcggccgacgacgtcgcggggttccgcgaggcgctcgcgggaggaggcggctagggcgacgcagcggagctggcggacggggtggggatgtggtacggccgaagcaaggcgtacgagccgcgcacgccgctgatggttgcggcgacgtacggcagcgtcgaggtggtgtaacgttggctcggcctcggatgagtcgacgtcaaccggcgcccgggcgtagacgtcgccaccccgattaataggcgtgaactgagctgtcaggatggctcgcgagatgagagagttgctcctgggtgccggggcctgcccggtaacccccgactccgacggatcgcttgcctgccgacgtcatcttgtctccgtgtgcttcgcccgacgccttgggcgatctggagatgctccttggccgccgccgagggctcgctgtcgcgacctcggttccatcgctctcgtcgtccccgccgctctcgacctcgccggatgagggcacaggtcgcctcacagattgcgtcttcgttgtcgccgattaccgtcgaccgtgccaagaaggagtacccggtggatccgacgctgcccgacatcaagagccgcgtgtatgcctccgacgaattccgcatgttcgcgttcaaggtgcggccttgctccagagcctactcgcatgactggacagagtgtccgttcgtgcaccctggcgagaacgcccgccgcagggatcctcgcaagcacccatacacggcggtaccctgccccaacttccgccgccctggtggctgccccagcggtgatagctgcgagttctcccatggtgttttcgagagctggctccacccgtcgcagtaccgcacaaggctctgcaaggagggcgcagcttgtgcccgccgcatctgcttcttcgcccacgatgaagatgagctccgccatgtgcctcacaatagtggtgcaggtctgctgtctccccgtgcctcttcatccattgacatgaccgctgctgctgctgctctagggcttctacctggatctcctaccaggcactttgtgccaccacctctgtcaccatctgctgccaacaatggtggaggtgctgctgctcattggctccaaggtagcaggctgcgctcttctttcaatgcaagagatgcacaggctgatgaccttggctcgctcctggaatgggaatctcaataccttggagcgctcagcctcccacaaagcagccgatcccagccccgtctttctactggtctgactattcgtccaacagcagttgctccatcctacctcgaagagatgtatgcttcagacatggctatgtcgccaaggttcaccaatgaccaaggtcactcagtcttctcaccagcacacaaatcagctcttctaaacaagtttcatcatcaacagaagggccttttgtcgcctgtcaataccaacaggatgtactcaccaaggggccttgatccatcaattatccattctccatttggtggcatgtctcctcggtcccctcggactatggagctaacatctcccttaagtgtccgtgttggggctgctgctactccgcgtgatatgttggatcagttttcttccctgaacaagcaccaggtgccatctgcgggatcgccacggaatcttaatgtctcatggggcaacattggtaccccaaagagtaaggtggattggggtgttgacaacgatgaactagtgcgcttgaggcaccctgtgcaacctggaaatacagaagaggagccagatgtgtcttgggtgcagtcactggtaaaccatgctgagctgagtggcaagaggggtgaaatggcaggcatggcttctccatcaactaataagcctgaactgagcagtcaggatgactcactggatgagagtgttattgcttcttggcttgagcagcagatgcacttggagccgaagtaactgtgaaagaggtcttttgctctcaaggtggatgaaaccatatttttgccgcgttagtttccgagaagaatatttgtcctagtaaataataatattctttttttattcttgaattttttgttcgcaaagtcggagatggtggtcttcaggaaagcatttgctcacaaattggtagctgaaagaagctgtcgagtattggtaaacagcctcgttaccttggaggtcctaactagtattcttttgattagttcagatgaggtgaaaattcatatggtcgaccgtgagagtcgatagtaattgtgttgatctctgtaacaagagaggttatagatttttttacccccatttgtcaatgaacaatttcataaatacattgatatttccagtttattcttctgaatacgtttgtacctatgtttttttccctattttctaccatggtagttttgtatctgtgtcaattctattacaataaagtcccaaatttggcccc

SEQ ID NO: 4446 - DNA, 447 bp, Zea mays
  Clone ID: TF_LIB5116-018-A1-PF1-C7
ccgtgctgcctcctcctcctctctctctctaccgacgccgcccccgccagagagaaaccctagcctagggttccacgcgccgccgccgccgccgacgtcgaccccgcgtcgccctccccccgagctcgccatggacgcgggccgcaagagggccgtgccggagggcaccaacggcggtgccgccgtcaagcgcgccagagaatcggagtcggttcaaacgggtgtaggaagcaaatcgaagccatgcaccaaatttttcagcactgctggttgtccctttggttcaagttgccattttctccataacttccctggaggtcaccaggctgtttcaaagatgaccaacttgggtggtccagctgtttcagctcctcaaggaagaatgcccatgggacctggtgttcctgatgggccacctacacccagcttgaagactcgcttgtgtaa

SEQ ID NO: 4447 - DNA, 698 bp, Zea mays
  unsure (1)..(698): unsure at all n locations
  Clone ID: TF_LIB4727-020-R1-K2-C6
cgggntattaacaaaatgctgctatacttggtagctgcaagttatattttaatcccgagtgttttttttttcaaattatatgttttatgaccttctatgcttgcaaatgatcacaactttgagtgttgctcttactcagtatttactgttaacacctgcaagtctgcttctgatgatctgatcccatttttctgatcctaaatgatttaggatatctgaggtctgctgcaaccaaatctctagctgccaattgctaatgttttctaatagattcgtagcaaatggcttcacaaaattctcctgaaacgccaagctgataaatagtttcttcttaaaacctatttcaaaaattttagtttggtggaggtaccaagaatggtgcagcacaagactttccagaacgacagggccaacctgtatgcgagtattatctgaagactggaacttgtaaatttggttccaattgcaaatatcaccatcctaagcaagatggatctgtgcagtctgttatattaaacaacaatggattccctctacgcctgggtgagaaagaatgctcctactatatgaagactgngcaatgcaagtttggttctacatgtaaatttcatcatccagaatttggtggtattccggtgacccnctggatatatccaccattacaatcaccttctgtgccctcccctcatacatatgct

SEQ ID NO: 4448 - DNA, 415 bp, Zea mays
  Clone ID: TF_LIB3205-035-P1-N1-F9
gagaacaagcggtgtatttttggggcttgacaccatccaaccgccgaaggtacaccgttagtaccagcacgcgccgacaaacacttccggtgatactgaactttacaagtcaggctcccaccatggcagtgacagcatcaagcattaacagtgcgattcgcatggtaccacatcctgatacaggatacttcctccgtttttttagttgtcgctggaaaaggaagagtagcttgaactggagccataaaagctatatccacaactgaccgatcaggatgattgaagcgacaaatagaaccatatttgcagctgcctgtcttcatataaaacgagcaatccacttcacctggtcttattggaagcccctttgcattatgtgcctcggctggggcaattggtgcatgtgtctttgctg

SEQ ID NO: 4449 - DNA, 672 bp, Zea mays
  Clone ID: TF_LIB5116-066-A1-PF1-D7
gcgaacttgcctgcctgaaggcgcgcccggaggagagcagagcaggagacagaggaggagaccaaggagatgccgctgggcaagtactactgcgactactgcgacaaggagttccaggacaccgccgccgcccgcaggcgccacctccagggcgcccagcaccaccgcgcccgcgccctctggtacgactccgtccgccgccaagagtcccacggcggcgcatctcccctcctccagcccgacggcgctatcctcggccagggcgtctgcaaccacttcgtccgcacgggaacatgcaagtttggggatgcgtgcaggtacttccatccgaagccacatgctgtgaacccagcatttgctccgtctgggcctgttccaggagcaatggggcaacagtctaattttcttggaactcaaccaaattttgttggatatcaggcgatggaaggaaattctttctcagggaacatactaaggggccacacttcttggggcaacttacctccatcgctgcaacctccccccgaaggtggctatcctccgcttccttttgtcgactggggttgaactgtcacctgtctgaaatgttgatcatttgggatgctgtatatttgaccggccattgaaatgtgtgaaagaaatttcaccaataacaagtgcttgcttcctgta

SEQ ID NO: 4450 - DNA, 769 bp, Zea mays
  Clone ID: TF_21209055
cgcctgccggtaccggtccggaattcccggccccgcccacgcgtccggtcagttctatatgaagaccggagactgtaagtttggtgctgtatgcaagttccatcatcccagggagcgaataattcctactcccaattgtgcactgagtccattaggcctacctttgcgcccgggagagccaatatgcagtttctacaatcgctacggcatgtgcaagttcggtccaaattgcaaattcgatcacccaatgggaaatgccatgtacggccaggctccatcgccagctagcgaggccccagctcctcggcgcatgctggcacatgtaccgccgtcgcacccagaagcatcgcctgatggtggttccggaaggtctaggaggattgcccactctgattcccagcaaataccctctggtgaaaggagcgctgagagagaggcgtcctaggccatcctcggtgtcttcgttccccattcttgactggagtaaccatctgcaaccaacaacattcgaggatccgaagctgtacaggtcttttgccccacctctgagctttacataccggagcttgcttcaacgtgtattgcattcaggcaggaaaaagttcttgcctgttcgggatgctcatttgctcccccactgaaacgggaacaaacctaccttatttaaaacatatgtatggatggaacctactcacctctggacattcaaacccattcgagtcatgtgcactggtcccggtgctgtagttatagagctgtctttgcatgg

SEQ ID NO: 4451 - DNA, 620 bp, Zea mays
  Clone ID: TF_LIB3587-272-Q1-K6-G8
gggacatcatggtggaaaagcagttgaaggtgtttttttacaagatcaagatgaagcagtggagcaatgcaccagtgatcaactgaggacaatcacagatgggaggtgctcatatgggtcatcgtgccacttcaatcatccacggctcaaagcaaaactagaagtttcaagtttcccttctgaacaaagaaatcatgaagctgaatttctggaactgaaccgtgttggcctccccattagagaaggagcaaggaagtgtatctattacatgcgtaatggtacatgcagatatggaaagaaatgttgttttaaccatccagagcaagttcttgatgttcaacaccacactgcaacaggatgggatgatactaacttgcaatcttcaccacactcaaagaagttacctgaacataaaactatggatgacatatcgtctggatctgaggttcttcctccaaacatacttcggatgcttttacctccccagaatgtgccccctagtacaaaagaaaaggaaatcaggataaaaaaggatcctgattgggcttcagcttcagatgattctgatggctgctgctcggcagatagttcaaatgggcctttgtgcaagcaggaacatg

SEQ ID NO: 4452 - DNA, 840 bp, Zea mays
  unsure (1)..(840): unsure at all n locations
  Clone ID: TF_LIB5117-050-A1-PF1-C5
acccacagcctcccaccccagtccccaccccgagcccgtgaaccctagcacattcgtgcgccggcggcgatgtcgggctaccctttttacccatacggccgcggtggcgtaggcgaagatgcgtcggcgatgtcgggctaccctttttacccatacggccgcggtggggtaggcgacgatgcggcggcgaggtactcttcctacgagatcgacctcatcgcggcacgctacgctggcgacccgtcaccctacccctacccctccgcctccggcggattcgacccgcatgtcggcgcgaggcgacccgcagatgttctctatcatcaatctattatgggaagccatagtactattgggcagagttatgcattttattctccgaacactatggtcaaacgccctaggcttgaaagcagccttcctatttatccacagcgacctggggaaaaggagtgtgctttctatatgaggaccagaacatgtaagtatgaagaaacctgcaaatttgaccatccacaatgggttccagagggcgggattccaaattggaaagagggtacaaaggctggggaatcctatcccgaacgtccaggggaaccaaattgtcctttttttgtaaagactggtgactgtaagtttgggtctaaatgcaagtccaaccattcaaagaaaaaggatgatggaacagtggctggaccaggcgataaagagtctctattttctggtaattccaccttaccggtgaagccttctgagccttgtccggagcctctaatttctggntattctaccttacccggtgagnccttctaaccttgtccgcactatngcaaaggcaat

SEQ ID NO: 4453 - DNA, 1213 bp, Zea mays
  Clone ID: TF_ZmC39160_1
tttttgtgtctagtcgggctcgctactctttatgaaatggacatggacgtaatatataagtgtcaagtcgagctcgtgaatagagccatttcagtattgacagcaagatctcttcaattaagcattttttatccattacaatgcgccttgctcccagtatgacgaaatacagaaaacaaaaggaaagagaaaaattgaaaggtggaggaacccagtaactctgcatgtgaaaattttcttgataacaacgaaaattttcttgcctgagaattatttaccgagggtatggacctgagccccaccaaggcgcccaatatgctctacggaacctgacattcaaaaaccttcttttttcccgttttggacatgaacggaacaacccaaaattgctagtgaatcgagcttgcgtgtgacctatcaatgctctcttattctgatggtaaagaaacccaccctcgccgcagcttctctacagagaccacagcttattcacattggagaggcctatcagaactgtgtcaagtgatagaaaatttatgatgagaggatcactcccaccagctcaataaaatcagcgcccaccaccagggctcgaactgccggcacttgtaggagtctgagtttgcataatggtatcatgatggaataccccttttggcaagattgctccaacaggcgcgggtcctgccactggtgatactacatgatttatagatggatctttagttgagatatattctggggaagacgaagatggagccaatgtggcaacagagaagccaataggatagggagcaattggcatgtcagatagtggcaaagcagatgaactgtagcctagtgtacccattgagtgatcatatttgcatgcaactccatatctgcaatatccattttgggcatagtacgcacaaggctgagcacccggacgaagtggaaggcatagatggctgaacatgtaattggtcttaggagtgctccaatctcgaggatggttatatttacacgtagttccaaatttgcaatcgccagtcctcatataatattgacactcaggctgccctggtcgctcaggaaatccatgttcttgatgattattgcttgattgtccagctgaggaagaatatggcaagtatgtaccgccataagcaattgcggagtctacatgatcagcacaatttttcttcacatgtaaaaaagaaacataacataa

SEQ ID NO: 4454 - DNA, 443 bp, Zea mays
  Clone ID: TF_LIB3076-015-Q1-K1-B7
cccacgcgtccgagctattcttcatatatctacattgagtgggcgattggagtctgataggagctagaaccttcatatgtgacaccagaatgaatgggtgattggagtcgaatgtacagacttgtaggatattccggaaatgttttagcatgccttttgatttaagcatgtacctgttaaaagtcttctgtgttttccaggttaatggagttggaaagaccgcagttacagtggagtacccagagcgtcctggacagcctctctgtgagtactatgcaaagaatggcacctgtaaatttggttccaattgcaagtttgatcatcccagggagggtggttttgtacctgtcacattgaacagcggtggattccccctgcgtctgggtgaaaaggaatgttcctattacatgaaaactggacattgcaagtttggagctacatgt

SEQ ID NO: 4455 - DNA, 730 bp, Zea mays
  Clone ID: TF_21209753
gcacgagaactttcgcaagcgcaggtatctccccacagggcagcgcgtgcggaaaccctagtcgccgccgatgtcggaccctttctacccgtactaccgcggagccttcccgggcggcgacggtgcgcagccgccgccacgttactcggattttgaggtcgacctcatcgcggcccgttacgccggcaccctattgccttatccatcctctgccgacgtcggcgccttcgactcgtatgtcggcgcgagacgatccgcggaagttctctatcaccaatcttttatgggaagtcatagtactgttggccagaatgaggctttatattcatcgaatactatggctaaacgccctaggcttgaaagcagccttcctatatatccacaacgaccggggcaaaaggactgtgccttctatatgagcactggaacctgtaagtatggagagacttgcaaatttgaccatccacaatgggttccagagggtggggttccaaactggaaagaggtcctgaatgatgaggattcttatcctgagcgaccaggggaaccagattgtccttatttattgagtagtagatgtaagtttaaatctaaatgcaagttcaaccatccaaaggaaatggtgaacgcattaggaacaagaacagacaatgaatcactaatcgctgataccgctatcttaccagtgaggccttctgaacccgtttgttcgttctatgcaaaaacaggc

SEQ ID NO: 4456 - DNA, 2362 bp, Zea mays
  Clone ID: TF_ZmC5498_3
tctcctccacccgccgcccccgcgggaccgaaaccctagctagggttctgcccgccgccgccgccgccttcgatccagacgcggccaggcttcccgcaacaccgccatggacacgggccgcaagcggaccgcaccggagggcgccaacggcgcgggcggccccaagcgcgcgagagaatcggagacaactggtgtaggaagcaaatccaagccgtgcaccaaatttttcaggttctaatctagcttaaaatgaacagtcatccggtaacatctactatcgttattatgctcttcttttttttaaattaaaatttgttatgttactaaatgctgtgcttgatgctaacaaatgggtcggtctagattctgctacaggatggttttatctaatcattgcttaagaacactcaacggagtaaaaaattggaatctactgctgtttatcactgtgaaaattggtgcaacaagggaacgtactgctgtttatcactgtgaaaaccgatgcaacaagggaacctactgctgtatatcactgaaaatctgaaccatgcaacaatgttttcaaggaagcaaaacttcctctcaaaaggaacaatcagtcaataacaccatggaacaggttcacttgaagaaatcaagaagattagattgaacatggggactgtaattcaattccttgtgaattgtaccagttatttgttcaattgcatttccttatcaatatgttgcagtagtagttctgaacaccttgaagcttgattatgaatggcatttctatataaagcatgatttctaaaagattagtttgtatcatttacttcagcttttattctttgcatatatatttttagcagtcatctagtgaggttgcattatccagctgcatgtaacttaatctcttccatcaacattgtttgcatttgtgtatcaactaaaatcatctgtaggttgtcagatatattagcatgttctgttgcttatattatgttttcaatgtgcagcactgcgggttgcccctttggtgcaagttgccattttctccataacttcccgggtggctaccaggccgtttcaaagatgaccaacttgggtggaccgcctgttccggctccaccaggaagaatgcctatgggacctggtggtcctgatgggccaccttcacctgctgtgaagactcgcatgtgtaacaagtacaacactgccgaaggatgtaaatgggggagcaagtgccactttgctcatggagagagggagcttggaaagcccctgcagatggacaacccgatgggacctcctccaatggggccagggcccaacgggcacttcatgccaccgccaatgcctttcccagacatggttcctccctccacattcggtgcttccgccacagccaagatcagcgtcgatgcatcccttgctggtgccatcattgggaagggtggtaccaacacaaagcatatatcccgagtgactggggccaagttagccatccgggacaacgaggctgatcccaaccataaaaacatcgagctcgagggaacatttgaccagatcaagcacgctagcgcaatggtcacagagttgattgtccgcatcagtggtaagccgcctccacaagccaagaacaacccaggtagggggcctggttctcatgccgggggtcctggaagcaacttcaaaaccaaattgtgcgagaacttcaacaaaggctcctgcacctttggagacaggtgccacttcgcccatggcgaaggtgagctgcgcaaacctgctgctgcttgacaggcatgcttattgtggcctgtggtgattaatctgcctgtatggctgaataacaccatgaccaaggacagtggcgccagcgccatggtgaagtgtgctgagccacatgctgcctgagagagagcatttccctgtggctcgtatttgatcttaatgctgtaacaaactctcctcgatggagattaagcaatggccgtttatttaggatttgtaggattgccgtattggtcacccttttatctatcctgtttttggcctgtggtgattaatctgcctgtatggctgaataacaccatgaccaaggacagtggcgccagcgccatggtgaagtgtgctgagccacatgctgcctgagagagagcatttccctgtggctcgtatttgatcttaatgctgtaacaaactctcctcgatggagattaagcaatggccgtttatttaggatttgtaggaaaaaaaaaaaaaaaggggcggaaaatttcttgtgtcgagatacggatttattttgctatatatttttcgtctatctggttgttgtcgtagtattgttgacacagcatgattgtgttaaagaattatt

SEQ ID NO: 4457 - DNA, 909 bp, Zea mays
  Clone ID: TF_ZmC1553_7
cacgactctcggcaacggatatctcggctctcgcatcgatgaagaacgtagcgaaatgcgatacctggtgtgaattgcagaatcccgcgaaccatcgagtctttgaacgcaagttgcgcccgaggccactcggccgagggcacgcctgcctgggcgtcacgccctcttcctccctccgctgcgccccactccgcctccgccaaaccgcaagctagggtttccgcctcgacgcggagggctcgccatggatgccgccgcccgcaagagatcccggccggagtccgccaacggaggcgccgcaggcgggaagcgctcgagagaatcggagtcacaacaaactggtctatcaagcaaatcgaagccttgcaccaagtttttcagcactgttgggtgcccctttggtgagggctgtcacttcgcgcactttgtccctggtggataccaggcagtatcaaaatcacacagcctaggccatgctgctgtgtctgcaccgtcaagagctccagcggaccatgctgcttctggtgtcaaaacacgcatgtgcaccaagtacaacactgcagaaggctgcaagtttggtgacaagtgccatttcgcccacggcgagagggagcttggcaggccaccatcctcctacatgtcccaagaaagttcctatgctcctcctatgggtggtcgatatggaggtcgacacgaaccacctctgccagcttcgatgggtcctcctgctggaaactttggcgcctcgtctacctgcaaggtcagtgttgacgccgctctcgccggaggcataatcgggaagggcggggtcaacacgaagcagatctgccgcatcacaggggtcaagctctcgatacgtgaccacgaatcaaacccagacctgaagaacattgagctggaaggcagctt

SEQ ID NO: 4458 - DNA, 743 bp, Zea mays
  Clone ID: TF_ZmC1784_7
atccacacaaaacaatctgccgtgctccaccttctgctccccctccggctacggcggcgctgatctccgagatctctagcttttctgcgggggcgcgaatccggggggcggcgccatggccgagcacctcgcgtcgatcttcggcacggagaaggaccgcgtgaactgcccgttctacttcaagatcggcgcgtgccggcacggcgaccgctgctcccgcctgcacaacaagccgtccgtctcgcccacgctgctgctctgcaacatgtaccagcgccccgacatgatcaccccgggcgtggacgcgcagggcaaccccatcgaccccgtcaagatccagggcgacttcgaggacttctacgaggacatcttcgacgagctcagcaagcacggcgaggtcgagaacctgcacgtctgcgacaacctcgccgaccacctcatcggcaacgtctacgtgcagttcagggaggaggaccaggccgccaaggcgctccaggcgctgcaggggaggttctactcgggccgccccatcattgctgagttctcgcccgtcaccgacttccgggaggccacctgccggcagttcgaggagcacaactgcaaccgtggagggtactgcaacttcatgcatgtcaaggagattggcagggacctcaggaagaggctgtatgggcacctgcataggtccaggaggagccacagcaggagcagccggagcccgagcccctaccgtcaccacgcca

SEQ ID NO: 4459 - DNA, 1221 bp, Zea mays
  Clone ID: TF_ZmC493_11
cccgtcctccgccgacaagtcctccctcgaccccgacgcgctttatgaagaatgaagggagaatatcctgagagagtgggacagccagagtgtcagtattatctgaagaccggaacatgcaagtttggtcctacatgcaaatttcaccatcccagggaaaaggccggaattgcagggagggtgcagctaaacacattaggatatccacttcgcccgaatgaaaaggagtgtgcgtattatttaaaaacaggacaatgtaaatatgcaaatacttgtaaattccaccacccagaacttttcaatgcggtgccttcgtcacgtggttcacctatttatacttctgtacattcctctgcaagcgctggtccacagtcatatactggaactatgtcaagctggacttttccacgagcttcttttataccaagccctaggtggcaaagtccttcaaattatgcaccaatgattgtacctcatggccttgtccaagtgccgagctggaattcatatcctggtcagctgcagtcacctggggctcaacaaacttatggaagttcacaacaaggcgaagctagtgcaggaaatcagggaatgctatcaccctatagatccagttcgtttcctgtgcctcaatatgcgctgcagagggataatgtatttcctgagagacccgatgaaccagaatgccaatattacatgaagacaggagattgtaaatttggtgcagtgtgcaagtttcatcatccccgtgtgagatcacagccccctccggattgtgtcttaagtccaatgggccttccaatacgtccaggtgaagaactgtgcaaattctattctcgttatggcatctgcaagttcggcgccaactgtaaatttgatcatcctacaatggctgctccaatgggagtttatgcatatggtttctctgggtctgcttctgtcgcacccgcttcaactaatgcacctatgacgcgacgccttctgggatctccatcaggttctggatatatgtcttaggtgtcttttttttcagttgacctactttgatgtataaaatccacggcatcgcctcaggcgctgtgaatgtttctcctaacttcccgccgggatgaagttctgtaaattgagttgctgctggagatgtacagccccccccccccctccccaattaatccagaactttgggaataactgttggaacctaataaacttcagatacag

SEQ ID NO: 4460 - DNA, 1872 bp, Zea mays
  Clone ID: TF_ZmC292_1
cgcgaaagtgcctggtcggcccgtgggacgagtggacattcgcccgcttcccgtccatttattaaactttcgcaagcgcaggtatctccccacagggcagcgcgtgcggaaaccctagtcgccgccgatgtcggaccctttctacccgtactaccgcggagccttcccgggcggcgacggtgcgcagccgccgccacgttactcggattttgaggtcgacctcatcgcggcccgttacgccggcaccctattgccttatccatcctctgccgacgtcggcgccttcgactcgtatgtcggcgcgagacgatccgcggaagttctctatcaccaatcttttatgggaagtcatagtactgttggccagaatgaggctttatattcatcgaatactatggctaaacgccctaggcttgaaagcagccttcctatatatccacaacgaccggggcaaaaggactgtgccttctatatgagcactggaacctgtaagtatggagagacctgcaaatttgaccatccacaacgggttccagagggtggggttccaaactggaaagaggccccgactgttgaagattcttatcctgagcgaccaggggaaccagattgtccttatttattgaatagtagatgtaagtttaaatctaaatgcaagttcaaccatccgaaggatatggtgaatgcattaggaacaggaacaaacaatgaatctctaattgctgatagcgctgtcttaccagtgaggccttctgaacccatttgtgtgttctatgcaaaaacaggcaaatgcaaatttggtgccatttgcaagttcaatcatccaaaagatattaagacatcacctttgattgcaaaggaaaccatatatacagcaacaactgatgcagcagatgccccgaccgaggcgtgtaacgcaaaggggcttcctataagacaaggtgaagtggattgctcgttttatatgaagacaggcagctgcaaatatggttctatttgtcgcttcaaccatcctgatcggccagggccagctgcggatataacttttatggttccactggttcaagctactcttccttcatcagcacccattgtccctgcagtggttgaacctttgccaatgatctatcctcaaaggccaggagaaactgtttgtgatttttacatgaagacaggatcttgcaagtattctcagaaatgcaagtttcaccaccccatcagtcgttttgcaccgcattccaaagaaaacggggatcctcaacagcctgcgacacttgctagcctgccaaggagagaggacgctgaggcttgtgccttctacatgaggtctggcatgtgcaggttcggtgcgcactgcaagttcgaccaccctcctcgcgaggaggctatttccgagctgcaggcagccggaaaggaaggaatagaagggccgagcctcgtccagcgcgaccatgatgtctaatactgtatcctgcttcagtatgtaataccatgtgaatcgcactgttagttaatgcttggtgctgtcagtcttgttgggagtctgactcgtaaagctcattatcatcggaagtgtttgtcggaggagtgctggcactaactatttatcttcagttggttgtcgtgttgccaacttgcgatgtcaaggtgcatatttcagtttttttagagtaaaaatgcactttacatcctgccgccaaacttaactatgggcctgtttatggccctgtttggtttaccttcggcggatgaatggtgtcaaaaataaaaatacacaaataattcgaaaaaaatgaaaaaaagatgcccctaagaatgtgagaaccaagttaccgtaaatctaaaaaaaaaaaaactcgagagtcttctaga

SEQ ID NO: 4461 - DNA, 2566 bp, Zea mays
  Clone ID: TF_ZmC263_1
tttttggggaaggcaacagcccttccctgacaagcattcaatgataggactgttatattacaaaaaaggaggccaagagactaatggagtgtgtggtctgctcaagaagtacttgacaaagttgctcaagagactccgaattttggaacagaacaggataaggcccattgtccgtttcatctcaagacaggggcttgtcgctttggattgcgctgcagcagagttcacttttaccctgataaatcaatcacattgctaatgaaaaacatgtataacggtccaggccttgctttggagcaagatgaagggcttgaggtttgttagaggaaattctctaatgcataactttgtatccttaaactactgtttatttacgtttaaggatgctcaattttggtttcatgggcagtgccattttaagttgtgatagtttaatactaaagcaagctcatgtcaaaataacaagtattccactttaagcttgtaagcctttataagaagacatgagtataaataactgactacttggaaccatttgaatttttttaatctactgctcaagataactcttaccccaagttttccttggctactatcagactcgcgacagattgcatgttctttcgtgttatcttcagaacttcgacttgaggcatacagtgatcagaccagttgatttcacttgattgaggacgtcttgaactttgatctgctcatttcacagatgaagagattgaacaaagctatgaagaattttatgaagatgtacatacagaatttctgaaatttggtgaacttgtgaatttcaaggtatgtagaaatgggtctttccatcttcgagggaatgtttatgtgcactataaatcgttggattcagctcttcttgcctacagcagcatgaatggacgctattttgctggaaaacagataacatgtgaatttgttgctgtgacaagatggaaggcggccatatgcggtgagtacatgaggtcaagatacaagacatgttcacatggagttgcttgtaattttattcactgcttccgcaatcctggaggagattatgagtgggctgattgggacaatcatcctcctagatactggattaggaagatggttgctctttttggtccctcagttgatgagatgaatgaaaaggcgagtcataccccagattttagaagttcagtgggctctgataggaagaaacttaaaatttccagcaacagatatgtttcaagaggatctaggaacgaagatgtgcatacacgacactctcctcaagattattcacattctaagcaagaacgaagtagccacaacatgaattatgagtacagacgacataaaagagattcttcagcagcagataagcaccgaagacaagatgttggagatacaaatgacagacaattttcaacaatgggaaatgacagcaagtcccataggcataagcatgaagaacggcatagaagtgatcatggtaatggagaaaaagaagatgacagcaaaactaggcctaggaagcactgttctgttaggcgtggaagtttggaggttggatattctgactggtctccagacttcactggtacagacatcagcaagggcccttcaggtgagaagtccactagcaggtatgatgatgccaaagggagcaggaggggatcatcagagtattacaatcttgaaagacaccactctacagctcaaaaacaatcaagaaatgagcacagcactacaagacgcaggagacatgacattgaagattatcatgatgaaaaaaatgacggaagaggggaatcccgaaagcataaccgccatgaatcaaacgaccggtgggtagccacaaatagtgatgttgattcggatgtagatagatatcagagttcaagctgtaaaggcactaggttgggaaggaaggatgatgatccaggcattgaagttcggcatcagaggtcaggtagaagtacgaaggatgacaagagaaggaaacatcacagtggaaacaggtggcacagcggcactgaagagggtacctcagattcaagcggtggagatttgagctctgattcgtggagtggtagatcgagaaacagtgagaacttttcagcacacaggtcaaagaggaagcgaagtcggagcaaggagtctggttagttgtaaatagttagcctctttttggagcacatgaattcgtaggaatcgtgcagaaattttacaggaatcggtttaacttcgcacgaaaaatttcccgcactccaaacatgcggtagtggcttcttgatattctactgtatgctttcaccgtttcgcttacaagttctgttactgtacactgcggtagtgcggttcatagcattgctcaattccggacccgttctcaagcgtctggctatgttaatacaggtattatttccgtgctcttctcactcctcacttttttgtttggtttgtggaatggagtgagttaatccatcaccacctcattcctcatagttagttgtttagtactaatatgtggaatgaagtcatcccaccaaatttgaggaatggacccatgatg

SEQ ID NO: 4462 - DNA, 1282 bp, Zea mays
  Clone ID: TF_ZmC5498_4
cattgggtacctcgaggccggccggggctcgtgccgttgggacgaggcaaagcctcccccccacacctctctcctccatccgccgcccccgcgggaccgaaaccctagctagggttctgcccgccgccgccgccgccttcgatcctgacgcggccaggcttcccgcaacaccgccatggacacgggccgcaagcggaccgcaccggagggcgccaacggcgcgggcggccccaagcgcgcgagagaatcggagacaactggtgtaggaagcaaatccaagccgtgcaccaaatttttcagcactgcgggttgcccctttggtgcaagttgccattttctccataacttcccgggtggctaccaggccgtttcaaagatgaccaacttgggtggaccacctgttccggctccaccaggaagaatgcctatgggacctggtggtcctgatgggccaccttcacctgctgtgaagactcgcatgtgtaacaagtacaacactgccgaaggatgtaaatgggggagcaagtgccactttgctcatggagagagggagcttggaaagcccctgcagatggacaacccgatgggacctcctccaatggggccagggcccaacgggcacttcatgccaccgccaatgcctttcccagacatggttcctccctccacattcggtgcttccgccacagccaagatcagcgtcgatgcatcccttgctggtgccatcattgggaagggtggtaccaacacaaagcatatatcccgagtgactggggccaagttagccatccgggacaacgaggctgatcccaaccataaaaacatcgagctcgagggaacatttgaccagatcaagcacgctagcgcaatggtcacagagttgattgtccgcatcagtggtaagccgcctccacaagccaagaacaacccaggtagggggcctggttctcatgccgggggtcctggaagcaacttcaaaaccaaattgtgcgagaacttcaacaaaggctcctgcacctttggagacaggtgccacttcgcccatggcgaaggtgagctgcgcaaacctgctgctgcttgacaggcatgcttattgtggcctgtggtgattaatctgcctgtatggctgaataacaccatgaccaaggacagtggcgccagcgccatggtgaagtgtgctgagccacatgctgcctgagagagagcatttccctgtggctcgtatttgatcttaatgctgtaacaaactctcctcgatggagattaagcaatggacgtttat

SEQ ID NO: 4463 - DNA, 778 bp, Zea mays
  unsure (1)..(778): unsure at all n locations
  Clone ID: TF_ZmC1784_5
ccggccggtnatccaccaaatccagcgggtccgtactcatctgcttcacctccgggttccggctacggcggcactcttctctggcaaccggtcggaagatgttggatcttccgcttcaaatcgacgcataaaggacgcagattagttttattcgcgtcaaatttattttgctcggtgtagttctgttcattaattaataattttgtactggatttaaggtgcttttattttgaaggtttcttctcccggaaattttcacatcccgaaacgactggaaattgaagtagccatttgatgctgttacctgggttcataagttgttagacttgttatttgtttgttaatcctagctattgcatattgtgtgcctgaccaggaccacagaaacatctaggcaacgagtcgagcaggtagaggagtaatcaggcatccatggctgagcatcttgcgtccatctttggcacggagaaggaccgcgtgaactgccccttctacttcaagatcggcgcatgccgccacggcgaccggtgctcccgcctgcacaacaagccgtccatctccccgacgctgctgctctgcaacatgtaccagcggccggacatgatcaccccgggcgtggacgcgcagggcaaccccatcgacccggagcggatccaggaggacttcgaggacttctacgaggacatcttcgtggagctgagcaagcacgccgagatcgagagcctccacgtctgcgacaacctcgcggaccacatgatcgggaacgtgtacgtggagt

SEQ ID NO: 4464 - DNA, 858 bp, Zea mays
  Clone ID: TF_ZmC1784_6
attgggacctcgagccggccgggaaaatctccaaatccagcgggtccgtactcatctgcttcacctccgggttccggctacggcggcactcttctctggcaaccggtaaacctcctctccctttcttttctgtggtgcggtgcgttcaagatgtccggatgtacgtgcgcatcgggttttgggatcggattgcgcctcctgcgacatagggagtataccgtgctcttttgtttctccatggattgatactttctctgtcgattcttatcaggtcggaagatgttggatcttccgcttcaaatcgacgcataaaggacgcagattagttttattcgcgtcaaatttattttgctcggtgtagttctgttcattaattaataattttgtactggatttaaggtgcttttattttgaaggtttcttctcccggaaattttcacatcccgaaacgactggaaattgaagtagccatttgatgctgttacctgggttcataagttgttagacttgttatttgtttgttaatcctagctattgcatattgtgtgcctgaccaggaccacagaaacatctaggcaacgagtcgagcaggtagaggagtaatcaggcatccatggctgagcatcttgcgtccatctttggcacggagaaggaccgcgtgaactgccccttctacttcaagatcggcgcatgccgccacggcgaccggtgctcccgcctgcacaacaagccgtccatctccccgacgctgctgctctgcaacatgtaccagcggccggacatgatcaccccgggcgtggacgcgcagggcaaccccatcgacccggagcggatccaggaggacttcgaggacttcta

SEQ ID NO: 4465 - DNA, 1805 bp, Zea mays
  Clone ID: TF_ZmC493_1
tccgcctcttcattgggtacctcgggcccggccgggattctattcctccacaccgatcactcgctgctcccctctctcgccggagctccgggccggatggcggcggcagcagcagctcctcccgcctccgtgatcgcgtgatggacgcacacaccgccgcgctccgccgatggacgacgccggaaggccaccaccacacgctcccgtggcggtgaccgcctccgcctccgcctccgccaccgccgcgcccgcccctccccaaccctcagccactgctgccgtcgacaggtcctcccccgaccccgacgcgctctatgaagaggggatgtggcaacaaatggccatggacagcggtgccactatgcaacctgggtcatatcctgagcgaccaggtgaacccgactgcacttactatctcaggactggattgtgtcgatttggcatgagctgccgattcaatcatcctccggataggaatctggctattgcctctgccagaatgaagggagaatatcctgagagagcgggacagccagagtgtcagtattatctgaagactggaacatgcaagtttggccctacatgcaaatttcaccatcccagggaaaaggctggaattgcagggagggtgcagctaaacacatcaggatatccactccgcccgaatgaaaaggagtgtgcatattatttaaaaacaggacactgtaaatatgcaaatacttgtaaattccaccatccggaacttttcaatgtggtgccttcgtcacgtggttctcctatttatacctctgtacattcctctgcgagtgctggtccgcagtcctatactggaactatgccaagctgggcttttccacgagcttcttttataccaagccctaggtggcaaagtccttcaaattatgcgccgatgattgtacctcagggccttgttcaaatgccgagctggaattcatatactggtcagctgcagtcacctggggctcaacaaacttatggaagttcacaacaaggcgaagctagtacaggaaatcagggaatgctatcaccctacagatccagttcgtttcctgtgcctcaatatgcgctgcagagagagaatgtatttcctgagagacctgatgaaccagaatgccaatattacatgaagacaggagattgtaaattcggtgcagtgtgcaagttccatcatccccgggtgagatcactgccccctccagattgtgtcttaagtccaatgggtcttccactacgtccaggtgaagaactgtgcaaattctattctcgttacggcatctgcaagttcggcgccaactgtaaattcgaccatcctacagtggttgctccaatggtctatgcgtatggtttctccgcgtctgcttcccctgcatccgcttcgactaatgtacctatggcgcgacgccttctgggatccccaccggggtctggatatacatcttaggcgtcgttttttttttcagttgacctacttcgatttataaaatccatggcactgcctcaggcgctgtgaatgtttctcctaacttcctgccgggatcaaagttctgtaaattgagttgctaccggagatgtacagcccctttttttttggttaatccagatctttgggaataactctcgaaaccgaataaactttggatacagagatgccagttttcaggtgcctgcactatttgaaaaaaaaaaaaaaaaaagcggcccaaaaaaaaaaaaaaaaaaaaaaaaaaaaaaaaaaaaaaaaaaaaaaaaaaaaaaaaaagaaaaaaaaaaaaaaaaaagcggcc

SEQ ID NO: 4466 - DNA, 1603 bp, Zea mays
  unsure (1)..(1603): unsure at all n locations
  Clone ID: TF_ZmC493_5
cattgggtacctcgaggccggccgggnnannnntcnnnnaaaaaaaaaacaaaaaaaaaaaaaaaaaaaaaaaaaaaaaaccccccttattctattcctccacaccgatcactcgctgctcccctctctcgccggagctccgggccggatggcggcggcagcagcagctcctcccgcctccgtgatcgcgtgatggacgcacacaccgccgcgctccgccgatggacgacgccggaaggccaccaccacacgctcccgtggcggtgaccgcctccgcctccgcctccgccaccgccgcgcccgcccctccccaaccctcagccactgctgccgtcgacaggtcctcccccgaccccgacgcgctctatgaagaggggatgtggcaacagatggccatggacagcggtgccactatgcaacctgggtcatatcctgagcgaccaggtgaacccgactgcacttactatctcaggactggattgtgtcgatttggcatgagctgccgattcaatcatcctcccgataggaatctggctattgcctctgccagaatgaagggagaatatcctgagagagcaggacagccagagtgtcagtattatctgaagactggaacatgcaagtttggccctacatgcaaatttcaccatcccagggaaaaggctggaattgcagggagggtgcagctaaacacatcaggatatccactccgcccgaatgaaaaggagtgtgcatattatttaaaaacaggacactgtaaatatgcaaatacttgtaaattccaccatccggaacttttcaatgtggtgccttcgtcacgtggttctcctatttatacctctgtacattcctctgcgagtgctggtccgcagtcctatactggaactatgccaagctgggctttcccacgagcttcttttataccaagccctaggtggcaaagtccttcaaattatgcgccgatgattgtacctcagggccttgttcaaatgccgagctggaattcatatactggtcagctgcagtcacctggggctcaacaaacttatggaagttcacaacaaggcgaagctagtacaggaaatcagggaatgctatcaccctacagatctagttcgtttcctgtgcctcaatatgcgctgcagagagagaatgtatttcctgagagacctgatgaaccagaatgccaatattacatgaagacaggagattgtaaattcggtgcagtgtgcaagttccatcatccccgggtgagatcactgccccctccagattgtgtcttaagtccaatgggtcttccactacgtccaggtgaagaactgtgcaaattctattctcgttacggcatctgcaagttcggcgccaactgtaaattcgaccatcctacagtggttgctccaatggtctatgcttgacctacttcgatttataaaatccatggcactgcctcaggcgctgtgaatgtttctcctaacttcctgccgggatcaaagttctgtaaattgagttgctaccggagatgtacagccccgtttttttttggttaatccagatctttgggaataactctcgaaaccgaataaactttggatacagagatgcc

SEQ ID NO: 4467 - DNA, 2797 bp, Zea mays
  unsure (1)..(2797): unsure at all n locations
  Clone ID: TF_ZmC5498_1
attcggctcgagcagcgcccctcctctccggtttgcttgctgggactcgcgatcttcctggtcctcggctgtgccttctggggcggcggccgcggcaactacgtaaggggagggaagggaagggaaagaccccaccacgggatgagattggacctctacttctaataaaaaaaaaaaaaaaaaaaaaaaaaaaggggggaaaaaaaaaaaaaaaaaaaaaaaaaaaaaaaaaaaaaaaaaaaaaaaaaaaaagcgcgcgtccctgtttcgctcgccgttgcgctgcggcaaagcctccccccacacctctctcctccacccgccgcccccgcgggaccgaaaccctagctagggttctgcccgccgccgccgcttcgatccagacgcgggcagccttcccgcgagcccgccatggacacggggcgcaagcggaccgcaccggggggcgccaacggcgcgggcggccccaagcgcgcgagagaatcggagacaactggtgtaggaagcaaatccaagccgtgcaccaaatttttcaggttctaatctagcttaaaatgaacagtcatccggtaacatctactatcgttattatgctcttctttttttaaattaaaatttgttatgttactaaatgctgtgcttgatgctaacaaatgggttggtctagattctgctacaggatggttttatctaatcattgcttaagaacactcaacggagtaaaaaattggaatctactgctgtttatcactgtgaaaattggtgcaacaagggaacgtactgctgtttatcactgtgaaaaccgatgcaacaagggaacctactgctgtatatcactgaaaatctgaaccatgcaacaatgttttcaaggaagcaaaacttcctctcaaaaggaacaatcagtcaataacaccatggaacaggttcacttgaagaaatcaagaagattagattgaacatggggactgtaattcaattccttgtgaattgtaccagttatttgttcaattgcatttccttatcaatatgttgcagtagtagttctgagcaccgtgaagcgtcattatgaacggcatttctatataagcatgatttctaaaagattagtttgtatcatttacttcaacttttagtcgtcaagttagccatctggcacaaagatgctgatcccaaccataaaaacatcgagctcgagggaacatttgaccagatcaagcacgctagcgcaatggtcacagagttgattgtccgcatcagtggtaagccgcctccacaagccaagaacaattcaggtagtggagcactgtgggttgcccctttggcctggattgccattttctccataacttcccgggtggctacccggcggtttcaaagatgatcaacttgggtggaccgcctgttccggctccaccaggaagaatgcctatgggacctggtggtcctgatgggccaccttcacctgctgtgaagactcgcatgtgtaacaagtacaacactgccgaaggatgtaaatgggggagcaagtgccactttgctcatggagagagggagcttggaaagcccctgcagatggacaacccgatgggacctcctccaatggggccagggcccaacgggcacttcatgccaccgccaatgcctttcccagacatggttcctccctccacattcggtgcttccgccacagccaagatcagcgtcgatgcatcccttgctggtgccatcattgggaagggtggtaccaacacaaagcatatatcccgagtgactggggccaagttagccatccgggacaacgaggctgatcccaaccataaaaacatcgagctcgagggaacatttgaccagatcaagcacgctagcgcaatggtcacagagttgattgtccgcatcagtggtaagccgcctccacaagccaagaacaacccaggtagggggcctggttctcatgccgggggtcctggaagcaacttcaaaaccaaattgtgcgagaacttcaacaaaggctcctgcacctttggagacaggtgccacttcgcccatggcgaaggtgagctgcgcaaacctgctgctgcttgacaggcatgcttattgtggcctgtggtgattaatctgcctgtatggctgaataacaccataaccaaggacagtcgcgccatggtgaagtgtgctgagccacatgctgcctgagagagagcatttccctgtggctcgtatttgatcttaatgctgtaacaaactctcctcgatggagattaagcaatggccgtttatttaggatttgtaggattgccgtattggtcacccttttatctatcctgtttttgtaccgtttcttaggcactcttggctggcagatcattgtgagtctgttgaacttgagaatagttgctattgatgttatcggtttgtggattcttactagctcatttgaagtccagacggctaatctgaaaaaaaaaaaaaaaaaaaaaaaaaaaaaaaaaaaaataattaaaaaaaaaggggtggtgtggaaaaaaaaaaaataaaaaaaaaaaaaaaaaaaacaaaaaaaaaaaaaaaaaaaaaaaaaaaaaaaaaaaaccccccccccttttaaaaaacccaacctaacncccccttacacacaacnaaaaaatttttaaaaacnncccccaaaaaaaaanaaactccccccnntttaaaaaccccnnaccttaaaaaaccctnncnnacccaaaaaaaaaccccnnnaaacaaaaccccattcccccacnnanccaaaaaacaaaaanccccacaccaanccccc

SEQ ID NO: 4468 - DNA, 2093 bp, Zea mays
  Clone ID: TF_ZmC493_2
attgggtacctcgaggccggccggggtccatcgtcctcgtcctcgccgatcactcgctgctcccctctctcgccggagcgagccccgggccggatggcggcggcagcagcagctcctcccgccgccgcgatcgcgtgatggacgccgacgccgacgccgccgcgatccgccgatggacgacgccggaagggcaccaccacccgcgccagcggcggtgaccgtctccgccaccgccgcacccgcgcctaccccgccctccgccacggtcgccgccgacaagtcctccctcgaccccgacgcgctttatgaagaggggatgtggcaacagatggccatgaacagcggtgccacaatgcaacctgggtcatatcctgagcgaccaggtgaaccggactgcacttactacctcaggactggattgtgtcgatttggcatgagctgcaggttcaatcatcctccggataggaatctggctattgcctctgccagaatgaagggagaatatcctgagagagtgggacagccagagtgtcagggaaaaggccggaattgcagggagggtgcagctaaacacattaggatatccacttcgcccgaatgaaaaaggagtgtgcgtattatttaaaaacaggacaatgtaaatacgcaaatacttgtaaattccaccacccagaacttttcaatgtggtgccttcgtcacgtggttcacctatttatacttctgtacattcctctgcaagcgctggtccacagtcatatactggaactatgtcaagctggacttttccacgagcttcttttataccaagccctaggtggcaaagtccttcaaattatgcaccaatgattgtacctcatggccttgtccaagtgccgagctggaattcatatcctggtcagctgcagtcacctggggctcaacaaacttatggaagttcacaacaaggcgaagctagtgcaggaaaccagggaatgctatcaccctatagatccagttcgtttcctgtgcctcaatatgcgctgcagagggataatgtatttcctgagagacccgatgaaccagaatgccaatattacatgaagacaggagattgtaaatttggtgcagtgtgcaagtttcatcatccccgtgtgagatcacagccccctccggattgtgtcttaagtccaatgggccttccaatacgtccaggtgaagaactgtgcaaattctattctcgttatggcatctgcaaattcggcgccaactgtaaatttgatcatcctacaatggctgctccaatgggagtttatgcatatggtttctctgggtctgcttctgtcgcacccgcttcaactaatgcacctatgacgcgacatcttcttggatctccatcaggttctggatatatgtcttaggtgtctttttttcagttgacctactttgatgtataaaatccacggcatcgcctcaggcgctgtgaatgtttctcctaacttcccgccgggatgaagttctgtaaattgagttgctgccggagatgtacagcccccccccccccctcccaattaatccagaactttgggaataactgttggaacctaataaacttcagatacagaaacgctggttttcaggtgtttgcactattttgacactgctgcacctatggtccctaacagttgaggtaggaattcctctgaaggagctgaaacctgaaacctgtagctgcaggtgtgcagttgaaattatattattgcgtcaatttatttgtaacctgtattcagctggtgttggggcagatattggcattcctcttatctgtgaatgctggttttctgatatgaacagtgtatcccagcctacggcttctgccaagacaataaactcaggacctgtttgggactgttccactattcaaaaaatgaatttgaatctgggattcattattaaagtttcgccgacgaatctgagatcctttttagatagcagcttattattcacgtaaggatattctgtttgaaatagactaatttgtttttatgatagacctcatttgtcagtgtgtattcttttatctactatataaagcgcggtttttactgtcgtcacc

SEQ ID NO: 4469 - DNA, 1022 bp, Zea mays
  Clone ID: TF_ZmC3518_1
ggcggcaggctcgccgacgagttcagcggtctccgcctcgccgaggagcacaccacgccacctcctctgtcaccgctgcccgccgcgccggtgatgccgaagagcatctccgttcgctcgcccggctatctcaagatgatccagaacggcaagcatcgggcgtccaagccaacgaagggctcgcagcgcgtgttagtgggcatggaaggcggagtgaaggaggaggagaagctcaacggcgggctgcagttcgaggtgtacaaccagggcatgctgaagacagagctctgcaacaagtgggaggagaccggcacgtgcccgtacggtaatcagtgccagttcgcgcacggcatcgccgagctccgccctgttatccgccatccgcgctacaagaccgaggtctgccgcatggttctcgctggcgttgtctgcccctatggccaccgctgccacttccgccactccatcacccctgccgatctcttcctcccgcgcccttgaagatgtcagtccaccacccactgccactctctcgtccgcttccaccctctccagctctacttcattgtgcggttataccatcgtcagtcttcagaacccaaaaaatgtctgattagttgtgattcagaaaatgatagccgtaaataagctatagatagatacacgagatagaaaacaaaaattgttctacgtaattagcacacaggcaagatgtgaatatgtagttctagacacccaaggtattcatatggggttgatcagggcaatcaaactcaaatatgagttatgttgggattattgtattcgtcgtatcgtttatatacacagtttaggttatgatgttctgcctagttacatttttgggcaaattggatgacaaactggtgagttcatgtaagtaaactaaggctgttatctgaatatctctgatgtgttgaacacttggcaaaaacaagcaccttctccgttgtattgtttcggaacaattgaagcaatgaattatggaggtgtttagttgaggg

SEQ ID NO: 4470 - DNA, 666 bp, Zea mays
  Clone ID: TF_ZmC17484_2
ttctcatgaaactaggacatgccaatttggatcagcttgtgagttttatcacccaaaagatcggtgctcaggcagagggggagtgattgatggtactgactatggacatgattttgccacgaagtcacggaagccgggccgggaactggcaatatatcctgaaaggcctgatgaacttgagtgttctcactacatgaagcatggctactgtaaatataagatgaactgcaaatttcatcatccaagagatcgtcttccaaagaaataggaccatttgctacaaccactgttgtaactggctgtcgttgatgagtggaccaagtactgatgatgggatgatgatgggacagaaatgcaggaaggaagccatagtcttcctttttgaagagatcgattctactcatgtctagtgtcgttagagttctcgtaccagatgcgaactgcctggtggcttcccaactaccgttcattcatatactaccaaacattgctgtgatctaggccgatgcggcgctaacctgagattgtgggttactgtagctcagtatgcagctcaggtacctgcacttgctcaagattgcgataacgatcagattaaaatagcagaccacgcatattctgcaacttgcgacttttaaaaaaaaaaaaaaaaaaggcccctaagcc

SEQ ID NO: 4471 - DNA, 1868 bp, Zea mays
  Clone ID: TF_ZmC292_5
aagaagagctacgacgcatgctcccctcctacgtctactagtaattctgctccagccaccgacatcactacgcatgccggcccggggggcttcctccccagtttggcgcgtgctgaaaccctaaccgtcgaggagccgacgatgtcggacccttacaacccgtactaccgtggagccttcccaggcggcgacggtgcgccgccgccgctgccgccttactcggactttgatgtcgacctcgtcgcgacccgttacaccggcaccccacggtctcatccatcctctggtccggtcggcgccttcgaatcgcatctcggcgcgagacgattcgcggaagttctctatcagtaccaccaatcttgtatgggaagtcatagtactgttggccagagtgagactttatattcatcaattactatggctaaacgccctaggcttgaaagcagccttcctatatatccacaacgaccggggcaaaaggactgtgccttctatatgagcactggaacctgtaagtatggagagacttgcaaatttgaccatccacaatgggttccagagggtggggttccaaactggaaagaggtcctgaatgatgaggattcttatcctgagcgaccaggggaaccagattgtccttatttattgagtagtagatgtaagtttaaatctaaatgcaagttcaaccatccaaaggaaatggtgaacgcattaggaacaagaacagacaatgaatcactaatcgctgataccgctatcttaccagtgaggccttctgaacccgtttgttcgttctatgcaaaaacaggcaaatgtaaatttggtgccgtttgcaagttcaatcacccaaagctagaagatattaagacaccatctttgattgcaaaggaaaccatatatagagcaacaactgatgcagcagcgcacattggtgggacagatgattctgttccagcaaagacacatgcaccaattgccccagccgaggcacataatgcaaaggggcttccaataagaccaggtgaagtggattgctcgttttatatgaagacaggcagctgcaaatatggttctatttgtcgcttcaatcatcctgatcggtcagttgtggatatagcttttatggctccagttcaagctactcttccttttccagcacccattgtccctgcagtggcgttaaatccggctgcaaattttctgcaaagctttgatttccatgcaactcacgtgccggttgagcctatgccaatgatctatcctcaaagacctggagaaattgtttgtgatttttacatgaagacaggatcttgcaagtatgctcagaattgcaagtttcaccaccctattgaccggtctgcacctcattccaaagaaaacgaggatacacagcagcctgtggcacttactcttgctggccttccaaggagagaggatgctgacgcctgtgccttctacatgaggtctggcacgtgcgggttcggtgcgcgctgcaagttcgaccaccctcctcgccaggacgatgtcctgcccgaccctgatgtctaatacggtactccctccgtttcgttttagttgtcgctggatagtacaaaattgaactatccagcgacaactaaaaaaacggaggaagtatcctgtatcaggatgtggtaccatgcgaatcgcactgttaatgcttgatgctgtcactgccatggtgggagcctgacttgtaaagttcagtatcaccggaagtgtttgtcggcgcgtgctggtactaacggtgtaccttcggcggttggatggtgtcaagagtaaaaatacaccgcttgttctcaaactttgactggatgctaatctccaaaatgtgagaaccaagttaccgt

SEQ ID NO: 4472 - DNA, 404 bp, Zea mays
  unsure (1)..(404): unsure at all n locations
  Clone ID: TF_LIB3245-496-P1-K1-C3
ccggaccggaatggggcggcccacgcgtccgcccacgcgtccgcggacgcgtgggcagtctaaggcacgggagagcgtggccatgagtgtctcgcccaccgttggggggggnngatacaatgctgcctccgccaacggagtgatggtgcagaagccgtccaactggaagacaaggatctgtaacaagtgggagatgactggatactgcccatttgggagcaaatgccactttgctcatggttctaccgaacttcacaagtacggagggggcctcgtggacatcgacggcagggacatcttgtccactcctgattcgaagcaagccggtggctctgctaaagctcctctagagtctgctgctgcgtccactgcgttgccccctcatgcagacgtgtaccatctcg

SEQ ID NO: 4473 - DNA, 2579 bp, Zea mays
  Clone ID: TF_ZmC3751_1
ctttttagttcttgtttgtgccttttcagttttcaatacatcttcatctggggcttgggttgatttgcaggtaagctcggaattcggctcgagcacgcgtccgcccgtttcgctcgctgtctcccgcggcacgggggctccagcgccgaacggaaaaccccaccccactaccactggctactcccgatccccagtccccatccctctcctcgcaaaaggccaccgcgacgcgaccgcgtactgggggcgagacgccagtgcaggcaggcaggcagaagaggagtcgccaggaagcaaccgcgagggagctgcaagcgagcacagcagcagcgcagaaaaaaaattctggaataatttttcttccctttggctccgtgaggttccggtgctcgctcgctcgcctgagcttcgatcgagcccggtcggcgaggcaggcgcccgatcgccgctctccgggagcttccggggggccgtcggatggagccgtacgcggcggcgaagagcggcggggccgacgccggcaccggcaccggactggaagactcgatgcggaggctggggctcggcgacgacggggaagcaggggaggagaagcttccggagcggccgggcgaggcggactgcgcctactacctccgcacgggcgcctgcggctacggggagcgctgccgctacaaccacccccgcgatcggccggccccggttaatggagttggaaagaccgcagttacagtggagtacccagagcgtcctggacagcctctctgtgagtactatgcaaagaatggcacatgcaaatttggttccaattgcaagtttgatcatcccagggaaagtggttttgtacctgtcgctttaaacaacagtggattccctctacgtctgggtgaaaaggaatgttcctattacatgaaaactggacattgcaaatttggaggtacatgtaaattccatcacccagaacttggttttcttacagagacgcctggcatgtacccaccagttcaaccatcacctatttcctccccacatccatatccacatcattccaactggcaaatggggaggcctgctgttgtgccagggtcatttttaccaggcccgtatccaccaatgatgcttccacctacagttatgccaatgcagggatggaacccttatgtttcacctatgaaccaaactacaccagctgggggccagcaagctgttccagcagggccatcttatggcttgtcgcaccaggagccaacctctgcagtgacttatggcagtcattatgcgcaattgtattcttctgggacttcaagcagcaacatacaagaatatgtgtttccagagcggcctgggcagcctgaatgtgaacattacatgaagacaggaacctgtaaatatggagcagcctgcaaatatcatcatcctcaatacttcagtggaccaaagtctaactgcatactgagccctctgggtctccccctgcgtcctggttctcagcgatgtgcttactatgcacaccatgggtattgcaagtttgggccgacatgcaagtttgatcacccgatgggtactccaaactatagtatttcaacatcttcacttactgatgtgccaatcgctccatatcctcagagtttccctgttactcctatgccttcatatctgccatcttctgatctgcgtccacaatacactcaagtcaaggattcctctgctaatccaccaccatcgcctggaactacttatggtcctgttgggtctatatcaaaggtttatgctccccacacgcttatccgatccccggcttctgcagctgctggcatgcaagcgtcctaatgagacacggttgagagcattagtcctctctgtcatgaagatagttcttgggcaatcttctcaggttttttctaccattggcggaatgaggtctcgattcttttttgctccagttcgacttcccagcaattgtgaataaaggctgcagctgacatagaaaagtctcaataaatgcaaagataggaattggcaagctcattcacttgccatttttctgtccatctcggaaatgagaggagaaaattctgattgtagtaggatccagagctacgttattatcctgtataagatgcaccgatgcaagggattcgtatctgaaagctgatgggttctgtagctcaaaaccttttgtttatctcaccatcatatatatagagagggcagattaccctaggtgatgattatccacgctggaatggtttaacaaatcttcaataattgttaaaccattcgtgctttttgttaaaccatttcaggatgggtgatcatcacctaggtgatgaatagccatatatatgaatatgagcagcagctatgatttcacaacatgtatatctacctatatatatgaactgggaacacggcatgttgtagcgagacgctttggaacccttaattgaatcatctgaaaccattcgctggtcatcccctgattttcgggtgttttagttctgctatatatataaagagggcagattcccctaaaaaaaaaaaaaaaaaaaaaaaaaaaaaaaaaaaaaaaaaaaaaa

SEQ ID NO: 4474 - DNA, 1218 bp, Zea mays
  Clone ID: TF_ZmC1553_4
ttccttcttctccaacacccgtcgctctcttctccaactcgaagatgtcggccgccaccgccctgcttcatcgaggcccaagacccaatctccgtttttgataaagaaaccaaacagcaacctagcagtcttccttcacttctctgctcccgacctcgtagcgaatcagatcggggggctagggttccggtgcgcctctacagccggacgcgaggctaggctgggcatggagggaatcgtcacggcctgaaagaggtcctggccggagacgacgaacggggctgcagccgccgggaagcgctacaaagtttggacgcctctctggccggtggcataatcgacaagggtggggtcaacactaagcagagttacaagcgtcaagctatccatccgcgaccacgagtctaaccacaacctaaagaacatcgagctggaaggcaattttgaccagatcaagcaagccagcgacttgttgcgtgatctcatcgcaaccatcagcgcaagcatgccagcgaaaaatccatcttctgctgtggcgccagcaggaggaggccgaggcagtggtccggggggcacgagcagcaactacaagacgaagctgtgcgagaacttcttgaagctatgcgagaacttccaacacgactatgtatgagatattatctcttattatgactggatgagatgtgtcttatggctatagatgagacttttgtggtgtaattgatgagactatagatttaaatattgttatgtgattgtgtgtgagatgttttatgtgaaaatatgttgtgatatagttgtttatatatttgttatgttgtggaaatgggtgtggacctcatcgcgaccatcagcacgagcatgctggcgaaaaactcatctgctgccgtggctccatctggaggccgaggcggtggtctgggtggcaagagcaactacaagacgaagctatgcgagaacttcgtgaagggtgcttgtactttcggcgaacggtgccactttgcccatggcgagaacgagcagcggagaggtgctgtttgagagttgaggtgccaactctaggcatgacatgtcctgtgctctccatttgcttctctgaatttcctccttgtagcgttagacggttagactgtcgtattgcgatttcaatggattcaactgagttcagctttaagaaaacgttaatctgttgtgccccaaaaaatgaaaaaaaaataa

SEQ ID NO: 4475 - DNA, 1733 bp, Zea mays
  Clone ID: TF_ZmC493_4
ggataatgtatttcctgagagacccgatgaaccagaatgccaatattacatgaagacaggagattgtaaatttggtgcagtgtgcaagtttcatcatccccgtgtgagatcacagccccctccggattgtgtcttaagtccaatgggccttccaatacgtccagtatgttgttaaacccttcactctttctgttttattttgttttagaactacactgtttctgttgtattgatcctttgacattttatccattatatatgaatatgtcgattgttgtactatttggttgttcttatctaaaagaaatttgacctggcctttggcgtgggacaaatgaggtgattttttttaaccctagcctgaaattcgctctccagttctttggggtgggacacatgaggggattttttttaacctcggcctgaaatttgcttccacgaagagtcaatctcaggacttgaggaatgctactcaagccacctaatcaactcacctagaagccctttcgcaagtatgtgctatgcatttgttgtttataaaatggttttcatgtgagacaaaaaatgaaggatgttccatacatgttgtttctcagctagatgcctagatgattgatttcagtggcatgatttctgctaacgataactgatttattctcctagcaataaatgcacaccataccaaagatattaatatgcatatctaaggtaccactattggagcattctttacatgtgttggttgagctctgatctatcataaaaaacttttgagggctgagcctcaaatctcactacgacttacaagcgtcattgttgatgcctggacactgattagagcaatgttaaaagttacaaatttgctaggacatgtattaattttttactttagcatacaagttgttgaagggacgagtgtatagactgatatcagcttacaaataaagcctgtctcacgaataggcactagctagtccttctggtacacctcattgaatggtctgccatcttgattatcctgtccaatggtttttagggtgaagaactgtgcaaattctattctcgttatggcatctgcaaattcggcgccaactgtaaatttgatcatcctacaatggctgctccaatgggagtttatgcatatggtttctctgggtctgcttctgtcgcacccgcttcaactaatgcacctatgacgcgacatcttcttggatctccatcaggttctggatatatgtcttaggtgtctttttttcagttgacctactttgatgtataaaatccacggcatcgcctcaggcgctgtgaatgtttctcctaacttcccgccgggatgaagttctgtaaattgagttgctgccggagatgtacagcccccctcccccaattaatccagaactttgggaataactgttggaacctaataaacttcagatacagagatgccagttttcaggtgcctgcactatttgacattaatggtgcacctatggttccgaacagaggaacagttgaattctctggaggggctgaagcctgcacttgtgcagttgagattatatcatcgcgtcgatttattttggaacctgtattcagctggtgttgaggcatttgtttctgaggtgaaatgaactctccatgcccaacaactgaaactaaagacgacacgataaggtgcctgacctgaaccggcacatttcctgtggtcaggtttaatcatatatatgtagctg

SEQ ID NO: 4476 - DNA, 1061 bp, Zea mays
  Clone ID: TF_ZmC214_2
gctgatttggttgcggatttcttagatgtggggtcttactgaccgaattatccatccacgggtggtctgtttgattaggttccctctcttctccgcgcatgcgtgcggggtcgaaaggtagggttcataccccaaagtttgtcattggggacaacaccagcggcggcgatggactacaccaacgccatccacatcatcccacccatggcctccgacgcacggaccaacgcggcggcgtccccgggcgaggaccccgacatctgggccaccgagaaagactaccgccagtggagtgccgaccagggctacaatgaccggaacccctcctcgcgggcggggagcgagcagccgccgccgggcaagaaggctcacggcgggggcggcagcagcgatagcggcggcggtggcagcacgagcaagtcagcgccattggcaagatgttcttcaagaccaagctctgctgcaagttccgggccgggacctgcccctacgtcaccaactgcaacttcgcccatggcatggaggagctctgcaagccgccgcccaactggcaggagattgtggccacccacgaggatgccaccacgaagcagggagaggagcaccagatccccattatgacatccagaagtgtcatcgctggagacgatggcggcggcggcagggcatacaagggtcgccactgcaagaagttctacactgaagagggctgcccctatggcgacacatgcaccttcctgcacgatgagcagtccaaggcacgggagagcgtcgccatcagtctcttgccgacgattggtggtggcggatacaatgctgcctctgccagcggatcgatggcgcaaaattcttccaattggaagacaaggatctgtaacaagtgggagatgactggatactgtccgtttgggagcaaatgccactttgctcatggatctactgtaatacccaatttgtaaacaatctaaagagagtagatctcattatgtgtttttgccctatactcattgtaacctggtgataaccatatatataaagagaacaaataactaataacacct

SEQ ID NO: 4477 - DNA, 1445 bp, Zea mays
  Clone ID: TF_ZmC5498_2
tgggtaccccctcgtgggcgacccgtccggcccggcaagttgcgggcgcgcgtccctgtttcgctcgtgccgttgcgctgcggcaagcctccccacctctctcctccacccgccgcccccgcgggacgaaaccctagctagggttctgcccgccgccgccttcgatccagacgcggccaggcttcccgcaacaccgccatggacacggggcgcaagcggaccgcaccggagggcgccaacggcgcgggcggccccaagcgcgcgagagaatcggagacaactggtgtaggaagcaaatccaagccgtgcaccaaatttttcagcactgcgggttgcccctttggtgcaagttgccattttctccataacttcccgggtggctaccaggccgtttcaaagatgaccaacttgggtggaccgcctgttccggctccaccaggaagaatgcctatgggacctggtggtcctgatgggccaccttcacctgctgtgaagactcgcatgtgtaacaagtacaacactgccgaaggatgtaaatgggggagcaagtgccactttgctcatggagagagggagcttggaaagcccctgcagatggacaacccgatgggagctcctccaatggggccagggcccaacgggcacttcatgccaccgccaatgcctttcccagacatggttcctccctccacattcggtgcttcggccacagccaagatcagcgtcgatgcatcccttgctggcgccatcattgggaagagtggtatcaacacaaagcatatatcccgagtgactggggccaagttagccatccgggacaatgaggctgatcccaaccataaaaacatcgagctcgagggaacgtttgaccagatcaagcacgctagcgcaatggtcacagagttgattgtccgcatcagtggtaaggtgcctccacaagcaaagaacaacccaggcagggggcctggttctcatgctgggggtcctgcaagcaacttcaagaccaagttgtgcgagaacttcaacaaaggctcctgcacctttggagacaggtgccactttgcccatggcgaaagtgagttgcgcaaacctgctgctgcttgatagatgtgtttagtgtggcttgcggtgattactctgcctgtgtggctgaataacaccacagtcgcctatggtgagatgtactgggccacgtgctgcctgagagagatcatttccatcgcttgcatagagacaatggccgttttttaggatttgtaggattgccgtattgttctgttcgatttatatctaaccctgccagaatcctatttttgtaccgtttcttagctactaattggtgccagatcattgtggttctgttgactcgagaatagttgctatcgatggtatgggtttgtgaattattgatagcatttttgaaaaaaaaaaaaaaaaaagcggcc

SEQ ID NO: 4478 - DNA, 2157 bp, Zea mays
  Clone ID: TF_ZmC1969_1
acctcgagccgggcggtgaaaagaagcgggccgcgaggggaggaggaacaaaacgactggctgtccgaacggggacgtctggttcctctcattccccttccacctcgctctctctctctcctcccactgctcgccctctctctcttacgcgcgcgtgacaacctccctccctccactgcgcgcggcgcgggagcagcagcggcagcacccaccgactgatcgccggtgggcggggcgggggcgatctgatgcgggcgcggcggtgatggcagcgccatccggcggtgggggcggcggtgcgggggagggctcctcctcggccgccgcagctgcgacgatcggggtccacggggtggaccaagttgcagaggcgatgtggcagatgaatttggaagaagccatggaactggggccatacccagagcgtgttggtgagccagactgtagctattacatgaggactggcatgtgcaggtttgggatgacctgtaaatttaatcacccagcagaccgaaagctggctgttgctgctgcaagaatgaagggagaatatcctcaaagaattgggcagcctgaatgtcaatactatctgaagactggcacgtgcaagtttggagcaacttgcaagtttcatcatccccgagaaaaggctgcaatggcaactcgagttcagttgaatgaactgggctacccactccgcccgaatgaaaaagagtgtgcttattatttaagaacagggcagtgcaagtttggaagcacatgtaagtttcaccattcacaaccatccaccatgatggttgctgtacgtggctctgtttattcacctggacagtctgcaacttctcctggccagcatgcttaccaaggggctgtaacaagctggcccttgtcgagatctgcttctttcattgcaagtccaaggtggccaggtcattcaagttatgcacaagtgattgttcctcccgggcttgttcaggtcccagggtggagtccttatactgcgcaaattggttcttcatcctcggaggaccaacaacggacacctggagctgctcaatactatactggctcacgccaaagtggtactagtataggcgatcaaggaatgttttcatcctaccaagcaggttctgttcctgttggactttatgcagtacagagggagaatttatttccagagagacctgaccaacctgaatgtcagttctatatgaagaccggagactgtaagtttggtgctgtatgcaagttccatcatcccagggagcgaataattcctactcccaattgtgcactgagtccattaggcctacctttgcgcccgggagagccaatatgcagtttctacaatcgctacggcatgtgcaagttcggtccaaattgcaaattcgatcacccaatgggaaatgccatgtacggccaggctccatcgccagctagcgaggccccagctcctcggcgcatgctggcacatgtaccgccgtcgcacccagaagcatcgcctgatggtggttccggaaggtctaggaggattgcccactctgattcccagcaaataccctctggtgaaaggagcgctgagagagaggcgtcctaggccatcctcggtgtcttcgttccccattcttgactggagtaaccatctgcaaccaacaacattcgaggatccgaagctgtacaggtcttttgccccacctctgagctttacataccggagcttgcttcaacgtgtattgcattcaggcaggaaaaagttcttgcctgttcgggatgctcatttgctcccccactgaaacgggaacaaacctaccttatttaaaacatatgtatggatggaacctactcacctctggacattcaaacccattcgagtcatgtgcactggtcccggtgctgtagttatagagctgtctttgcatggacaaagctgttgcgaaactgactggggatgcgcaagcataacctcttttgttaattattgtctcgttttttttctcggcatttatctctttttcataagggcagccccgcactctgaaagtgtgcgttttgaagattgggaaaataataggttgccatcgtatgctctgtattacccaccatgctttaaatatttgagagtcgtttttaccgaaaaaaaaaaaaaaaaaagcggcc

SEQ ID NO: 4479 - DNA, 124 bp, Zea mays
  Clone ID: TF_700570940H1
ggatgactttgcctgtaagtacggggacaagtgccagttcgcacacagcatccacgttgtccgcagcctgagccgccaccccaagtattagacggagctgtgccgcaccttccagtcaacatag

SEQ ID NO: 4480 - DNA, 534 bp, Zea mays
  unsure (1)..(534): unsure at all n locations
  Clone ID: TF_LIB3959-023-Q1-N6-F11
atgttactcatatacatgtaccttgcttacgttgttcgtatttctatacattttcgtgtgaaacacatacttgacttgacttcagatgaaacagaaaccaacggttccagcgctgcggaagactgcccttcgccgtgccctgccgcgtgccgggctttgttaagggcggggcaggtggaggcgttcggcgggggtgagcgtatggcggaagtggcagcggtggccgtaggggcagacctcgccggcgaggaccatgcggcagacctgggtcttgtagcgcggatggcggatgacagggcggagctcggcgacgccgtgagcgaactggcactggtcgccgtaggggcacgcccccgtctcctcccacttgttgcacagctccgtctttaacatgccctggttgtacacctccagctccacgccgcccgccgtgcgatgctccttgggttcctcgcttctcttgtcgccgccattgcccttgtacacgcgcgagcttcggttggtggntcgggttcgacgcgcgaggcttgcggt

SEQ ID NO: 4481 - DNA, 700 bp, Zea mays
  unsure (1)..(700): unsure at all n locations
  Clone ID: TF_LIB5116-061-A1-PF1-B7
ctcttcctccctccgctgcgccccactccgcctccgccaaaccgcaagctagggtttccgcctcgacgcggagggctcgccatggatgccgccgcccgcaagagatcccggccggagtccgccaacggaggctccgcaggcgggaagcgctcgagagaatcggagtcacaacaaactggcctatcaagcaaatcgaagccttgcaccaagtttttcagcactgttgggtgcccctttggtgagggctgtcacttcgcgcactttgtccctggtggataccaggcagtatcaaaatcacacagcttaggccatgctgctgtgtctgcagcgtcaagagctcctgcggatcatgctgcttctggtgtcaaagcacgcatgtgcaccaagtacaacactgcagaaggctgcaagtttggtgacaagtgccatttcgcccacggcgagagggagcttggcaggccaccatcctcctacatgtcccaggaaagttcctatgcntcctcctatgggtggtcggatatggaggtcgacacgaaccacctccgccagcttcaatgggccctccagccggaaacttcggcgcctcgtctacctgcaaggtcagtgttgacgccgctctcgccggaggcataatcgggaagggcggggtcaacacgaagcagatctgccgcatcacgggggtcaagctctcgatacgcga

SEQ ID NO: 4482 - DNA, 1666 bp, Zea mays
  Clone ID: TF_ZmC214_1
ctcgaggccggccggggctcgtccggttcagttcagtggcgccgtcgtgcctcgacgacggcgggagacgccgcaagcaggtgagagtgagacgggcggtgactagcgggcgcttaggccgacatcggccccgcagcggcggggtagggtgcgtcgacacgcgggactgcgacttgggggggattgattcccttcgctgttctctcttctccggcgcgtgcgcgcgggatcgaaggtagggtttgggccccaaagttcgtgtctttggggacagcggcggcgatggactacaccaacgccatccacatcatcccggacgccgcgggccccgacgcctgggccaacgcggcgtcggccgcgggcgccgacgccagcatctgggccaccgaggacgactaccgccattggcaagatgttcttcaagaccaagctctgctgcaagttccgggccgggacctgtccctacgtcaccaactgcaacttcgcgcatggcatggaggagctccggaagccaccgcccaactggcaggagatcgtggccgcccacgaggaggccacggagcagcgggaggagcaccagatccccatcatgacatctggaagtgttgtagctggagacggcggcggtggcagtggtggcggctcgcaggggggcagggcattcaagggccgtcactgcaagaagttctacactgaagagggctgcccctatggtgacacatgcaccttcctgcatgatgagcagtctaaggcacgggagagcgtggccatcagtctctcgcccaccgttggtggtgggggatacaatgctgcctccgccaacggagtgatggtgcagaagccgtccaactggaagacaaggatctgtaacaagtgggagatgactggatactgcccatttgggagcaaatgccactttgctcatggttctaccgaacttcacaagtacggagggggcctcgtggacatcgacggcagggacatcttgtccactcctgattcgaagcaagccggtggctctgctaaagctcctctagagtctgctgctgcgtccactgcgttgccccctcatgcagacgtgtaccatctcggcatccagtcgcagcgctcggccatcgccagccagaggtctggacagctgcaaaggcccatccagaaatggaagggccctgacaagatcagcaggatctatggagactggatagatgagaacgaatagaagaaggatcttctacggtgggccgaagggaagctgttacttggtatccgtccgactccacatcagctggtggaagctttacctggcttagaagatctcgttagcgctgcaaaaccagagtcaagatcatctttgcaagacctgtattggggagataaactgctggaacatagtgccgctttcttccgttgaactcagtagcattgctatgcttgtgtaatttgtgtgttggatggaggagcataatagcatatagcgagtcatggtgcaccctgtacagggtggctgagctgcatcctgaaggctggttgttcaggtgcgtccgtgactgtctgttggttcttgttttcgggctattattattgggccggatatttctagccttactctttggcccattgagcagtgcgctgtgtaccaagcagttaagcccaataaacagggtat

SEQ ID NO: 4483 - DNA, 1784 bp, Zea mays
  Clone ID: TF_ZmC214_3
gcgttcgttcatggcgccgtcgtgcctcgtcgacggcgggggacgccgcaagcaggtgagagtgagacgggcggtgactagcgggcgcttaggccgacatcggccccgcagcggcggggtagggtgcgtcgacacgcgggactgcgacttgggggggattgattcccttcgctgttctctcttgtggggggcgggcgcgcgggatcgaaggtagggtttgggccccaaagttcgtgtctttggggacagcggcggcgatggactacaccaacgccatccacatcatcccggacgccgcgggccccgacgcctgggccaacgcggcgtcggccgcgggcgccgacgccagcatctgggccaccgaggacgactaccgccagtggagcgccgaaccaggctacggcgaccggaacccctcgtcgcgggcggggagcgagcagccgccgccgggcaagaaggctcgcggcgggggcggcggcagcgatagcggcggcggtggcagcacgagcaagtcgcgcgccattggcaagatgttcttcaagaccaagctctgctgcaagttccgggccgggacctgtccctacgtcaccaactgcaacttcgcgcatggcatggaggagctccggaagccaccgcccaactggcaggagatcgtggccgcccacgaggaggccacggagcagcgggaggagcaccagatccccatcatgacatctggaagtgttgtagctggagacggcggcggtggcagtggtggcggctcgcaggggggcagggcattcaagggccgtcactgcaagaagttctacactgaagagggctgcccctatggtgacacatgcaccttcctgcatgatgagcagtctaaggcacgggagagcgtggccatcagtctctcgcccaccgttggtggtgggggatacaatgctgcctccgccaacggagtgatggtgcagaagccgtccaactggaagacaaggatctgtaacaagtgggagatgactggatactgcccatttgggagcaaatgccactttgctcatggttctaccgaacttcacaagtacggagggggcctcgtggacatcgacggcagggacatcttgtccactcctgattcgaagcaagccggtggctctgctaaagctcctctagagtctgctgctgcgtccactgcgttgccccctcatgcagacgtgtaccatctcggcatccagtcgcagcgctcggccatcgccagccagaggtctggacagctgcaaaggcccatccagaaatggaagggccctgacaagatcagcaggatctatggagactggatagatgagaacgaatagaagaaggatcttctacggtgggccgaagggaagctgttacttggtatccgtccgactccacatcagctggtggaagctttacctggcttagaagatctcgttagcgctgcaaaaccagagtcaagatcatctttgcaagacctgtattggggagataaactgctggaacatagtgccgctttcttccgttgaactcagtagcattgctatgcttgtgtaatttgtgtgttggatggaggagcataatagcatatagcgagtcatggtgcaccctgtacagggtggctgagctgcatcctgaaggctggttgttcaggtgcgtccgtgactgtctgttggttcttgttttcgggctattattattgggccggatatttctagccttactctttggcccattgagcagtgcgctgtgtaccaagcagttaaggccaataaacagggtat

SEQ ID NO: 4484 - DNA, 1523 bp, Zea mays
  Clone ID: TF_ZmC1969_2
caatactatctgaagactggcacatgcaagtttggagcaacttgcaagtttcatcatccccgagaaaaggctgcaatggcaactcgagttcagctgaatgaactgggctacccactccgcctgaatgaaaaggaatgtgcttattatttaagaacagggcagtgcaagtttggaagcacatgtaagtttcaccatccacaaccatccactatgatggttgccgtacgtggctctgtttattcacctggacagtctgcaacttctcctggccatcatgcttaccagggggctgtaacaagctggcccttgtcgagatctgcttctttcattgcaagtccaaggtggccaggtcattcaagttatgcacaagttattgttcctcctgggcttgttcaggtcccagggtggagtccttatgctgcgcagattggttcttcatcctcggatgaccaacaacggacacctggagctgcccaatactatactggctcacgccagagtggaacacctggcataggcgatcgaggaatgttttcatcctaccaagcaggttctgttcccgttggactttatgcagtacagacggagaatgtatttccagagagacctgaccaacctgaatgtcagttctatatgaagaccggagactgtaagtttggttctgtatgcaagttccatcatcccagggagcgaataattcctactcccaattgtgcactaagtccattaggcctacctttgcgcccgggagaaccaatatgcagtttctataatcgctatggcatgtgcaagtttggtccaaattgcaaatttcatcatccgatgggaaaccctatgtatggccatgcttcatcaccgacaagtgaggcccaaacatctcggcgtatgctggcacatgtaccatcgcatccagaagtatcacctgacagtggctcgggaaggtctaggaggattgttcattcagattcccagcaaataccctctgttgaaaggatcaccgagagagaggcgtcctaagccatcctcggtgtcttcgttcatgctgcctcccctcccctcccctcccattcttgacgagtaattaaatgcaacaacatctgagaatccgaagctgtacaggtcttttgcctcatctttgagctttacataccggagcttgcttcaacatgtattgcatccaggcatgaaaaagttcttgccggttcgggatgctcatttgcccccataaaaacgggaacaaacctaccttatttaaacatatgtatgaaactcactcacctctggacattcaaacccattcgagtaatggtcccggtgttgtagtttatagagctgtgtttcagtggacaaacctttgcgaaactgactggggatgcgcaagcatagcctcctttattaattattatctcgtttttttcctagcatctctcttttcataagggcaacccaaagtgttggaataatagattgccaccataatgctctgtattacccaccatatttaaacctggttacttgtgagt

SEQ ID NO: 4485 - DNA, 601 bp, Zea mays
  Clone ID: TF_ZmC258661_1
aattcggcacgaggggacaatcacagatggtaatgatgtggaagatcaagaggtgcacagagagaaggttggtctctctgaagggtacccacagaagcctggtaaactgaactgtcgtttttacatgtcaacagggaggtgctcatatgggtcatcgtgccacttcaatcatccacggctcaaagcaaaactagaagtttcaagtttcccttctgaacaaagaaatcatgaagctgaatttctggaactgaaccgtgttggcctccccattagagaaggagcaaggaagtgtatctattacatgcgtaatggtacatgcagatatggaaagaaatgttgttttaaccatccagagcaagttcttgatgttcaacaccacactgcaacaggatgggatgatactaacttgcaatcttcaccacactcaaagaagttacctgaacataaaactatggatgacatatcgtctggatctgaggttcttcctccaaacatacttcggatgcttttacctccccagaatgtgccccctagtacaaaagaaaaggaaatcaggataaaaaaggatcctgattgggcttcagcttcagatgattctgat

SEQ ID NO: 4486 - DNA, 804 bp, Zea mays
  Clone ID: TF_ZmC218_39
ggaagtcgccaccacggtcacgggttgtccctcctgtgctgtgggctcgggctgcggctcctcccgtggctcctcctggaacgcccaccatatagcttcctcctgagctccctaccaatctgcttcacgtgcatgaagttgcagtagccaccacggttgcagctgttctcctcaaactgcctgcaggtagcctcacggaagtccgtgacaggggagtactccacgatgatcgggcgaccagagtagaagcggccttggagggcgttgtgagcagccactgcctgctcttcctccctgaactggacatagacattcccgatcatgtggtcagcaaggttgtcacacacgttcagggtctcaacctcaccaaacttgctcagctcctcgtagatatcctcatagaagtcctcaaagtgctcctgcatcttctctggagcaatagccacaccttgggcatcgactccaggggtgatcatatcaggtcgctggtacatgttagcaagcacaatagttggcgatgtggttggcctgttgtgcagacgggagcaacgatccccatgacggcaagctccaatcttgaagtaaaaggggcagttgaccctatccttctccgtgccaaaaattgaagccaagtgctccgccattgttttgggagcacttcagatgatgctgaagctcgggagcgggaggacggcggctatcctctcgatcgatccggcggcttcgctgccgcggccgctggttgacggaggaggcgcacctgacctggctgtggcggcgcggcggaggaggcagagaggggtc

SEQ ID NO: 4487 - DNA, 2000 bp, Zea mays
  Clone ID: TF_ZmC218_81
aacaagaaatccgccatggaacagcataacacacgactgaaagccagatggcaaatctagtgacaaaccacaactgacatcatcataagctaatagcacaccacaaaagatttgacaccaattgtcaaaataacataatagcaaaggatccgacacaacacagatggaaacaaatgatgtctggtttaaccataaaatgaaccgaggaatcctgatcttaaaaggttttacttagccatgcagaatgcaatccacacaagcatacttagaatatagcgatgagagccggagctaagcaacaagtccggcgaacagtagccacggagagctcactgttttccctcccgttcacggttccactgctcaatcttggcccttcgctcctcgctgctttccctgactgggctccttgcacgccttggggggctaccatgcctgcgccttcctccatcatcatacctgtcatgtctgccgcctctgcctgctccatcatcatacctgtcatgcctgccacctctgcctgctccatcatcgtacctgtcatacctgctacctcttccccttccaccaccgccgccaccacggtagtcatcacggtcacggtggtggtagtcatcacggtcacggtggcccctcctttgtggtggcgggcttcggcttcggcttctcccatggtacctcctggaagcagaacgcccatacagcttcctcctgagatccctgccaatttgcttcacatgcatgaaattacagtagccaccacggttgcagctgttctcctcaaactgcctacaggttgcttcacggaagtcggtcacaggagaatactcaacaattatagggcggccagagtaaaagcgcccctgaagagcattgtatgctgcggctgcttgctcttcctccctgaactggacatagacattcccaatcatgtggtcagcaaggttatcacaaacattcagattctcaatctcaccaaacttccccaactcctcatagatgtcctcatagaagtcctcaaaatgctcctgcatcttctcagggtcaataggttggccttgagcatcaactccaggggttatcatatcagggcgctgatacatgttagcaagcacaagagttggtgatatagttggcctgttgtgcagacgagagcagcgatccccatgacgacaggccccaatcttgaagtaaaaagggcagttgaccctgtccttctcagtgccgaagatcgaagccaagtgctccgccatgattcaacccgcagaccggcaacagctgttcgcctgtcgcacaaagggtgttccttctggtgtaggccttgtattatccgcccgacaaatttttttgattttaacctaagctgcacaccattttagattattaatatctgatagaaacgaaacaaacaaccgaaatcgcagttaaagctaccaccaagaaaaggcaacatccattagtagactaatatagctgacaatatacccagtaatctggcaaaatatgtcaccaacctaaagaagtaaatctcaacgaatacaagttaatgtagtgattctagaagttgattcaatcggctaaaagatagctaaaattcctacatatgcccaggcggacccagtagggaagatgagcggccccatgtttttattttgcaagaaaatcaagttagaaagcataatactacacgtatacacctgaaattagatccgatccaaacgcaaatagccaaaacagtgtcagctagggtttgggtcctcagcttcgcacagcgggaagggaagagaaggggtgcgcatacctgttggctgctcttcggcgaagggcccgacgaagacctgggcacctggcgtagagcggcgggggcggggaggtcacccagtcgtcgccacgagagagagagagaggacgccggctgaacgacgcaagataaagaacgggtccaaacagccagttcaccctagtgctggacgctggtttcgaatttccgctggacggag

SEQ ID NO: 4488 - DNA, 2016 bp, Zea mays
  Clone ID: TF_ZmC218_83
gacaccaattgtcaaaataacataatagcaaaggatccgacacaacacagatggaagcaaatgatgtctggtttaaccataaaatgaaccgaggaatcctgatcttaaaaggttttacttagacaggcagaatgtcatccacacaagcatacttagaatatagcgatgagagccgagctaagcaacaagtccggcgaacagtagccaccgagagctcactgttttccctcccgttcacggttccactgctcaatcttggcccttcgctcctcgctgctttccctgactgggctccttgcacgccttgaggggctaccatgcctgcgccttcctccatcatcatacctgtcatgtctgccgcctctgcctgctccatcatcatacctggcatgcctgccacctctgccggctccgtcatcgtacctgtcatacctgctacctcttccccttccaccaccgccgccaccacggtagtcatcacggtcacggtggtggtagtcatcacggtcacggtggcccctcctttgtggtggcgggcttcggcttcggcttctcccatggtacctcctggaagcagaacgcccatacagcttcctcctgagatccctgccaatttgcttcacatgcatgaaattacagtagccaccacggttgcagctgttctcctcaaactgcctacaggttgcttcacggaagtcggtcacaggagaatactcaacaattatagggcggccagagtaaaagcgcccctgaagagcgttgtatgctgcggctgcttgctcttcctccctgaactggacatagacattcccaatcatgtggtcagcaaggttatcacaaacattcagattctcaatctcaccaaacttccccaactcctcatagatgtcctcatagaagtcctcaaaatgctcctgcatcttctcagggtcaataggttggccttgagcatcaactccaggggttatcatatcagggcgctgatacatgttagcaagcacaagagttggtgatatagttggcctgttgtgcagacgagagcagcgatccccatgacgacaggccccaatcttgaagtaaaaagggcagttgaccctgtccttctcagtgccgaagatcgaagccaagtgctccgccatgattcaactcgcagaccggcaacctcaataaaggtcctcagtgtgcaaggctaagtagacaaaaacgaacaaaagcagctaaaacaaatcagggttcacagcatgtgcatcttataggatcaccaagtaatattcattcctgcaagtttaccccctgtacagccacgtgtgtaaatggaaaattctacagctcaggctctggcaataaaatcttaatcgcaatccctttttaagacctaatctgcacacttactcaaaaggttaaatattaggagaagtgaacagaaaaaccaaaataactgtgtcatcagggcatgttcttgctcctagtaactgatactacactttttacctatataataattaataaatctgcaagttaattcccaaaaatcacctaaatttaaacagcgtgaaagtctctctccactattattgttaagagtgtttgctgcagctagctgcagctgccactccaacttctaagctgcaaatactataagaagcctgctgcatctgctgcggctgtgcttctagctgcagtgaacatgccttagttttctcccctgcaactgcatataatgaaccaaataatactgcagagagagatagagacagctgttcgcctgtcgcacaaagggtgttccttctggtgtaggccttgtattatccgcccgacaaatttttttgattttaacctaagctgcacaccattttagattattaatatctgatagaaacgaaacaaacaaccgaaatcgcagttaaagctaccaccaagagaaggcagaatccattagtagactaacatagctgacaatatacccagtaatctggcaaaatatgtcaccaacctaaaaagtaaatcgcaacgaat

SEQ ID NO: 4489 - DNA, 2029 bp, Zea mays
  Clone ID: TF_ZmC218_85
ggccgcttttttttttttttttttaacttaatagctcatcacaaaagatttgataccaattgtcagcataacataatggcaaatgattcaacacaatccacaaggaaataaatagagtttacatgtccgatttaaccacaaaattgaactgagtcctgcactcaagcatatcagccacacaagcatacttagaatatagcagtgaaagacgagctaagcaacaagtccaccgaataacacgtctcagaacagttgccacagagagctcactgttttgactcccgctcacggttccactgctcaatcttggcccttcgctcctcgctgctttccctgaccgggctccttccacgcctcggggggctaccatgcctacgccttcctccatcatcatacctctcatacctgccgcctctacccgctccatcatcgtacctgtcatgcctgccgcctctacctgctccatcatcatacctgtcatgcctgctacctcttccccgtccaccgccgccgccgccgccgccacggtactcgtcacgatcacggtggtgatagtcctcacgatagcccctcctttgcggtggagggcttcggcttctcgcatggtacctcctggaagcagaacgcccatacagcttcctcctgagatccctgccaatttgcttcacatgcatgaaattacagtagccaccacggttgcagctgttctcctcaaactgcctacaggttgcttcacggaagtcggtcacaggagaatactcaacaattatagggcgcccagagtaaaagcgcccctgaagagcattgtatgctgcagctgcctgttcttcctctctgaactgaacatagacattcccaatcatgtggtcagcaaggttatcacaaacattcagattctcaatctcaccaaacttgcccaactcctcatagatgtcctcatagaagtcctcaaaatgctcctgcatcttctcaggatcaataggttggccttgagcatcaactccaggagttatcatatcagggcgctgatacatgttagcaagcacaagagttggcgatatagttggcctgttgtgcagacgagaacagcgatccccatgacgacaagccccaatcttgaagtaaaaagggcagttgaccctgtccttctcggtaccaaagatcgaagccaagtgctccgccatgattcaacttgcagactgacaacctcgataaaggtcctcagtgtgcaagactaagtagacaaaacgaacacaagcagctaaaacaaatcagggttcacagcacattatcttataggatcaccaagtaatattcctgtcaatttaccccctgtacagcccactgtgtaaatggataattctacagctcaggctctggcaataaaatattaatcgcaatccctttttaagacctaatctgcacacttactcaaagggttaaatattaggagaagtgaacagaaaaaccaaaataactgtgtcatcagggcaagttcttgctcctagtaactgatactacactttttacctatataataattaataaatctgcaagttaattcccaagaatcacctaaatttaaacagcgtgaaagtctctctccactattattgttaggagtgtttgctgcagctagctgcagctgccactgcaacttctaagctgcaaatactgtataagaagcctgctgcatctgctgcggctgtgattctagctgcagtgaacaggccttagttttctcccctgcaactgcatataataaaccaaataacgctgcagagagagatagagacagctgttcgcctgtcgcacaaagggtattccttctggtgtaggccttgtattatccgcccggcaattttttttattttaacctaagctgttggctgctcttcggcgaagggcccgacgaagatctgggcacctggcgtagagcggcgggggcggggaggtcgcccagtcgtcgccacgagagagagagaggacgccggacgcaagataaaccccggcccggccggcctcgagg

SEQ ID NO: 4490 - DNA, 1996 bp, Zea mays
  Clone ID: TF_ZmC218_87
cgatggaacctgctccgtgctactgcacatagtacaatgacggcagcccaagcactgtctaggaggcattgagcaaaaatgagaagagggaaaacaagaaatccgccatggaacagcataacacacgactgaaagccagatggcaaatctagtgacaaaccacaactgacatcatcataagctaatagcacaccacaaaagatttgacaccaattgtcaaaataacataatagcaaaggatccgacacaacacagatggaaacaaatgatgtctggtttaaccataaaatgaaccgaggaatcctgaattcctgatcttaaaaggttttacttagccaggcagaatgccatccacacaagcatacttagaatatagcgatgagagccggagctaagcaacaagtccggcgaacagtagccacggagagctcactgttttccctcccgttcacggttccactgctcaatcttggcccttcgctcctcgctgctttccctgactgggctccttgcacgccttgaggggctaccatgcctgcgccttcctccatcatcatacctgtcatgtctgccgcctctgcctgctccatcatcatacctgccatgcctgccacctctgcctgctccgtcatcgtacctgtcatacctgctacctcttccccttccaccaccgccaccaccacggtagtcatcacggtcacggtggtggtagtcatcacggtcacggtggcccctcctttgtggtggcgggcttcggcttcggcttctcccatggtacctcctggaagcagaacgcccatacagcttcctcctgagatccctgccaatttgcttcacatgcatgaaattacagtagccaccacggttgcagctgttctcctcaaactgcctacaggttgcttcacggaagtcggtcacaggagaatactcaacaattatagggcggccagagtaaaagcgcccctgaagagcgttgtatgctgcggctgcttgctcttcctccctgaactggacatagacattcccaatcatgtggtcagcaaggttatcacacacattcagattctcaatctcaccaaacttccccaactcctcatagatgtcctcatagaagtcctcaaaatgctcctgcatcttctcagggtcaataggttggccttgagcatcaactccaggggttatcatatcagggcgctgatacatgttagcaagcacaagagttggtgatatagttggcctgttgtgcagacgagagcagcgatccccatgacgacaggccccaatcttgaagtaaaaagggcagttgaccctgtccttctcagtgccgaagatcgaagccaagtgctccgccatgattcaactcgcagaccggcaacctgttggctgctcttcggcgaagggcccgacgaagacctgggcacctggcgactggcgtagagcggcggggacggggaggtcgcccaatcgtcgccacgagagagagagagagagagagagagagagagagagagagagaggacgccggctgaacgacgcaagataaagaacgggtccaaacagccagttcaccctagtgctggacgctggtttcgaatttccgctggacgctggacggatggacgccggctggttcctagtgctggttcctgggacctgggtgtggccgcgtgggattagggagtagggacgccggctggttcctagtgctggacgctggtttcgaatttccgctggacgctggacggagtggacgccggctggttcctagtgctggttcctgggacctgggtgtggccgcgtgggattagggagtagggacaggggcagggcggcgctggtggtgctgtcgtgctggagcggtggagcctggagctggacagcctgggcgtgggattgccggagccggatcggggtccggggagaaaggcgtcacggcgacaaggatggggaatgggggggcggccgccgcgacgagaacagaccctcgtgccgaatt

SEQ ID NO: 4491 - DNA, 3319 bp, Zea mays
  unsure (1)..(3319): unsure at all n locations
  Clone ID: TF_ZmC218_93
tgaattcggcacgaggctcgtcgtggcggccgccccccattccccatccttgtcgccgtgacgcctgacgccttctccccggaccccgatccggctccggcaatcccacgcccaggctgtccagctccaggctccaccgctccagcacgacagcaccaccagcgccgccctgcccctgtccctactccctaatcccacgcggccacacccaggtcccaggaaccagcactaggaaccagccggcgtccactccgtccagcggaaattcgaaaccagcgtccagcactagggtgaactggctgtttggacccgttctttatcttgcgtcgttcagccggcgtcctctctctctctctcgtggcgacgactgggcgacctccccgcccccgctgctctacgccaggtgcccaggtcttcgtcgggcccttcgccgaagagcagccaacaggttgccggtctgcgagttgaatcatggcggagcacttggcttcgatcttcggcactgagaaggacagggtcaactgccctttttacttcaagattggggcctgtcgtcatggggatcgctgctctcgtctgcacaacaggccaactatatcaccaactcttgtgcttgctaacatgtatcagcgccccgatatgataacccctggagttgatgctcaaggccaacctattgaccctgagaagatgcaggagcattttgaggacttctatgaggacatctatgaggagttggggaagtttggtgagattgagaatctgaatgtttgtgataaccttgctgaccacatgattgggaatgtctatgtccagttcagggaggaagagcaagcagccgcagcatacaatgctcttcaggggcgcttttactctggccgccctataattgttgagtattctcctgtgaccgacttccgtgaagcaacctgtaggcagtttgaggagaacagctgcaaccgtggtggctactgtaatttcatgcatgtgaagcaaattggcagggatctcaggaggaagctgtatgggcgttctgcttccaggaggtaccatgggagaagccgaagccgaagcccgccaccacaaaggaggggccaccgtgaccgtgatgactaccgtggtggcggcggtggtggaaggggaagaggtagcaggtatgacaggtacgatgatggagccggcagaggtggcaggcatgacaggtatgatgatggagcaggcagaggcggcagacatgacaggtatgatgatggaggaaggcgcaggcatggtagccccccaaggcgtgcaaggagcccagtcagggaaagcagcgaggagcgaagggccaagattgagcagtggaaccgtgaacgagagggaaaacagtgagggctactgttcgccggactctctcatccctatattctaagtatgcttgtgtggatgacattctgcctggctaagtaaaacctttttaagatcaggattcctcggttcattttatggttaaaccagacatcatttgtttccatctgtgttgtgtcggatcctttgctattatgttattttgacaattggtgtcaaatcttttgaggtgtgctattagcttatgatgatgtcagttgtggttaaaaaaaaaaaaaaaaaactcgaggtcgacggtatcgataagcttgatatcgaattcggcacgagcttttagtgagcgcaacaaatgcgttcattattccacagtgctcacttgctcctagtgccattattccacagttcctcccaccagttacttcaatgggcttcgaacatccagccgtgcaagcctacaggctacaactagcgcttgcggcgagcgccttacaacaaccaattgcccaattgcaacaacaatccttggcacatctaaccctacaaaccattgcaacgcaacaacaacaacaacaacagtttctgccatcactgagccacctagccgtggtgaaccctgtcacctacttgcaacagcagctgcttgcatccaacccacttgctctggcgaacgtagctgcataccagcaacaacaacagctgcaacagtttatgccagtgctcagtcaactagccatggtgaaccctgccgtctacctacaactactttcatctagcccgctcgcggtgggcaatgcacctacgtacctacaacaacagttgctgcaacaaattgtaccagctctgactcagctagctgtggcaaaccctgctgcctacttacaacagttgcttccattcaaccaactggctgtgtcaaactctgctgcgtacctacaacagcgacaacagttacttaatccattggcagtggctaacccattggtcgctaccttcctgcagcagcaacaacaattgctgccatacaaccagttctctttgatgaaccctgccttgcagcaacccatcgttggaggtgccatcttttagattacatatgagatgtactcgacaatggtgccctcataccgacatgtgtttcctagaaataatcaatatattgattgagatttatctgantaagaggctcagtgctggtaggaactgttgttgttgctgttgcgttgcgatggtttgtattgttagatgtgccaaggattgttgttgcaattgggcaattggttgttgtaagacgctcgccgcaatcgcttgttgtagcctataggcttgcacagctgggtgtcccccactgaagaaactatgtgctgtagtatagccgctggctagctagctagttgagtcatttagcggcgatgattgagtaataatgtgtcacgcatcaccatgggtggcagtgtcagtgtgagcaatgacctgaatgaacaattgaaatgaaaagaaaaaagtattgttccaaaaaaaaaaaaaaaaaactcgagccccggccacggccaccatggccacggcgggtacgggtacgggcgcccggcgatgccgcagtacccgccgccgccggcgtactactacccgatgccgcagcgccacccgcacgacagcatgttcagcgacgagaaccccaacgggtgctcggtgatgtgaggcgaggcgcggcggcggcctgcggggggctccggagaaagtgaaccaggcaaccagccagccagccaaccggaaggagggagctcgggcccgtcaggtcggaggcggccgccgtgagtggaagagtcgtcgtcggtatacatgaagaaaaaaaaactagctatatgctatagcaccagccgtaacctcgccgccccatttcgttttcgtctttcccctagtttgttttcacctttggtactttttgtttcccttctctgaacaaagaaagatcaaa

SEQ ID NO: 4492 - DNA, 709 bp, Zea mays
  Clone ID: TF_ZmC218_25
accataaaatgaaccgaggaatcctgatcttaaaaggttttacttagacaggcagaatgtcatccacacaagcatacttagaatatagcgatgagagccgagctaagcaacaagtccggcgaacagtagccaccgagagctcactgttttccctcccgttcacggttccactgctcaatcttggcccttcgctcctcgctgctttccctgactgggctccttgcacgccttgaggggctaccatgcctgcgccttcctccatcatcatacctgtcatgtctgccgcctctgcctgctccatcatcatacctggcatgcctgccacctctgccggctccgtcatcgtacctgtcatacctgctacctcttccccttccaccaccgccgccaccacggtagtcatcacggtcacggtggtggtagtcatcacggtcacggtggcccctcctttgtggtggcgggcttcggcttcggcttctcagggtcaataggttggccttgagcatcaactccaggggttatatcagggcgctgatacatgttagcaagcacaagagttggtgatatagttggcctgttgtgcagacgagagcagcgatccccatgacgacaggccccaatcttgaagtaaaaagggcagttgaccctgtccttctcagtgccgaagatcgaagccaagtgctccgccatgattcaactcgcagaccgg

SEQ ID NO: 4493 - DNA, 1647 bp, Zea mays
  Clone ID: TF_ZmC1784_1
tttcgaccctccctcgggccggatccccaatcagcgggtccgtactcatctgcttcacctccgggttccggctacggcggcactcttctctggcaaccggaaatccagcgggtccgtactcatctgcttcacctccgggctccggctacggcggcactcttctctggcaaccggtcggaagatgttggatcttccgcttcaaatcgacgcataaaggatgcagattagttttgttcgcgtcaaatttattttgctcggtgtagttctgtccattaattaattatttgtactggatttaaggtgctgctattttgaaggttttttctcccggaaattttcacatcccgaaacgactggaaattgaagtagccatttgatgctgttacctgggttcataagttgttagacttgttgttatttgtttgttaatcctatagctattgcatattgtgtgcctgatcaggaccacagaaacatctaggcgacgagtcgagcaggtagaggagtaatcaggcatccatggctgagcatcttgcgtccatctttggcacggagaaggaccgcgtgaactgccccttctacttcaagatcggcgcatgccgccacggcgaccggtgctcccgcctgcacaacaagccttccatctccccgacgctgctgctctgcaacatgtaccagcggccggacatgatcaccccgggcgtggacgcgcagggcaaccccatcgacccggagcggatccaggaggacttcgaggacttctacgaggacatcttcgtggagctgagcaagcacggcgagatcgagagcctccacgtctgcgacaacctcgcggaccacatgatcgggaacgtgtacgtggagttccgcgaggaggagcaggcggcccgcgccctgcaggcgctgcagggccgctactactcgggccgacccatcatcgccgagttctcgccggtgactgacttccgggaggccacctgccgccagttcgaggagcacagctgcaaccgcggcggatactgcaactttatgcacgtcaagcaggtcggccgggacctgcggcggaagctgtttggccacctgcatcgctccctccggagccacagccggggcagccgcagcccgagcccataccgccgccgcggtagctcgtccaggtccagggaccgcgacgattacccgactactactactactactaccgtagtggcagtggcagccgcaggagcagcgagagacaccgcagccacgacagcgacgggagccgccgtcgacgcgggcggtcgaggagccggagccggagcccggtgagggaaggcagcgaggagcggagggcaaagattgagcagtggaaccgcgagcgggaggcagctcaggtgtaagcaagttccccttccctagttgccatgttggttgctgcagtgttattggccttgctagttgccatgttgctgttgctgaagcctgttatcatgtattgtggtgtggttcaggcagggtaaggccataaattgagcctgaaattggactgtgatctcttttgctgtggacgggttaccattaaacttgatttggatgtgctgatggaaaccacggtttttaatactataataaaaaaaaagaaaaaaaaaaaaaaaaaaagcggcc

SEQ ID NO: 4494 - DNA, 1821 bp, Zea mays
  Clone ID: TF_ZmC1784_2
tacaacacccagtagtaatccagcgggtccgtactcatctgcttcacctccgggctccggctacggcggcactcttctctggcaaccggaccacagaaacctctaggcgacgaatcgagcaggtagaggagtaatcaggcatccatggctgagcatcttgcgtccatctttggcacggagaaggaccgcgtgaactgccccttctacttcaagatcggcgcatgccgccacggcgaccggtgcttccgcctgcacaacaaggcttcctttttcccttcggcgcgtgcccccccccctttccttcagccctctttttttttttccatgccgcctcgcgcagggaagcccatcgtcccggaacggggcccttcggaggcggtgctaatccagcgggtccgtactcatctgcttcacctccgggctccggctacggcggcactcttctctggcaaccggtcggaagatgttggatcttccgcttcaaatcgacgcataaaggatgcagattagttttgttcgcgtcaaatttattttgctcggtgtagttctgtccattaattaattatttgtactggatttaaggtgctgctattttgaaggttttttctcccggaaattttcacatcccgaaacgactggaaattgaagaccacagaaacctctaggcgacgaatcgagcaggtagaggagtaatcaggcatccatggctgagcatcttgcgtccatctttggcacggagaaggaccgcgtgaactgccccttctacttcaagatcggcgcatgccgccacggcgaccggtgctcccgcctgcacaacaagccttccatctccccgacgctgctgctctgcaacatgtaccagcggccggacatgatcaccccgggcgtggacgcgcagggcaaccccatcgacccggagcggatccaggaggacttcgaggacttctacgaggacatcttcgtggagctgagcaagcacggcgagatcgagagcctccacgtctgcgacaacctcgcggaccacatgatcgggaacgtgtacgtggagttccgcgaggaggagcaggcggcccgcgccctgcaggcgctgcagggccgctactactcgggccgacccatcatcgccgagttctcgccggtgacggacttccgggaggccacctgccgccagttcgaggagcacagctgcaaccgcggcggatactgcaactttatgcacgtcaagcaggtcggccgggacctgcggcggaagctgtttggccacctgcatcgctccctccggagccacagccgaggcagccgcagcccgagcccataccgccgccgcggtagctcgtccaggtccagggaccgcgacgattaccacgactactactaccactactaccgtagtggcagtggcagccgcaggagcagcgagagacaccgcagccacgacagcgacgggagccgccgtcgacgcgggcggtcgaggagccggagccggagcccggtgagggaaggcagcgaggagcggagggcaaagattgagcagtggaaccgcgagcgggaggcagctcaggtgtaagcaagttccccttccctagttgccatgttggttgctgcagtgttattggccttgctagttgccatgttgctgttgctgaagcctgttatcatgtattgtggtgtggttcaggcagggtaaggccataaattgagcctgaaattggactgtgatctcttttgctgtggacgggttaccattaaaaaaaaaaaaaaaaaaaaaaaaaaaaaaaaaaaaaaaaaaaaaaaaaaaaaaaaaaagggaaaaacggtacc

SEQ ID NO: 4495 - DNA, 1699 bp, Zea mays
  Clone ID: TF_ZmC1784_3
aatccagcgggtccgtactcatctgcttcacctccgggctccggctacggcggcactcttctctggcaaccggtcggaagatgttggatcttccgcttcaaatcgacgcataaaggatgcagattagttttgttcgcgtcaaatttattttgctcggtgtagttctgtccattaattaattatttgtactggatttaaggtgctgctattttgaaggttttttctcccggaaattttcacatcccgaaacgactggaaattgaagtagccatttgatgctgttacctgggttcataagttgttagacttgttgttatttgtttgttaatcctatagctattgcatattgtgtgcctgatcaggaccacagaaacatctaggcgacgaatcgagcaggtagaggagtaatcaggcatccatggctgagcatcttgcgtccatctttggcacggagaaggaccgcgtgaactgccccttctacttcaagatcggcgcatgccgccacggcgaccggtgctcccgcctgcacaacaagccttccatctccccgacgctgctgctctgcaacatgtaccagcggccggacatgatcaccccgggcgtggacgcgcagggcaaccccatcgacccggagcggatccaggaggacttcgaggacttctacgaggacatcttcgtggagctgagcaagcacggcgagatcgagagcctccacgtctgcgacaacctcgcggaccacatgatcgggaacgtgtacgtggagttccgcgaggaggagcaggcggcccgcgccctgcaggcgctgcagggccgctactactcgggccgccccatcatcgccgagttctcgccggtgacggacttccgggaggccacctgccggcagttcgaggagcacagctgcaaccgcggcggatactgcaactttatgcacgtcaagcaggtcggccgggacctgcggcggaagctgtttggccacctgcatcgctccctccggagccacagccggggcagccgcagcccgagcccataccgccgccgcggtagctcgtccaggtccagggaccgcgacgattaccacgactactactaccactaccgtagtggcagtggcagccgcaggagcagcgagaggcaccgcagccacgacagcgacgggagccgccgtcgacgcgggcggtcgaggagccggagccggagcccggtgagggaaggcagcgaggagcggagggcaaagattgagcagtggaaccgcgagcgggaggcagctcaggtgtaagcagagcaggttccccctcccctgtggccatgatggttgctgcattgttattggccttgctagttgccatgttgctgttgctgaagcctgttatcatgtattgttgtgtggctcaggcagggtaaggccataaattgaacctgaaattggactgtgatctcttttgctgtggacgggttaccattaaacttgatttggatgtgctgatggaatctagttgctgtttgagtaaggcttaccgtggtgagtcggcggccagcgagtacgtccatccattgggcgttgagattgagcagtggaacccagaatgtgtgacggatacgatttcgagagtagtagaaagtattgacttccgtgcagacccgatcaaactgtagatcggaactcatcctctaaggctataacacatttactattttg

SEQ ID NO: 4496 - DNA, 1099 bp, Zea mays
  Clone ID: TF_ZmC1784_4
ccggccgggatagaagcccggccggggaagcaccccggaatccagcgggtccgtactcatctgcttcacctccgggttccggctacggcggcactcttctctggcaaccggaccacagaaacatctaggcaacgagtcgagcaggtagaggagtaatcaggcatccatggctgagcatcttgcgtccatctttggcacggagaaggaccgcgtgaactgccccttctacttcaagatcggcgcatgccgccacggcgaccggtgctcccgcctgcacaacaagccgtccatctccccgacgctgctgctctgcaacatgtaccagcggccggacatgatcaccccgggcgtggacgcgcagggcaaccccatcgacccggagcggatccaggaggacttcgaggacttctacgaggacatcttcgtggagctgagcaagcacggcgagatcgagagcctccacgtctgcgacaacctcgcggaccacatgatcgggaacgtgtacgtggagttccgcgaggaggagcaggcggcccgcgccctgcaggcgctgcagggccgctactactcgggccgacccatcatcgccgagttctcgccggtgactgacttccgggaggccacctgccggcagttcgaggagcacagctgcaaccgcggcggatactgcaactttatgcacgtcaagcaggtcggccgggacctgcggcggaagctgtttggccacctgcatcgctccctccggagccacagccggggcagccgcagcccgagcccataccgccgccgcggtagctcgtccaggtccagggaccgcgacgattactactaccactactaccgtagtggcagtggcagccgcaggagcagcgagagacaccgcagccacgacagcgacgggagccgccgtcgacgcgggcggtcgaggagccggagccggagcccggtgagggaaggcagcgaggagcggagggcaaagattgagcagtggaaccgcgagcgggaggcagctcaggtgtaagcaagttccccttccctagttgccatgttggttgctgcagtgttattggccttgctagttgccatgttgctgttgctg

SEQ ID NO: 4497 - DNA, 1298 bp, Zea mays
  unsure (1)..(1298): unsure at all n locations
  Clone ID: TF_ZmC17484_1
aaaaaggatcctgattgggcttcagcttcagatgattctgatggcggctgctcggcagagactgcagatgggcctttgtgcaagcaggaacatgaggactatcctgagaggcctgaatgccctttccttcttagatttggtaattgtaagtttgcatcatcatgccaatattaccacccaaaagacaaattttcaagtacctaccatccagaagacaaattccaaagtcgataccatcaaaaagaaaaatcaagtcgacaccatccaaaaaaagagccagcactgtcaggagaactgatggtttatcctgacagacctagtgaacctgactgccccttctatgtgaaaactgggtcctgtaaatttggggcaaactgtaagtttcatcacccgaaggatataactccaaacatgcagggtccagcaagtccaaaaaggtcggtcgctgcaaaagagcaccacgcagcagctagagcgacattacaagaccagatgtaccagcaacaaaaattccctgagcggcctggccaaccagattgccggtactacatgcaatttgggaaatgtaaatttcaatcagcttgtatattcaatcattcaaaagacatactttcaagtgggtggcatccagcagaatgcccattctacatgaaaactaggacatgccaatttggatcagcttgtgagttttatcacccaaaagatcggtgctcaggcagagggggagtgattgatggtactgactatggacatgattttgccacgaagtcacggaatgttctgcaggaactggcaatatatcctgaaaggcctgatgaacttgagtgttctcactacatgaagcatggctactgtaaatataagatgaactgcaaatttcatcatccaagagatcgtcttccaaagaaataggaccatttgctacaaccactgttgtaactggctgtcgttgatgagtggagcaagtactgatgatgggacagaaatgcaggaaggaagccatagtcttccttttttgaagagctcgattctactcatgtctatgtcgaatttctgccctagtgtcgttagagttctcgtaccagatgcgaactgcctggtggcttcccaactcccgttcattcatatactaccaaacattgctgtgatctagatctagcccgatgcggtgctaacctgagattgtgggttactgtagctcagtatgcagctcaggtacctgcacttgctcaagattgcgataatgatcagattaaaatagcaggccacgcatattctgcaacttgcgacnnnnncat

SEQ ID NO: 4498 - DNA, 1171 bp, Zea mays
  Clone ID: TF_ZmC493_6
cccacgcgtccgcctcttcatagagcgcgtcggggtcgggggaggacctgtcgatttggcatgagctgccgattcaatcatcctccggataggaatctggctattgcctctgccagaatgaagggagaatatcctgagagagcgggacagccagagtgtcagtattatctgaagactggaacatgcaagtttggccctacatgcaaatttcaccatcccagggaaaaggctggaattgcagggagggtgcagctaaacacatcaggatatccactccgcccgaatgaaaaggagtgtgcatattatttaaaaacaggacactgtaaatatgcaaatacttgtaaattccaccatccggaacttttcaatgtggtgccttcgtcacgtggttctcctatttatacctctgtacattcctctgcgagtgctggtccgcagtcctatactggaactatgccaagctgggcttttccacgagcttcttttataccaagccctaggtggcaaagtccttcaaattatgcgccgatgattgtacctcagggccttgttcaaatgcagagctggaattcatatactggtcagctgcagtcacctggggctcaacaaacttatggaagttcacaacaaggagaagctagtacaggaaatcagggaatgctgtcaccatacagacccagttcgtttcccgtgcctcaatatgcgctgcagagagagaatgtatttcctgagagacctgatgaaccagaatgccaatattacatgaagacaggagattgtaaattcggtgcagtgtgcaagttccatcatccccggggtgaagaactgtgcaaattctattctcgttacggcatctgcaagttcggcgccaactgtaaattcgaccatcctacagtggttgctccaatggtctatgcgtatggtttctccgcgtctgcttcccctgcatccgcttcgactaatgtacctatggcgcgacgccttctgggatccccaccggggtctggatatacatcttaggcgtcgtttttttttcagttgacctacttcgatttataaaatccatggcactgcctcaggcgctgtgattgtttctcctaacttcctgccgggatcaaagttctgtaaattgagttgctaccggagatgtacagccccgttttttttttgg

SEQ ID NO: 4499 - DNA, 955 bp, Zea mays
  unsure (1)..(955): unsure at all n locations
  Clone ID: TF_ZmC491307_1
ataccgagctctccttccggagggtcgccctcgtcatcggatccaccgggatcggcggcacatcgctcgtcgacatactcccgcgcgacgacacccccggtgggccctggaccgttcgctcgtccccccaccctcccgctctctctctcgtcggtgcgagcgcagctgtcgacgaccctcctccgactcgtcgcttcacaggcttgtggtcagcttgactgatatcaaacaatggcggaacacttggcttcgatatttggtacagagaaagacagggtcaactgtccattttacttcaagattggagcttgtcgtcatggcgatcgctgctctcgcatccataacaggccaaccatatcacctactattgtgctcatgaacatgtatcagcgccctgatatgattacccctggggttgatgctcaaggccagccgatagatccccgcaagatgcaggagcattttgaagatttttatgaggatatctttgaggaactgagcaagtttggtgagattgagaccctcaacgtctgtgacaacctttctgatcacatgataggcaatgtgtatgtccagttcagagaggaagatcaggcagcagcagctcataccgcccttcagggacgcttttactctggtcgcctaataattgttgacttctctcctgtgacggacttccgtgaagcgacctgcaggcagtatgaggagaacacctgcactcgtggtgggcactgcaatttcatgcatgtgaagcagataggtaaggatctcaggaagaaactctttgggcgctataggagatcgcaacgaggaaggagccgcagcccaagcccacaccatanggagagagcgtcatgaccgtgatgactatcgtggccgtgatgatttccgtcgtggtggtggcggcggcggcggtggacgggaggggtgggagcagtaggcatgaaaggcatga

SEQ ID NO: 4500 - DNA, 844 bp, Zea mays
  Clone ID: TF_ZmC11235_3
aaaacccacgtggtggaaggaaaggaaacgggagggagagaaaaacggaggccccccgatctcctcctcccactccgatcgcccgaccgatcgccgagcttccccgttccctccccgccccccgcgacgccgcgacgccatggagccgccgcacgccgagcaggccgtcgccgctgtagcagcaggaggagagggcggcaccgcaagcccgggcaccggcctcgaagggccggtgcttaggcgggggctggacggcggtggggaaggggaggacggggagctgggggcggggcaggaggcggacgcacggctaccggagcggcctggcgaggcggactgtggctactacctccgcacgggcgcctgcggcttcggggagcgttgccgctacaaccatccccgcgatcgtggtggcactgagtttggtggaggtaccaagaatggtgcagcacaagactttccagaacgacagggccaacctgtatgcgagtattatctgaagactggaacttgtaaatttggctccaattgcaaatatcaccatcctaagcaagatggatctgtgcagtctgttatattaaacaacaatggattccctctacgcctgggtgagaaagaatgctcctactatatgaagactgggcaatgcaagtttggttctacatgtaaatttcatcatccagaatttggtggtattccggtgacccctggaatatatccaccattacaatcaccttctgtgccctcccctcatacatatgctccaaattggcaaatgggaagatcacctgcagttcctggatcatatataccaggttcatacactccaatgatgatctcatct

SEQ ID NO: 4501 - DNA, 1647 bp, Zea mays
  Clone ID: TF_ZmC4916_435
atggatacccataggccaccacacttcgacggcactaacttcccatattatagtgctagaatggcttgttacctagaggccattgatctaggtgtttggagagtcactcgtgacgggatgaaacccctcaagaatcccgagaaacccaccacgagtgaggaaaaagaaattcatttaaatgctagagccaaaaattgcttgtatgagtctcttagcatggatatttttaaccaagtatttaccttgaaaactgctaatgagatttggctaaaattgcatgagctccatgacggcacatccaatgtccgtgagcaaaaacattgcctagtcttaaatgagtataattcttttgctatgaaagacgatgagcttgttagatacatgtattctcgtttgaatctaataatcaatgagctcaactctattggcattaataagctaggcgatgcggacattgtgaggaagattatctccttgctaccacaacaaagatatgggagcatcatcaccatccttcacaacatggaggacttgagcaacatgaccccgaccattgtcgaggatcttctctttaacattgacaggaaaaagcaaaggaagagaggatgcttcgcatgtggggagaagggccacttcagggacaactgtccaaatatggtgaaacccaaaaaggagaggagcaaaggcaaggcgctaacaagtgttagaacttggaatgattcttcaagtgaagatgaacctccaaggacgcgcagccaccgatcctcatcacgctcatcacggtcatcacacaaatgccttatggcaagaggtaacaaaagcattccatcatctagtgatgaaagtagtagtgatgatgaaggtgagggaaagccctctgtagatgagcttgcggaagccgtagaatttttccaggatgtttgcactaagcaaaaagctcaacttaaaactttgaaaaataagttggttagctctcaaaatgattacaaaggtttgcttgaaaaatttgaaacttttgcaaacttaaatagtgagctatcaactaaaattgagctattagaatgtagtgctccatccactgctaccgatgatagccttattaaaaagaatgaaaaattgaaagctaagttagctagctcccaagaagctattgaaaatttgctagagaaaatggaaattcttagcattcacaataatgagctaactactaagctagaaaacattggtagcaccccagcagcatctttagttgaaatacctgaaataattaagaaagatgcttctacttcctgctttgatttaattgatgattctaacccctgcaaccaagtcgttgttgagaatattgttgtagagacatgttcggatgaggttgcaaaggaaaatgaacaattaaagcaagaagtggctcgccttggcaaggctttgtatgacaagaaaggcaaagccaaacaaatccgacctccacaggataacaccattgcgggagtgaacaagcctgtagagggagaaactgtgatttgtaggctatgcaacatggaaggccacaagtctttccaatgcaaggcgatgaccggggataaacaaaggcaaaagctcaagcaaaagccatcaagcaaaatctccacacctacatcaaaaaggtga

SEQ ID NO: 4502 - DNA, 325 bp, Zea mays
  Clone ID: TF_LIB3245-047-P1-N1-A3
ggatttttagttttaaactgcccaatgggaaagcggaagaagccttgcttggtttgtgggttgtttgggcacaatgcaaagcagtgcaagcaggttggtcccccctatctccgagggattatcacttggtgacttggggtcaagactgtttcatctgcaaaaaaggagggcatatggcgaaggattgtcctgataagcacaagaggaatgatcatcaatccacattatgtataagatgtggagaaacaggtcatgatatgtttggatgtgccaatgattacccaccagatgatatcgagcaaataagatgctacgcgtgtaatca

SEQ ID NO: 4503 - DNA, 3621 bp, Zea mays
  Clone ID: TF_ZmC11229_1
cttgggcaagcctcagaccagttcttctttctccagtttccgcagtgcagccatattaacatgaccaaacctctcatgccaccgccaggctacttcatcttcgcgcccacgcactgctaggcacacagactgttgtatcttcaaatgaaggaggtacaacctgttttcagctcgcactattcttgccagtaatcttccatcaggttccctaatatgcatcaccccatcatcaacatgaatcttgtactttgcttcatcaagttgcccaatactgatgatatttgttgtcaggcgaggaataaaataaggcccaacaaacgaccgggtctcgccattcttgcacataaacttgatggttcctcgtccctcaatctgagccaccgagttgtcaccgaacctgacagtacccaacactctggtatccagatcggtgaaaacagccctggatccggacatatgatttgtggctccagtgtccaggatccaggttccctcctctaatttctcctcctcttcatgctgtaagaacaccttctcctccctgatctctagatgagaactagacatcttgcagcatggtttaagtgttgaggtttttaccgggaacgtctttgccacaagaagtgtagcctcctcttcttcttggacagcatgtgcttgctccttcttgtgccttgacggacactctcgcgcccaatgtcccatcttgccacaccttctgcactcatcaccagtgacctttccagccggtggtccacctgatgagcgccctcctctgccacgactgcgaccacggccccgaccacgcccacggtatcctccatcatggcgccctgatcttccacccgagctgctgccaggatggtgctcgacttccttcttgcgccgggcattccactcttcttccgtgaggtagagtcgaccactgtgctgcagtgatcctggggcctcctcaaaggcgtcctccgctgctctcaacctccccaccatgtcagacacagtgagggttgacaggtcgaggagagtcatgatggagaggacgatttgcttgaagcgtggtggaacgctgcgagcaattttctccacgatcttctcttcttccacgccagctccaagagtggagagttccgctgccatgccatttaggcgcagcgcgaaatcttcaacggactcaccgtcattaaacgttgccaagtcgaacttcctccgaagcagcacagcagcagtcttcatgcgatcatcgccaacccgtaggtctgcaatggtcttccacgcctcctttgccgtggacttgtctgcgatcgaagacaccatctctggtggcagtgcgctgcagagagcgtcgagtgccatcatttcttcatggatgtctgctcctccgtgctcgatgatgtcccacaacatcctcgccctcagcttcaccttcatcaggagcgcccagtccgagtaattggtcttggtgagtgtgggatatccactccctgcactcacctcacgaattactcgctggaccactgctccatctttggaggtgtcgtcgctggacttcctgaatgtcgcactgctatcaacagttttcgacatcttgctcctccttggctctgataccacttgttggaaactgcgccggagagacaaccctgcaggttgccggcgagttcctacctcccaggtaagttcttcaggtatgagaaaacctcccagggactcacacgcacacgatttggagaggaacacagcagatttggtggcgtcctattgactgccttttcttagcctctaaggccatatatttatagactttcataaggaaacaaactagctattacaaggtaataatccggactgctatcagtcctgatcttgctgattggatccgtccatataagactgatccactaccatactagctatttcctaaaacagaataagtaaactagcaccaatcaaggattactttcctaacagcctctacatgttgatagtttaattttcattcagcaagaagcagaaacttggaagtgcttgggcggcgcaatgttcctgtagaccttgtgtataaatttgctccagatttgatcatgttagatgcttatgagactgttgaatcatggatgatggcgagaaacaggttgaatccagggaaactcataccagcaatgatgcgttatgtgagcgaaccacatgcaaagaatgaaacacatgaagttatcaaatacttggaattttgtgtgaaagatttgaacaatgtggaccctggagtgcataatctgttgctatctctatatgccaagaaggaggatgaatcccagcttttgcaatttctcgacacaaaatttggtaaaggacaaacaaatggccctgacttcttttacgatccaaagtatgctctccgcctatgtcttcaagagaagagaatgcgtgcttgtgttcgtatttatagcatgatgtccatgcatgcggaagctgtggcacttgctttgaaggtggatttggaacttgcaaaggcagaagctgacaaagtagaagacgatgaagagcttaggaagaagctgtggcttaaggttgctaaacatgtcatcgagcaagagaaaggtgtcaagagagagaatataaagaaagcaatagaattcctttcggagaccaataacttgttaaagattgaggatatcttaccattcttcccagacttcgtattgattgacgatttcaaagaggaaatatgcaaatctctgaaggactacaacagccagattgagcagctcaagcaggagatggatgatgccacacgtggggcagataatatcagaagtgatattggtgccctcgctcagagatatacagtaattgaccgtgagcaggattgtggggtttgccggcgcaaaatattgactgttggagggttgcaccaggtagggagaagctatacatctgttggacacatggcccccttttatgtgtttccctgtggacatgccttccatgcaaattgcttgattggacatgtgactcgttgcagtaaccaggtgcaagctgagagaatattggaccttcagaaacggcttagcttgatggacaggaaagcagcaaaagacaatggggcaagtgttaatggcgaacctattacgagcacaaccccagttgataagctgagatcacagttggatgatgctgtagcaagcgagtgccccttctgcggtgatttgatgatcaaggagatttcacagccgttcattctcccccaagagtcggatgaaaaggcatcatgggaaatcaaacctcaaccaacgcctcaaaagattctcccgatgaccatgtctatttgatgctacggacagtacagcctaagatggatttggttttaaatttttatattgtttttgacttttgacactccttttgaccatgttttaatcctttttatgttgtggtatatggtattcaatatcctactgctgttgggttatcttgttttatatttacctaacttgtaaccctagaacaatgtagtcatcaatcgcttaccttgtggttgtggttcttgtattggatgcatcgtgttggaacatctcggtacacttgttatttgggattgtttttttttctgaagtcttgctccgg

SEQ ID NO: 4504 - DNA, 3879 bp, Zea mays
  Clone ID: TF_ZM3615.C3.o3.fg
atgtctactcaacgggaccatgtggatcctatcctcgaggatattcccgtcacatcctccggtgaggaagtggaccccaaggtcctcgacctcgccatgaagattgccgagaggatgttcctcaagatgaaagaggaagatgctaagaaaaaggccgaagaagaagaatcaagaagaaaggccgaagaagacaaatgtaaaggaaaatttgattacaatgacgacctagtggatcttttggtgtcgaaggtgttgagcaaggtatgtataagcccgcccaaggagaagagtccagaaatgatgcaagaggttcatcgcaatgctcaagcagtgagcataattaaaggaagtctttgttcggaagaataccggaaagttcaaggaagagaagatgcccgtgacatttggaacattcttaaaatgtcacatgaaggagatcccaaagctaagagacatagagttgaagcttttgagagtgagcttgctagatatgattggatcaagggtgagtcgcttcaatcactctttgatcgattgatggtgttagtaaacaagataagagtacttggaagtgaagattggagtgactccaaggtcacaagactattcatgagagcatacaaagaaaaggataagagtctagcaaggatgataagggatcgtgatgactatgaggatatgacgcctcatcaattatttgcaaagattcaacaacacgagtccgaagaagcccccatcaagacaagagactctcatgccttgatcacaaatgaacaagacacccccaagaagaacaaagaccacaaggcaaagaaagtggtcgagacgtcaagtgatgaagatagctcaagtgatgaagacacaactatgttcatcaaaacattcaagaaatttgtaaggaaaaatgacaagtttcaaaggaaaggaaagaagagggcatgctatgaatgtggccaaaccggtcatttcatagcggattgtcctaacaaaaaggaacaagaagccaagaaggaatacaagaaggacaagttcaaaaagggaggcaagaccaagggacatttcaagaagaagaaatatggtcaagcccaaattggtgaagaatggaactccgatgaagagagttctagctccgaagaagaggaagtggtggcaaacgttgccatccaatctacttcaagctcgcaactcttcaccaacctacaagacgactactacactccaacttgcctcatggcaaaaggagataaggatgcacttgaatcaagcatattaagcttgaatgtccaaaatcaagagcttcaattgcaacttgaaaattgcaagaacatcaatgcttcatctttattgattgaatctaagtctagctcctcaaataataccttttgcaaacattgtgccaaatgtcatgcttcttgttgtctaactaaccatgcaaggaagaagagcccacaggtgaaagtcaaagaaatattgaaaagatgctctagcaatgatgggttaaagaaaattgaacccaagtacaagtccctaaagcccaacaatggaagaagggggcttgggttcaactcatccaaggaaaaccctagcacagtgcataaggggtggagatcccccaagttcatagagggaaccaccctatatgatgccttggggaggattcactcctcaaatgacaagtcaactcaagtaaaggtctactcctctggtgggtcaagttgggtgcttgacagtggatgcacaaatcacatgaccggggaggaagacatgttccattccttgcaactaactcaagaagcacaagaaattgtgtttggagatagtggcaagagtaagatccttagaagggaggattcctctgttgcctttacaggtcgcttgaagggcaaactctatcttgttgatttcacaacaagtagagtgacgcctgagacttgtttagtggcaaaatctgacaggggttggctttggcgtcgccggctagctcatgttggcatgaggaacttggccaaacttcaaaaggatggtcacattattggactaacaaatgttgtgtttgagaaagatagggtttgtggcgcatgccaagtagggaagcaacatggagtcccacatcaatcaaagaatgtggttacaacaaaaaagccattggagcttcttcacatggacctcttcggacctatggcttacatcagcattggtggtagtaagtatggtttagtcattgttgatgatttttctcgtttcacctgggttttctttttaagtgataaaggtgaaactcaagaaacattgaagaaattcatgagaagagctcaaaatgagtttgaggtcaaaatcaagaaagtgaggagtgataatgggacggaattcaagaacacaggtgttgaagaattcttaggtgaagaaggaatcaaacatgagttctcggttccttacactctacaacaaaatggtgtcgtggaaagaaagaaccgaactctaattgaagcagctagaactatgttagatgagtacaagacacctgacaacttttgggcagaggcggtcaacaccacctgtcatgcaatcaaccgtctctatcttcataagatctacaagaagactgcttatgaacttctcactggtaacaaacctaaaattgattattttagagtatttgattgtaagtgttttattcttaacaagaaagtcaagagctcaaagtttgctcctagagtggacgagggtttcttgcttggttatgcatcaaatgcgcatgaatatcgtgttttcaacaataccaccggtcttgttgaaatagcgatagacgtgacatttgatgagtctaatggctcgcaagggcacgtttctaatggcactgcaggaaatgaagaaccaccttgtgaggccataaagagacttgcaataggtgaggtgagacctcaagagaaggatgatgatgaaggaactttatggatgaccaatgaggtttttgatgtgggtgcaaaggtggtgggtgacaaatcctccacccaagcaaacccatcaacctcaagtcatccaaatcttgaagaaaatcatcaaccccaaaggatgccaacggtggtagaagatgaacatgaaagtattgatggtgtagtggctcttgatcaagtagatgatgaggaggaacaaattcaaagacaaccatcagtgcctcatcctcgagttcatcacactattcaaagagatcatccggtggacaacatcctgggtagcatcaggagaggggtaacaactcgatctcgtttagcaaatttttgtgaattttactcgtttgtttcctctcttgagccacttaaggttgaagaagcgctgggtgatccggattggataattgccatgcaagaggaattgaacaacttcactcggaatgaagtctggtccttggttccaagacccaagcaaaatgtgattgggacaaaatgggtcttttggaacaaacaagatgagcatggcgtggttacaagaaataaagcacggttggttgcccaaggctacgctcaagtggaaggacttgattttggtgaaacatatgcaccggtagcaaggttagagtcaattagaatattaattgcctatgctactaaccatgatttcaagttatatcaaatggacgtcaagagtgcgtttctaaatggtccactacaagagagggtctatgtggagcaaccaccgggctttgaagacccaaggaagccaaatcatgtctatctacttcacaaggcactctacgggcttaaacaagcccctagagcttggtatgattgccttaaagattttttaattaagaatgggtttacaatagtgtcggggaccataattaggggtaccctcaagactcctaatctcagctggtaa

SEQ ID NO: 4505 - DNA, 3831 bp, Zea mays
  Clone ID: TF_ZM3973.C7.o2.fg
atgtctacacaacgggaccatgtggatcctctcctcgaggaaatccccgtcacatcttctggtgaggaagtggaccccaaggtcctcgacctcgccatgaagattgccgagaaaatgttcctcaaaatgaaagaggaagatgctaggaaaaaggccgaagaagaggaatcaagaagaaaggccgaagaagataaatgtaagggaacatttgattataatgacgatctagtggatcttttggtgtctaaggtattgagcaaggtaagtctcaacaccaaaggatcatctaccaaaagcagaggtaatgactttagcaaagttcaattcgattactctagaaattatattcccaacttctcttccgccccacttgggaagttaccaactcttagtgagttgaactatgaagagtgggccgacaagatgaagtcgcatttaatcggtgtgcatcctagtctttgggagattgttcatgtaggtatgtataagcccgcccaaggagaagagatgaccccgaaaatgatgcaagaggttcatcgaaatgctcaagcagtgagcataattaaaggaagtctttgtccagaagaataccggaaagttcaaggaagagaagatgctcgtgacatttggaatattcttagaatgtcacatgaaggagatcccaaagctaaaagacatagagttgaagctttggaaagtgagcttgcaagatatgattggacaaagggtgagtcgctccaatcactctttgatcgattgatggtattggtcaacaaaataagagttcttgggagtgaagattggagtgactccaaggtcacaagattgttcatgagagcttataaagagaaggataaaagtcttgcaaggatgataagggatcgtgatgattatgaggacatgacgcctcatcaattatttgcaaaaattcaacaacacgagtccgaagaagcccccatcaagacaagagactctcatgccttgatcacaaatgaacaagacaatctcaagaagagcaaagaccacaacgcaaagaaagtggtcgagacctcaagtgatgaagatagctcaagtgatgaagacacagctatgttcatcaaaactttcaagaaatttgtaaggaagaatgacaagttccaaaggaaaggaaagaagagggcatgctatgaatgtggccaaaccggtcatttcatagcggattgtcctaacaagaaggaacaagaagccaagaaggaatacaagaaggataagttcaaaaggggaggcaagaccaagggatacttcaagaagaagaagtatggacaagctcatattggtgaagaatggaactccgatgatgagagttctagctccgaggaagaggaagtggtggcaaatgtggccatccaatctacatcaagcgcgcaactcttcaccaaccttcaagatgactcctacactccaacttgcctcatggcaaagggagataaggtaactttatttagtaatgatttttcaaatgatgatgatgatgatcaaattgccatgaaaaataaaatgattaaagaatttggcttaaatggatacaatgttatcacaaaattaatggaaaagctagataaaagaaaagcaactcttgatgctcaagaagacttgcttgtccttgaaaaggaaagaaacctagagcttcaagagttgattcacaataaagataaagaagtaattaacatgaaaacctctattgataatcttgcaaatgaaaagaatgcacttgaatcaagcatgttaagcttgaatattcaaaatcaagaacttcaagtgcaacttgaaaactgcaagaatatcaatgcctcatgtttagttcttgaatctaagtctagattaaatgataattcttgcaaacattgtgccaagtatcatgcttcttgttgtctaactaaccatgcaaggaagaatagcccacaggtgaaggtcaaagagatttttaaaagatgctctagcaatgatgggttaaagaaagttgaacccaagtacaagtcccttaagcccaacaatggaagaagggggcttgggttcaactcatccaaggaaaaccctagcacagtgcataaggggtggagatcccccaagttcatagagggaaccaccctatatgatgccttggggaggattcactcctcaaatgacaagtcacctcaggtctactcctctggtgggtcaagttgggtgcttgacagtggatgtacaaatcacatgaccggggagaaagacatgtttcatacattgcaactaactcaagaagcacaagaaattgtgtttggagatagtggcaagagtaaggtgattggtattggtaaaattcctatctctgaccaacaatcactttcaaatgttttattagtagattccttaagctataatttgttgtccgtttcacaactttgtggaatgggttataattgcttattttcggatgtggatgtgaagatccttagaagggaggactcctcagttgcctttaccggtcgcttgaagggcaagctttatcttgttgatttcacaacaagtaaagtgacgcctgagacttgtttagtggcaaaatccgacaagggttggctatggcatcgccggctagcccatgtcggtatgaggaatttggccaaacttcaaaaggataatcacatcattggactaacaaatgttgtatttgagaaagatagggtttgtggcgcatgccaagcaggaaagcaacatggagtcccacatcaatcaaagaatgtggtcacaacaaagaggccattggagcttcttcacatggacctcttcggacatgtggcctacattagcattggtggtagtaagtatggtttagttattgttgatgatttttctcgattcacttgggttttctttttgagtgacaaaggtgaaactcaagaaattttaaagaaattcatgaggagagctcaaaatgaatttgagctcaaaatcaagaaagtgagaagcgataatgggacggaattcaagaacacaggtgtcgaagaattcttaggagaagagggaatcaaacatgagttctcggtgccttacactccacaacaaaatggtgttgtggaaagaaagaaccgaactctaattgaagctgcaagaaccatgttggatgaatacaagacacctgacaacttctgggcagaggcggtcaacaccgcctgtcatgcaatcaaccgtctctatcttcataagatctacaaaaagactgcttatgagcttctcactggtaacaaacctaaagttgattattttagagtattcggttgtaaatgttttattcttaacaagaaagtcaagagctcaaagtttgcttctagagtggacgagggcttcttgcttggttatgcatcaaatgctcatggatatcgtgttttcaacaattccaccggtcttgttgaaatagcgatagacgtgacatttgatgagtctaatggctcgcaagggcatgtttctaatgacactgcaggaaatgaagaactaccttgtgacgccataaagaaacttgccataggagaagtgagacctcaagaaagggatgatgaagaaggaaccttgtggatgaccaatgaggtagttgatgtgggtgcaagggtggtgagtgacaatgtctccacccaagcaaacccatcaacctcaagtcatccaagcctcgaacaaaatcatcaaaggatgccaacagtggtagaagatgaacaagaaaatattgatggtgaagtgcctcttgatcaaataactgatgaggaagagcaaatacaaagacatccatcagtgcctcatccaagagtccatcatacaatttaa

SEQ ID NO: 4506 - DNA, 4512 bp, Zea mays
  Clone ID: TF_ZM4272.C4.o2.fg
atgtctactcaacgggaccatgtggatcctctcctcgaggaaatccccatcacatcttccggtgaggaagtggaccccaagtttctcgacctcgccatgaagattgccgagaagatgttcctcaaaatgaaagaggaagatgctaataaaaaggtgttgagcaaggtaagtctcaacaccgaaggatcatctaccaaaagcaaaggtaacgaatttagtaaagttcaattcgattactctagaaattttattcccaacttctcttctgccccacttggaaagttaccaactcttagtgagttgaactatgacgagtgggccgacaagatgaagtcacatttaatcgatgtgcatcctagtctttgggagattgttaatgtaggtatgtataagcccgcccaaggagaagagatgactccggaaatgatgcaagaggttcatcgcaatgctcaagcagtgagcataattaaaggaagtctttgtccggaagaataccggaaagtacaaggaagagaagatgcccgtgacatttggaatattcttaaaatgtcacatgaaggagatcccaaagctaagagacatagagttgaagctttggagagtgagcttgctagatatgattggactaagggtgagccgcttcaatcactctttgatcggttgatggtgttagtaaacaaaataagagtgcttggaagtgaagattggagtgactccaaggtcacaagactattcatgagagcatataaagaaaaggataagagtctagcatggatgataagggatcgtgatgactatgaggatatgacgtctcatcaattatttgcaaagattcaacaacacgagttcaaagaagcccccatcaagacaagagactctcataccttgatcactaatgaacaagacacccccaagaagaacaaagaccacaaggcaaagaaagtgaaatttgtaaggaaaaatgataagtttcaaaggaaaggaaagaagagggcatgctatgaatgtggccaaaccggtcatttcatagcggattgtcctaacaagaaggaacaagaagccaagaaggaatacaagaaggacaagttcaaaaagggaggcaagaccaagggatatttcaagaagaagaaatatggtcaagcccatattggtgaagaatggaactccgatgaagagagttctagctctgaggaagaggaagtggtggcaaatgttgccatccaatctacttcaagctcgcaactgttcaccaacctacaagacgactcctacactccaacttgcctcatggcaaaaggagataaggtaaccttatttagtaatgattttccaaatgatgatgatgatgaacaaattgccatgaaaaataaaatgattaaagaatttggcttgaatggatacaatgttatcaccaaattaatggagaagctagataaaagaaaagcaactcttgatgctcaagaagacttgcttatccttgaaaaggaaagaaacctagagcttcaagaattgctactcaataaagatgaaatgctagatgtcttgactaaggaagatgcacttgaatcaagcatgttaagcttgaatgttcaaaataaagaacttcaagtgcaacttgaaaattgcaagaacatcaatgcctcatctttagtgattgaatctaagtctagctcctcaaacaataccttttgcaaacattgtgccaaatatcatgcttcttgttgtctaactaaccatgcaaggaagaatagcccacaggtgaaggtcaaagaaatattgaaaagatgctttagcaatgatgggttaaagaaagttgaacccaagtacaagtccctaaagcccaacaatggaagaagggggcttgggttcaactcatccaaggaaaaccctagcacagtgcataaggggtggagatcccccaagttcatagagggaaccactctatatgatgccttggggaggattcactcctcaaatgacaagtcaactcaagtaaaggtctactcctctggtgggtcaagttgggtgcttgacagtggatgtacaaatcacatgaccggggaggaagacatgtttcattccttgcaactaactcaagaagcacaagaaattgtgtttggagatagtggcaagagtaagatgattggtattggtaaaattcctatctctgaccaacaatcactttcaaatattttattggtagattctttaagctacaatttgatgtccgtttcacaactttgtggaatgggttataattgcttattttttgatgtggatgtgaagatccttagaagggaggactcctcagttgcctttacgggtcgcttgaagggcaagctttatcttgttgatttcacaacaagtaaagtgacgcctgagacttgtttagtggcaaagtccgacaagggttggctatggcatcgccggctagctcatgtcggtatgaggattttggccaaacttcaaaaggataatcacatcattggactaacaaatgttgtatttgagaaagatagggtttgtggcgcatgccaagcaggaaagcaacatggagtcccacatcaatcaaagaatgtggtcacaacaaagaggccattggagcttcttcacatggacctcttcggacctgtggcttacatcagcattggtggtagtgaaactcaagaaatattgaagaaattcatgagaagagctcaaaatgaatttgagctcaaaatcaagcaagtaagaagtgataatgggacggaattcaagaacacaggtgtcgaagaattcttaggcgaagaaggaatcaaacatgagttctcggttccttacactccacaacaaaatggtgttgtggaaagaaagaaccgaactttaattgaagcagctagaaccatgttggatgagtacaagacacctgacaacttttgggctgaggcggtcaacaccgcctgtcatgcaatcaaccgcctctatcttcacaagatctacaagaagactgcttatgagcttctcactggtaacaaacctaaagttgattattttagagtatttggttgtaagtgctttattcttaacaagaaagtcaaaagctcaaagtttgctcctagagtggacgagggtttcttgcttggttatgcatcaaatgcgcatggatatcgtgttttcaacaataccactggtcttgttgaaatagcgatagacgtgacatttgatgagtctaatggctcgcaagggcatgtttctaatggcactgcaggaaatgaagaactaccttgtgaggccataaagaaacttgcaataggtgaagtgagacctcaagaaaaagatgatgaggaaggaactttgtggatgaccaatgaggttgttgatgtgggtgcaaaggtggtgggtgacaaatcctccacccaagcaaacccatcaacctcaactcatccaagtcttgaagaaaatcatcaatcccaaaggatgccaactgtggtagaagatgaacacgaaagtgttaatggtgaagtgcctcttgatcaagtgaatgatgaggaggagcaaatacaaagacaagcatcagtgcctcatcctagagtccatcataccattcaaagggatcattcggtggacaacatcctgggtagcatcaggagaggggtaacaactcgatcttgtttagctaatttttgtgaattttactcgtttgtttcctctcttgagccacttaaggttgaagaagcattgggtgatccggattggataattgccatgcaagaggagttgaacaacttcacccggaatgaagtttggtccttagtccaaagacccaaacaaaatgtgattgggacaaaatgggtctttaggaacaaacaagatgaacatggcgtggttacaagaaacaaagcacggttggttgcccaaggctacactcaagtggaaggacttgattttggtgaaacatatgcgctggtagcaaggttagagtcaattagaatattaattgcctatgctactaaccatgatttcaagttatatcaaatggatgtcaagagcgcatttctaaatggaccactacaagagagggtctatgtggagcaaccaccgggctttgaagatccaaagaagccaaaccatgtttatctacttcacaaggcactctacgggcttaaacaagcccctagagcttgctcaaatacttcctgggatttcaagtcaaacaactcaaggaaggcacttttctatgccaaaccaaatatactcaagaagtttggcatggaaaaggcaaagcacgcgaagactccaatgtcatcaaatggacatctcgacctaaatgaggaagattatgccggttgcaaagtagatcgaaaaagcactactgggacttgccaattccttgggcggtccttagtgtcatggagttccaagaaacaaaattgtgttgcactttccactgcagaagctgagtacatagcagctggggcatgttgtgcacagttgttatggatgaagcaaaaccttagagattttggttgttag

SEQ ID NO: 4507 - DNA, 4710 bp, Zea mays
  Clone ID: TF_ZM4333.C6.o1.fg
atgtctacacaacgggaccatgtggatcctctcctcgaggaaatccccgtcacatcttccggtgaggaagtggaccccaaggtcctcgacctcgccatgaagattgccgagagaatgttcctcaaaatgaaagaggaagatgctaagaaaaaggccgaagaagaagaatcaagaagaaaggccgaagaagataaaggtaagggaacatttgattacaatgacgatctagtggatcttttggtgtctaaggtattgagcaaggtaagtctcaacaccgaaggatcatctaccaaaagcaaaggtaacgaatttagcaaagttcaattcgattactctagaaattatattcccaacttctcttccgccccacttggaaagttaccaactcttagtgagttgaactatgacgagtgggccgacaagatgaagtcgcatttaatcggtgtgcatcctagtctttgggagattgttaatgtaggtatgtataagcccgcccaaggagaagagatgactccggaaatgatgcaagaggttcatcgcaatgctcaagcagtgagcataattaaaggaagtctttgtccggaagaataccggaaagttcaaggaagagaagatgcccgtgacatttggaatattcttaaaatgtcacatgaaggagatcccaaagctaagagacatagagttgaagctttggaaagtgagcttgcaagatatgattggacaaagggtgagtcgcttcaatcactctttgatcagttgatggtgttggtcaacaaaataagagtacttgggagtgaagattggagtgactccaaggtcacaagattgttcatgagagcttataaagaaaaggataagagtcttgcaaggatgataagggatcgtgatgactatgaggatatgacgcctcatcaattatttgcaaaaattcaacaacacgagtccgaagaagcccccatcaagataagagactctcatgccttgatcacaaatgaacaatacaaccccaagaagaacaaagatcacaaagcaaagaaagtggtcgagacctcaagtgatgaagatagctcaagtgatgaagacacaactatgttcatcaaaacattcaagaaatttgtaaggaagaatgacaagttccaaaggaaaggaaagaagagggcatgttatgaatgtggccaaaccggtcatttcatagcggattgtcctaacaagaaggaacaagaagccaagaaggaatacaagaaggacaagtttaaaaagggaggcaagaccaagggatacttcaagaagaagaaatatggtcaagcccatattggtgaagaatggaactccgatgaagagagttctagctccgaggaagaggaagtggtggcaaatgtggccatccaatctacatcaagcgcgcaactcttcaccaacctacaagacgactcctacactccaacttgcctcatggcaaagggagataagaatgttatcaccaaattaatggagaagctagataaaagaaaagcaactcttgatgctcaagaagacttgcttatccttgaaaaggaaagaaacctagagcttcaagagttgattcacaataaagatgaaatgctagatgtcttgactaaggaagtctctttagtcaagataactatagagaataaagataaagaagtaattaatatgaaaacctctatagctaatcttgcaaatgaaaagaatgcacttgaaacaagcatgttaagcttgaatgttcaaaatcaagaacttcaagtgcaacttgaaaattgcaagaacatcaatgcctcatctttagtaattgaatctaagtctagctcctcaaatgataattcttgcaaacattgtgccaaatatcatgcttcttgttgtctaactaaccatgcaaggaagaatagcccacaggtgaaggtcaaaggaattttgaaaagatgctctagcaatgatgggttaaagaaagttgaacccaagtacaagtccctaaagcccaacaatggaagaagggggcttgggttcaactcatccaaggaaaaccctagcacagtgcataagggatggagatcccccaagttcatagagggaaccaccctatatgatgccttggggaggattcactcctcaaatgacaagtcacctcaagttaaggtctactcctctggtgggtcaagttgggtgcttgacagtggatgtacaaatcacatgaccggggaggaagacatgtttcattcattgcaactaactcaagaagcacaagaaattgtgtttggagatagtggcaagagtaaggtgattggtattggtaaaattcctatctctgaccaacaatcactttcaaatgttttattggtagattctttaagctataatttgttgtccgtttcacaactttgtggaatgggttataattgtttattctctgatgtggatgtaaagatccttagaagggaggactcctcagttgcctttacgggtcgcttgaagggaaaactttatcttgttgatttcacaacaagtaaagtaacgcctgagacttgtttagtggcaaagtccgacaagggttggctatggcatcgccggctagcccatgtcggtatgaggaatttggccaaacttcaaaaggataatcacatcattggactaacaaatgttgtatttgagaaagatagggtttgtggcgcatgccaagcaggaaagcaacatggagtcccacatcaatcaaagaatgtggtcacaacaaagaggccattggagctccttcacatggacctcttcggacctgtggcttacattagcattggtggtagtaagtatggtttagtcattgttgatgatttttctcgattcacctgggttttctttttgagtgataaaggtgaaactcaaggaatattgaagaaattcatgagaagagctcaaaatgagtttgagctcaaaatcaagaaagtgagaagtgataatgggacagaattcaagaacacaggtgtcgaagaattcttaggcgaagaaggaatcaaacatgagttctcggttccttacactccacaacaaaatggtgttgtggaaagaaagaaccgaactttaattgaagcagctagaaccatgttggatgagtacaagacacctcacaacttttgggcagaggcggtcaacaccgcctgtcttgcaatcaaccgtctctatcttcacaagatctacaaaaagactgcttatgagcttctcactggtaacaaacctaaagttgattattttagagtatttggttgtaagtgttttattcttaacaagaaagtcaagagctcaaagtttgctcctagagtggacgagggcttcttgcttggttatgcatcaaatgcgcatggatatcgtgttttcaacaataccaccggtcttgttgaaatagcgatagacgtgacatttgatgagtctaatggctcgcaagggcatgtttctaatgacactgcaggaaatgaagaactaccttgtgaggccataaagaaacttgcaataggtgaagtgagacctcaagaaaaggatgatgaggaaggaactttctggatgatcaatgaggttgttgatgtgggtgcaaaggtggtgagtgacaaagtctccacccaagcaaacccatcaacctcaagtcatccaagccatgaagaaaatcatcaaaggatgccaacagtggtagaagatgaacacgaaagtattgatggtgaagtgcctcttgatcaagtgaatgatgaggaagagcaaatacaaagacaaccatcagtgcctcatcctagagtccatcatacaattcaaagggatcatctggtggacaacatcctgggtagcatcaggagaggggtaacaactcgatctcgtttagctaatttttgtgaattttactcgtttgtttcctctcttgagccacttaaggttgaagaagcattgggtgatccgtattggataattgccatgcaagaggagttgaacaacttcacccggaatgaagtctggtccttagtccaaaaacccaaacaaaatgtgattgggactaaatgggtctttaggaacaaacaagatgaacatggcatggttacaagaaacaaagcacggttggttgcccaaggctacactcaagtggaaggacttgattttggtgaaacatatgcgccggtagcaaggttagaatcaattagaatattaattgcctatgctactaaccatgatttcaagctatatcaaatggatgtcaagagcgcatttctaaatggaccactacaagagagggtatacgtggagcaaccaccgggttttgaagatccaaagaagccaaatcatgtttatctacttcacaaggcactctacgggcttaaacaagcccctagagcttggtatgactgtcttaaagattttttaattaagaatgggtttacaataggaaaagctgactctacattatttactcgcaaagttgacaatgaattatttgtgtgccaaatatatgttgatgacattatatttggtagtactaatgaaaatttttgtgaagagtttagcaaagtaatgacgaacaggtttgggatgtctatgatgggcgagcttaaatacttcctgggatttcaagtcaaacagctcaaggaaggtacttttctatgccaaaccaaatatacacaagatatgctcaagaagtttggcatggaaaaagcaaaacacgcctga

SEQ ID NO: 4508 - DNA, 1314 bp, Zea mays
  Clone ID: TF_ZM4642.C3.o3.fg
atgtggatcctctcctcgaggaaatccccgtcacatcttccggagaggaagtggaccccaaggtcctcgaccgacgacctcgccatgaagattgccgagagaatgttcctcaaaatgaaagaggaagatgctaagaaaaaggccgaagaagaagaatcaagaagaaaggccgaagaagataaaggtaagggaacatttgattataatgacgatctagtggatcttttggtgtctaaggtattgagcaaggtaagtctcaacaccaaaggatcatctaccaaaagcaaaggtaatgactttagcaaagttcaattcgattactctagaaattatattcccaacttctcttccgccccacttggaaagttaccaactcttagtgagttgaactatgatgagtgggtcgacaagatgaagtcgcatttaatcggtgtgcatcctagtctttgggagattgttaatgtaggtatgtataagcccgcccaaggagaagagatgactccggaaatgatgcaagaggttcatcgaaatgctcaagcagtgagcataattaaaggaagtctttgtccagaagaataccggaaagttcaaggaagagaagatgcctgtgacatttggaatattcttaaaatgtcacatgaaggagatcccaaagctaaaagacatagagttgaagctttggaaagtgagcttgcaagatatgattggacaaagggtgagtcgctccaatcactctttgatcggttgatggtattggtcaacaaaataagagttcttgggagtgaagattggagtgactccaaggtcacaagattgttcatgagagcttataaagagaaggataaaagtcttgcaaggatgataagggatcgtgatgactatgaggatatgacgcctcatcaattatttgcaaaaattcaacaacacgagtccgaagaagcccccatcaagacaagagactctcatgccttgatcacaaatgaacaagataatctcaagaaaagcaaagaccacaaagcaaagaaagtggtcgagacctcaagtgatgaagatagctcaagtgatgaagacacagctatgttcatcaaaactttcaagaaatttgtaaggaagaatgacaagttccaaaggaaaggaaagaagagggcatgctatgaatgtggccaaaccggtcatttcatagcggattgtcctaacaagaaggaacaagaagccaagaaggaatacaagaatgacaagtttaaaaagggaggcaagaccaagggatacttcaagaagaagaagtatggtcaagctcatattggtgaagaatga

SEQ ID NO: 4509 - DNA, 5790 bp, Zea mays
  Clone ID: TF_ZM4678.C6.o7.fg
atgtctactcaacgggaccatgtggatcctatcctcgaggatattcccgtcacatcctccggtgaggaagtggaccccaaggtcctcgacctcgccatgaagattgccgagaggatgttcctcaagatgaaagaggaagatgctaagaaaaaggccgaagaagaagaatcaagaagaaaggccgaagaagacaaaggtaaaggaaaatttgattacaatgatgacctagtggattttttggtgtcaaaggtgttgagcaaggtaagtctcaacaccgaagaatcatctaccaaaagcaaaggtaacgagtttagtaaagttcaattcgattactctagaaattttattcccaacttctcttccgccccacttggaaagttaccaactcttagtgagttgaactatgacgagtgggccgataagatgaagtcgcatttaatcggtgtacatcctagtctttgggagattgttaatgtaggtatgtataagcccgcccaaggagaagagatgactccggaaatgatgcaagaggttcatcgcaatgctcaagcagtgagcataattaaaggaagtctttgtccggaagaataccggaaagttcaaggaagagatgatgcccgtgacatttggaacattcttaaaatgtcacatgaaggagatcccaaagctaagagacatagagttgaagctttggagagtgagcttgctagatatgattggatcaagggtgagtcgcttcaatcactctttgatcgattgatggtgttagtaaacaagataagagtacttggaagtgaagattggagtgactccaaggtcacaagattgttcatgagagcttataaagaaaaggataagagtcttgcaaggatgatcagggatcgtgatgactatgaggatatgacgcctcatcaattatttgcaaagattcaacaacacgagtccgaagaagcccctatcaagtcaagggactctcatgccttgatcactaatgaacaagacaaccccaagaagaacaaagaccacaaagcaaagaaagtggtcgagacctcaagtgatgaagatagctcaagtgatgaagacacaactatgttcatcaaaacattcaagaaatttgtaagtaaaaatgacaagtttcaaaggaaaggaaagaagagggcatgctatgaatgtggccaaaccggtcatttcatagcggattgtcctaacaagaaggaacaagaagctaagaaggaatacaagaaggacaagttcaaaaaggggggcaagaccaagggacacttcaagaagaagaaatatggtcaagcccatattggtgaagaatggaactccgatgaagagagttctagctccgaggaagaggaagtggaatttggcttgaatggatataatgttatcataaaattgatggagaagctagataaaagaaaagcaactcttgatgctcaagaagacttgcttatccttgaaaaggaaagaaacctagagcttcaaggattgctactcaataaagatgaaatgctagatgccttgactaaggaagtatctttagtcaagataactatagaggataaagaaaaggaagtaatcaatatgaaaacctctatagctagtcttgcaaatgaaaaggatgcacttgaatcaagcatattaagcttgaatgtccacaatcaagaacttcaagtgcaacttgaaaattgcaagaacatcaaagcttcatctttattgattgaatctaagtctatctcctcaaataataccttttgcaaacattgtgccaaatatcatgcttcttgttgtctaactaaccatgcaaggaaaaagagcccacaggtgaaggttaaagaaatattgaaaagatgctctagcaatgatgggttaaagaaaattgaacccaagtacaagtccctaaagcccaacaatggaagaagggggcttgggttcaactcatccaaggaaaaccctagcatagtgcataaggggtggagatcccccaagttcatagagggaaccaccctatatgatgccttggggaggattcactcctcaaatgacaagtcacctcaggtctactcctctggtgggtcaagttgggtgcttgacagtggatgtacaaatcacatgaccggggagaaagacatgtttcatacattgcaactaactcaagaagcacaagaaattgtgtttggagatagtggcaaaagtaaggtgattggtattggtaaaattcctatctcagaccaacaatcactttcaaatgttttattagtagattctttaagctataatttgttgtccgtttcacaactttgtggaatgggttataattgcctattttcggatgtggatgtgaagatccttagaagggaggactcctcagttgcctttaccggtcgcttgaagggcaagctttatcttgttgatttcacaacaagtaaagtgacgcctgagacttgtttagtggcaaagtccgacaatggttggctttggcatcgccggctagcccatgtcggtatgaggaatttggccaaacttcaaaaggataatcacatcattggactaacaaatgttgtatttgagaaagatagggtttgtggcgcatgccaagcaggaaagcaacatggagtcccacatcaatcaaagaatgtggtcacaacaaagaggccattggagcttcttcacatggacctcttcggacctgtggcctacattagcattggtggtagtaagtatggtttagtcattgttgatgatttttctcgattcacctgggttttctttttgagtgacaaaggtgaaaatcaagaaattttgaagaaattcatgaggagagctcaaaatgaatttgagctcaaaatcaagaaagtgagaagcgataatgggacggaattcaaaaacacaggtgtcgaagaattcttaggagaagagggaatcaaacatgagttctcggtgccttacactccacaacaaaatggtgttgtggaaagaaagaaccgaactctaattgaagctgcaagaaccatgttggatgagtacaagacacctgacaacttttgggcagaggcggtcaacaccgcctgtcatgcaatcaaccgtctctatcttcataagatctacaaaaagactgcttatgagcttctcactggtaacaaaccaaaagttgattattttagagtatttggttgtaagtgttttattcttaacaagaaagtcaagagctcaaagtttgctcctagagtggacgagggcttcttgcttgggtatgcatcaaatgcgcatggatatcgtgttttcaacaataccaccggtcttgttgaaatagcgatagacgtgacatttgatgagtctaatggctcgcaagggcatgtttctaatgacactgcaggaaatgaagaaccaccttgtgaggccataaagaaacttgcaataggtgaggtgagacctcaagaaagggattttgaagaaggaaccttatggatgaccaatgagatagttgatgtgggtgcaagggtggtgagtgacaaagtctccacccaagcaaacccatcaacctcaagtcatccaagccacgaagaaaatcatcaaaggatgccaacagtggtagaagatgaacaagaaagtactgatggtgaagtgcctcttgatcaagtaattgatgaggaggagcaaatacaaagacatccatcaatgccgcatcctagagtccatcaatcaatacaaagggatcatccagtggacaacatcctgggtagcatcaggagagggccacttaaggttgaagaagcattgggtgatccggattggataattgccatgcaagaggagttgaacaacttcactaggaatgaagtctggtccttagtccaaagacccaaacaaaatgtgattgggactaaatgggtctttaggaacaagcaagatgaacatggcgtggttacaagaaacaaggcacggttggttgcccaaggctatactcaagtggaaggactcgattttggtgaaacatatgcgccggtagcaaggttagaatcaattagaatattaattgcatatgctactaaccatgatttcaagctatatcaaatggatgtcaagagcgcatttctaaatggaccactacaagagagagtatatgtggagcaaccaccgggttttgaagatcaaaagaagccaaatcatgtttatcttcttcacaaggcactctacgggcttaaacaagcccctagagcttggtatgactgtcttaaagaatttttaattaagaatgggtttacaataggaaaagctgactctaccttatttactagaaaagttgacaatgaattatttgtgtgccaagtatatgttgatgacattatatttggtagtactaatgaaaaattttgtgaagagtttagcaaagtaatgacgaacaggtttgagatgtctatgatgggcgagcttaaatacttcctgggatttcaagtcaaacagctcaaggaaggtacttttctatgccaaaccaaatatacacaagatatgctcaagaaatttggcatggaaaaggcaaaacacgccaagactccaatgtcatcaaatggacatctcgacctaaatgaggaagaagctgagtacatagcagctggggcatgttgtgcacagttgttatggatgaagcaaacacttcgagattttggttgtctgtcacctgcaattttttcagtcgcgcaacacctttttgaccggtcgcagcagctgtgcatgcagaaactttttcctttgtcccggatgaccgttctcccgaagggcggaaatcaaatgaacgtccttggggagagtcgcgtcttcttcctcctccttgctccaaacagtcttgcccgcatcaatgtgtttgacatgatctgggaagagatcgtccgtgcttcctggtctcctctcaaagggtgtgttcatgcaccctttatcatgaagatgatcgaagtggtcacccagacccacttcgaaaaacctgtcaaacactcccgctacgtaccctactgggttgattcctccaacccagctgctcgtacgaagcgggctccctcacggtctggaggccctgcctcctccactgagccacctcgccagcctccccatcatccatcctcctctccccccgctgctgcctcgcgtccctctcctggccgcggatctcccatgccacgtgctcgtggtcgtggtcgaggtcgtggccgcgggatgggtgctcgcttggtccatggggttgcgacatttttctccatgtgccgcaacatttctgctgatgtccatgaagtggcacggcgtcagcgggagactgacgacaatcttcgttgtcaagcttcctccatgggcatgccttttgtccctcgttcgcctgatgtgcctctccatcctcctcccccggagatcaatgagtggcaccagcaggcctacggggtgccttttatgtctgcagacgatgaagatgaagaagtctatgttgatgatcgcgaggagtttgccccgcctccctaccatggggatccgggtcaatcatcctcccaccctccgcctccttacccgggtccgggacccattcctggtgaccctaggccatccggctctggttaccaccaccaccctccaccttctcctgatcatcgtacatcttcggcatctgttttttctgcggctgatgagccacctcgggactccacttttgaggaggacgcgatgaggacttttttccctgactacacttcatatcctccatcatatcctccgtcatatcctcctcctggaggatactga

SEQ ID NO: 4510 - DNA, 2259 bp, Zea mays
  Clone ID: TF_ZM4938.C1.o1.fg
atggatacccataggccaccacacttcgacggcactaacttcccatattatagtgctagaatggcttgttacctagaggccgttgatctaggtgtttggagagtcactcgtgacgggatgaaacccctcaagaatcccgagaaacccaccacgagtgaggaaaaagaaattcatttaaatgctagagccaaaaattgcttgtatgaatctcttagcatggatatttttaaccaagtatttaccctgaaaactgctaatgagatttggctaaaattgcatgagctccatgacggcacatccaatgtccgtgagcaaaaacattgcctagtcttaaatgagtataattcttttgctatgaaagatgatgagcttgttagagacatgtattctcgattgaatctaattatcaatgagctcaattctattggcattaataagctaggtgatgcggacattgtgaggaagattatctccctgctaccacaacaaagatatgggagcatcatcaccatccttcacaacatggaggatttgagcaacatgaccccgaccattgtgattgggaaaatcgcggcctttgagatgtcgcgaaaaatgagtcagggagaggagccaacttcctcaaagccatatgcttttgcatgtgatgaaaggaagggcaaaaagaaggctcccactccaagttcctcaagtgaagaagaggaagaagaagaaagtgacgatgatgaagataatcaaccatgcacatcatcctccgaggacgaagaaacaattcgatgcgtcggaaaggtaatgaggatgatccgcaagattaatctaatgggtgtgcccctgcaggtcgaggatcttctctttaatattgacaggaaaaggcaaaggaagagaggatgcttcacatgtggggagaagggccacttcagggacaactgtccaaatatggccaaacccaaaaaggtgaggagcaaaggcaaggcgctaacaagtgttacaacttgggatgattcttcaagtgaagatgaacctccaaggacgcgcagccaccggtcctcatcacgctcatcacggtcatcacacaaatgccttatggcaagaggtaacaaaagcattccatcctctagtgatgaaagtagtagtgatgatgaaggtgagggaaagccctctgtagatgagcttgcggaagccatagaatttttccaggatgtttgcactaagaaaaaagctcaacttaaaactttgaaaaataagttggttagctctcaaaatgattacaaaagtttgctagaaaaatttgaaacttttgcaaacttaaatagtgagctatcaactaaaattgagctattagaatctagtgcttcatccactgctaccgatgatagccttattaaaaagaatgaaaaacttaaggctaagttagctagctcccaagaagctattgaaaatttgctagagaaaatggaaattcttagcatacacaacaatgagctaactactaagctagaaaacattggtagcaccccagcagcatctttagttgaaatacctgaaataattaagaaagatgcttctacttcctgctttgatttaattgatgattctaacccctgcaaccaagtcgttgttgagaatattgttgtagagacatgtacggatgaggttgcaaaggaaaatgaacaattaaagcaagaagtggctcgccttggcaaggctttgtatgacaagaaaggcaaagccaaacaaatccaacctccacaggataacaccactgcgggagtgaacaagcctgtagagggagaaactgtgatttgtaggctatgccacatggaaggccacaagtctttccaatgcaaggcgatgaccggggataaacaaaggcaaaagctcaagccatcaagcaaaatctccaacacctacatcaaaaaggtgaacaaaaaggatgctacaccatatttgatcaagaagaaaaagaacggaaaggtgatagcaatccaggccaacaagcaagccaacaaaggaaagggggccaaacgcatctgggtgccaaaggagataatttcaaccatgaaaagcaccaagaaggtttggatcccgaaagggaagcgagtggaccgaaggtcctcgggaaatttggagacttggcaaagttgggatgtatatcatggggtacatcatattggattaagtttattgccaagtgggttagtgaaaactttggacccaaatttcccacccatgactaagatatacgtatctattatctag

SEQ ID NO: 4511 - DNA, 1242 bp, Zea mays
  Clone ID: TF_ZmC119_1158
ctattcttgttgttcattgacctcttcaccgactatttcctcttccactggctcttcttcttgaatttccagttcacctggttcagtttctacttctgcatgataggcttgtcctcggttgacagatatgggttgactctttcctgccgaggcctggccttgtttcattggagctggtgtagtgtaggcagccctgttgggacagtagttggcgtagtgtcccggttgtccacatttgaagcatgccctattggtggatgtgttggaagcaacaggtcctgcggaggtgcttgcttttggaggagcagttggtgcctgttgagtttgttgtccagaactgccactagctggtgtacttggagtggtagtatagcgaggacgggaactacttccagcctgcccttggttagcagcctttcttttctctccaaatatactcctcttgttttctacaacaatagctttgtcaagtagcctttggaaggatgggaatgtgtgcgataccagttgatattgcaagggtccaatcaaaccgtccagaaaaagctcctgcttttgctcatcatcctcaacatctctaggagcatatcgagataactggatgaatttgtccctatattcactcacggacatacttccttgcttgagggagagaaactcctttctcttaatcttcatgagtccagcaggaatatggtaattcctgaattgtgtggagaattctgcccaggtaattgtatcgacagcagcatgagcagcgcagtacgcatcccaccaatctgcagcaggaccagcgagacgacctgatgcgtagagtactttctctcggtccgagcactgagctatgttgagcatcttctctatagactttagccagtcatcagcttgtagtggatccgtggagttggagaaggttggtggtttgtggctcatgaattcccgatgcttatctcggggtggaactggtggtggaggtggaggcaatggcacctgttgctgttgctgctgttgttgaagttgttgttgcagctgctgttgttgcacccttctctcctggcgtatctcttcccgctcttggtgcatctcccgacgtgcatcctctctttcctggcgcatttcctggcgttcttgctgcatttgggcgcgcatatctgccatagtgtcagccatttgctgcatcatcctcatttgagctgcaatcagtgggtcaactccgcctggtggaggattaggaggattcat

SEQ ID NO: 4512 - DNA, 593 bp, Zea mays
  Clone ID: TF_ZmC483969_1
cgttgctctagattctttctcttcttggtttccccacatcaccattatattcatggttaatcttgatttgcttttggggattcttcttttgctcaactcgtgactttggttgaggcttcacttgtggattcactagtttcttggttgggcacattgaggtgaggtgaccccaagtgtggcacttgaagcactggtcatgctttagcctccattcttccttcttcaacttgagcttccttttattggggcatgcctttgcaagatgacccatctcatggcatttatagcacatgaagtgaaatatcttatttccttttaatttgaattgcccgcctttgatattgctcttgttgaaaccaaggccactcttgtcatcatatcttctttgatttttcattataagatcatgagtgacttctgatttatgccacctctcaaacatgttgcttaaattcttcactttgtttttgagcttattattttccttcaaaaggttagtctcacaagacaaggaagaataataataatctatagttgaagaacatggcatagctaataaatcatcacaataggtgggttacctgcccgggcgg

SEQ ID NO: 4513 - DNA, 3951 bp, Zea mays
  Clone ID: TF_ZmC4916_441
atggatcctaagggaaaggggatggtggtcgacaacaatgagaaggagtctatcttcaacgagccgaagaatgacaagtctaccgacttgggctcaagccacaagcgcaaagatgggaagaagaagaagacaaggcgcatcaaggagatcgtctactacgacagcgacgaatcctcttcttcccaaaaggatgatgacaacgactacaggaagacggtcaattcaaacttttcatttgattattctcgtattccacatagttcgaattcgcatttgctttccattcctcttggtaaacctccacactttgatggggaggactacggattttggagtcacaaaatgcgtagtcatttattctctctccatccaagcatatgggagattgtagagaatggaatgaaatttgatagctcggatagccctatgtttattaatgaacagattcataaaaatgcacaagccactactgtgttgctagcctctttgtgcagggacgagtacaacaaggtgagcggcttggataatgccaagcagatatgggacaccctcaagatttctcacgaggggaacgacatcaccatgctcactaaaatggagttggtggagggcgaacttggaaggtttgcaatgataaggggcgaggagccaacccaaacatacaaccggctcaagacccttatcaacaaaataaggagctatggaagcacgcgatggacggaccatgatgtcgtccgactattactaaggtcctttaccattcttgatcctcatttggtgaataatattcgtgagaatcccaggtacatcaaaatgtcgcccgaagaagtcctaggaaaattcgtcagcgggcgaatgatgattaaggaagcaaggtacgtggacgacgccttgaatggaccgaccaacgagccgcaacctcttgctctcaaagcaacaagaagcaaggaggcgctacctagcaaggtggcacaaattgaggcgactggacttaatgatgaagagatggctctcatcatcaaacgcttcaagtcggtgctaaagggtcacaaggggcagccaagcaagaccaagacaaaggggaagcgctcatgcttcaaatgcggtaagattggtcattttattgctaactgtcccgaaaatgaaagtgaccaggaacacgggagcaagagggaaaagaagaaaaattacaagaaggctaagggcgaggcacatctaggaaaggagtgggactcggattgctcctcctccgactctgacaatgaaggactcgccgccaccgccttcaacaagtcatccctcttcccaaacgagcgtcacacatgcctcatggcaaaggagaagaaggtatgtactcgagacggtactacttatgattcctctagtgatgatgaatctagtgatgaggaaatagactactctagcttgttcaagggattggatagaaataaaattgataaaatcaatgaattgattgatgcattgaatgagaaggataaactcctagagaaacaagaagatttattgtatgaagagcatgataaatttgtagaagctcaaagatctcatgctctagaagttaaaagaaatgaaatgctttcttgtgaattatcttcttgccatgagacaatttctaaatttaggagcattaatgatgatatgaatgctaagttagagattgctaataaatccaattcttgtgaagaacatgttgcaatttgtactaggtgtaaagattttgacattaatgcttgtagtgaacacctagtttcaatttccaagcttaatgatgaattggctagtcttaatgctcaacttaagactagcaagaatgaatttgacaagctaaaatttgcaagggatgcctacactattggtagacacccctcaattaaggatggacttggcaacaagagggaagccaagaacttgacaagccataaggctcccatctccgccaaggaaaaagggaaggcccctatggctagtagtgtgcaaaagaaccatgcctttatgtaccatgatagaagacaacctagaaatgcttataggagttgtaatgcatataatgtctttgattctcatgacatggttgcttctagttcttcttatatgcatgatagaaatgttggtaggagaaatgttattcataatatgcctaggaaaaatgttgttaatgttcctaggaaagtaaatggaccttctacaatttattgtgctttaaatgcttcctttgctatttgtagaaaggataggaaaatagttgctaggaagttaggggcaaaatgcaagggagacaaaacttgcatttgggtccctaaggatatttgcactaaccttgtaggacccaacaagagttgggtttatgcatccggaggttcaagctggattattgatagcggatgcacaaaccatatgacgggggaaaagaagatgttcacctcctacgtcaagaataaggattcccaagattcaattatattcggtgatgggaatcaaggcaaggataagtctgaaacccaagggaccctcaagcgcttcctcaggagagctcaaaatgagtttgagctcaacgtgaagaagataaggagcgacaacgggtccgagttcaagaaccttcaagtggaggagttccttgaggaggaagggatcaagcacgagttctccgctccctacacaccacagcaaaatggagtggtagagaggaaaaacaggacgagcacggggtggttgtaccaaatggatgtgaagagcgcgttcctcaacgggccgatcaaggaggaggtgtacgtagagcaaccccctggcttcgaggatgaacggtaccccgaccacgtgtgtaagctctctaaggcgctctatggacttaagcaagccccaagagcatggtatgaatgccttagagactttttaattgctaacactttcaaggttgggaaagccgatccaactctttttactaagacatgtgatggtgatttgtttgtgtgccaaatttatgtcgatgacataatatttggttctactaaccaaaagtcttgtgaagagtttagcagggtgatgacgcagaaattcgagatgtcgatgatgggcgagttgaactactttcttgggttccaagcgaagcaactcaaggatggcaccttcatctcccaaacgaagtacacgcaagatctgctaaagcggtttgggatgaaggacgccaagcccgcaaagactccgatgggaaccgacggacacaccgacctcaacaaaggaggtaagtccattgatcaaaaagcataccggtcaatgatagggtctttactttatttatgtgctagtagaccggatattatgcttagcgtatgcatgtgtgctagatttcaatccgatcctaaggagtgtcacttagtggcggtgaagcgaattctaagatatttggttgctacgccttgcttcgggctctggtatccaaaggggtctacctttgacttggttggatactcagattccaactatgctggatgtaaggtcgataggaagagtacatcagggacgtgccaattcttaggaaggtccctggtgtcgtggaactctaagaaacaaatctccgttgccctatccaccgctgaggccgagtatgttgccgcaggacagtgttgcgcgcaactactttggatgaggcaaaccctccgggactttggctacaatctgagcaaagttccactcctatgtgataatgagagtgctatccgcatggcggaaaatcctgttgaacacagccgcacaaagcacatagacatccggcatcactttttgagagaccaccagcaaaagggagatatcgaagtgtttcatgttagcaccgaaaaccagctagccgatatctttaccaagcctctagatgagaagaccttttgcaggttgcgtagtgagctaaatgtcttagattcgcggaacctggattga

SEQ ID NO: 4514 - DNA, 5442 bp, Zea mays
  Clone ID: TF_ZmC4916_445
atggatcctaagggcaaggggatggtgatcaacgacaaggagaaggagaccttcgtcaacgagctcaataatgacaagcccactgactcaggctcgggccacaaaagaaaagacgggaggaagaagaagacaaggcgcatcaaggaaattgtctactacgacagcgacgaatcttcctcctcccaaaaggacgacgacaacgactacaggaagacggtcaattcgaatttttcatttgattattctcgtattccacctagttcgaattcgcatttgctttcccttcctcttggcaaacctccacactttgatggggaggactacggattttggagtcacaaaatgcgtagtcatctattctctctccatccaagcatatgggagattgtagagaatggaatgaagtttgatagctcggatagccctatgtttattaatgaacagattcataaaaatgcacaagctactactgtgttgctagcctctttgtgcagggacgagtacaacaaggtgagtggcttggacaacaccaagcaaatatgggacatcctcaagatttctcacgagggaatcgacatcaccatgctcactaaaatggagttggtggagggcgaacttgcaaggtttgcaatgataaggggcgaggacccaacccaaccatacaactggctcaagaccctcatcaacaaaataaggagctatggaagcacgcgatggacggcccatgacgtcgtccatctattactaaggtcctttaccattcttgatcctcatttggtgaataatattcgtgagaatctcaggtacaccaaaatgtcgcccgaagaagtcctaggaaaattcgtcagcgggcgaatgatgattaaggaagcaaggtacgtggacgacgccttgaatggaccgatcaatgagccgcaacctcttgctctcaaagcaacaagaagcaaggaggcgctacctagcaaggtggcacaaattgaggcggccggacttaatgatgaagagatggctctcatcatcaaacgcttcaagtcggtgcttaagggtcacaaggggcagccaagcaagaccaagacaaaagggaagcgctcatgcttcaaatgcggtaagattggtcattttattgctaactgtcccgaaaatgaaagtgaccaggaacacgggagcaagagggaaaagaagaaaaattacaagaaggccaagggcgaggcacatctaggaaaggagtgggactcggattgttcctcctccgactctgacaatgaaggactcgccgccatcgccttcaacaagtcatccctcttcccgaacgagcgtcacacatgcctcatggcaaaggaaaagaaggtatgtactcgagacggtactacttatgattcctctagtgatgatgaatctagtgatgatgatgagatagattactcatgcttattcaagggattggatagaaataaaattgataaaatcaatgaattgattgatgcattgaatgagaaggataaactcgtagagaaacaagaggatttattgtatgaagagcatgataaatttgtagaagctcaaagatctcatgctctagaagttaaaagaaatgaaatgctttctcgtgaattatcttcttgccatgagacaatttctaaattaaggagcattaatgatgatatgaacgctaagttagagattgctagtaaatctacctcttgtgtagaaaatgctataacatgcactagatgtaaagatattaaccttgatgcttatagtgaacacctagcgtgcatttctaaactaaatgaagaggtagctagtcttaatgcccaacttaagactagcaaaagtgattttgaaaaactaaaatttgctagggatgcctacacggttggtagacacccctcaattaaggatggacttggcttcaagagagaagccaagaacttaacaagccataagactcccattcccgccaaggagaaagggaaggcccctatggctagtagtgtgcaaaagaaccatgcttttatgtatcatgataggagacaaactagaaatgcttataggaattataatgcttatgatgattttgactctcatgccatgtttgcgtctagttcttcctatatgcatggtagaaatatgtctaggagaaatgctactcatcatgtgcctagaaagaatattattcatgctcctaggaaagtagtgaatgaacattctacaatttattgtgctttaaatgcttcctttgctatttgtagaaaggataggaaaatagttgctaggaagttaggggcaaaatgcaagggggacaaaacttgcatttgggtccctaaggatatttgcactaaccttgtaggacccaacatgagttgggtttatgcatccgggggttcaagctggattatcgacagcggatgcacaaaccatatgacaggagaaaagaagatgttcacctcctacgtcaagaataaggattcccaagattcaataatattcggtgatgggaatcaaggcaaggtaaaagggttagatgtgtctgtctttagaagaagtgatggttcactagcctttaagggtgtattagacggcaagctctacttagttgattttgcaaaagaagaggccggtctagatgcatgcttaattgctaagactagcatgggttggctgtggcatcgccgcttagcacatgtggggatgaagaatcttcacaagcttctaaagggagaacacgtgataggtttgactaacgttcaattcgaaaaagatagaccttgtgcagcttgtcaggcaggtaaacaggtgggaggagcgcatcacagcaagaatgtgatgaccacatcaagacccctggagctgctacatatggacctcttcggacccgtcgcctatctaagcataggaggaagtaagtatggtttagttattgttgatgacttttcccgcttcacttgggtgttctttttgcaggataagtctgaaacccaagggaccctcaaacgcttcctcaggagagctcaaaatgagtttgagctcaaggtgaagaagataaggagcgacaacgggtccgaattcaagaaccttcaagtggaggagttccttgaggaagaaggaatcaagcacgagttctccgctccctacacaccacaacaaaatggtgtggtagaaaggaagaacatgacgctaatcgacatggcgaggacgatgcttggagaattcaagacccccgagcgtttttggtcggaagccgtgaacacggcttgccacgccatcaacagggtctaccttcatcgccttctcaagaagacttcgtatgagctactaaccagtaacaaacccaatgtatcttactttcgtgtatttgggagcaagtgctacattctagtgaagaagggtagaaattctaaatttgctcccaaagctgtagaagggtttttgttaggttatgactcaaatacaaaggcgtatagagtcttcaacaaatcatcgggtttggttgaaatctctagcgacgttgtatttgatgagactaatagctctccaagagagcaagttgttgattgtgatgatgtagatgaagaagatgttccgacggccgctatacgaaccatggcgattggagaagttcggccacaggaacaagatgaacgagatcaaccttcttcctcaactatggtgcatcccccaactcaagacgatgaacaggttcatcaacaggaggcgggtgatcaagggggagcacaagatgatcacgtgatggaggaagaagcgcaaccggcacctccgacccaagttcgagcgatgattcaaagggatcatcccgtcgaccaaattctgggtgacattagcaagggagtaactactcgatctcgattagttaatttttgtgagcattactcctttgtctcttctattgagcctttcagggtagaggaggccttgctagatccggattgggtattggccatgcaagaggagctcaacaacttcaagcgcaatgaagtttggacactggtgcctcgtcctaagcaaaatgttgtgggaaccaagtgggtgtttcgcaacaaacaggacgagcacggggtggtgacgaggaacaaggctcgacttgtggcaaaaggttatgcccaagtcgcaggtttggactttgaggagacatttgctcctgtggctaggctagaatcaattcgtatcttgctagcatatgccgctcaccattctttcaggttgtaccaaatggatgtgaagagcgccttcctcaacgggccaatcaaggaggaggtgtacgtggagcaaccccctggcttcgaggatgaacgataccccgaccacgtgtgtaagctctctaaggcgctctatggacttaagcaagccccaagagcatggtatgaatgccttagagactttctaattgttaatgctttcaaggttgggaaagccgatccaactctttttactaagacatgtgatggtgatttgtttgtgtgccaaatttatgtcgatgacataatatttggttctactaaccaaaagtcttgtgaagagtttagcagggtgatgacacagaaattcgagatgtcgatgatgggcgagttgaactacttccttgggttccaagtgaagcaactcaaggatggcaccttcatctcccaaacgaagtacacgcaagatctgctaaagcggtttgggatgaaggacgccaagcccgcaaagactccgatgggaactgacggacacaccgacctcaataaaggaggtaagtccgttgatcaaaaagcataccggtcaatgatagggtctttactttatttatgtgctagtagaccggatattatgcttagcgtatgcatgtgtgctagatttcaatccgatcctaaggagtgtcacttagtggcggtgaagcgaattcttagatatttggttgctacgccttgcttcgggctctggtatccaaaggggtctacctttgacttggttggatactcagattccgactatgctggatgtaaggtcgataggaagagtacatcggggacgtgccaattcttaggaaggtccctggtgtcgtggaactctaagaaacaaacttccgttgccctatccaccgctgaggccgagtatgttgccgcaggacagtgttgcgcgcaactattttggatgaggcaaaccctccgggactttggctacaatctgagcaaagtcccactcctatgtgataatgagagtgctatccgcatggcggagaatcctgttgagcacagccgcacaaagcacatagacatccggcatcactttttgagagaccaccagcaaaagggagatatcgaagtgtttcatgttagcaccgagaaccagctagccgatatctttaccaagcctctagatgagaagaccttttgcaggctgcgtagtgagctaaatgtcttagattcgcggaacttggattga

SEQ ID NO: 4515 - DNA, 1551 bp, Zea mays
  Clone ID: TF_ZM5003.C1.o14.fg
atggatcctaagggcaaggggatggtgatcaatgataaggagaaggagtccttcatcaatgagcctaaagacgacaagcctagtgactcgggctcaagtcataagaagaaggacggaaagaagaagagatgcatcaagaagatcgtctactacgacgacagcgacgagtcctcttcttcccaaaaggacgaggacgactacgagaaaaagaaaacgatttgggacaccctcaagatctcacatgaagggaacgacgtcaccatgctcaccaagatggagttggtggaaggcgaactaggaaggttcgcgatgatcaggggagaggagccaacccaaacgtacaaccggctcaagaccctcgtcaacaaaataaggagctatggaagcacacgatggacggaccacgacgtcgtccgcctaatgctaaggtcttttactgtccttgatccacatctggtaaacaatattcgtgagaatcctaggtacaccaagatgtcgcccgaagaaatacttggaaagttcgtaagcgggcgaatgatgatcaaggaggcaagatacgttgacgatgcattaaatggcccaatccatgagcctcaagccattgctctcaaggcaacaagtagcagggaggtgctacctagcaaggtggcacaaattgaggcggctgggttaaataaagatgaaatggccctcatcatcaagcgcttcaagacgacgctcaaaggtcgcaaggagcatcccaacaaaagcaagacgaagggaaagcgctcctgcttcaagtgtggtaagattggccattttatcgctaattgtcccgaaaatgatagtgaccaggaacaagagaagaagagggaaaagaagaaggcttacaagaaggctaagggcgaggcacaccttggcaaggagtgggactcggattgttcgtcgtctgaatccgacaacgaaggactcgctgcctcggccttcaacaaattgtccctcttccccaacgagcatcacacgtgcctcatggcaaaggagaagaaggtttatgcatccgggggatcaagctggattatcgacagcggatgcacaaaccacatgacgggggagaagaagatgttcacctcctacgtcaagaacaaagtttcccaagactcaatcatattcagtgacgggaatcaaggcaaggataaatctgaaacccaagggaccctcaagcgcttcctaaggagagctcaaaatgagtttgagctcaaggtgaagaagataaggagcgacaacgggtccgagttcaagaaccttcaagtggaggagtaccttgaggaggaaggaatcaagcacgagttctccgctccctacacaccacaacaaaatggtgtagtagagaggaagaacaggacgctcattgacatggcgaggacgatgcttggagagttcaagacccccgagcggttttggtcggaagccgtgaacacggcttgccacgccataaaccgggtctaccttcatcgcctcctcaagaagacttcgtatgagcttctaaacggtgtcttcggaatcggatcatga

SEQ ID NO: 4516 - DNA, 5683 bp, Zea mays
  Clone ID: TF_ZmC119_1409
ttaagaggatctagggaaaagatgggggaagtctatacgaagctcttcttctctttcccacgttgcctcatcttcaccgtggtgactccattgaactttgcacatctttatcaccttattccttgtaactcgagtcaaagtgtccagaatcttgattgggtactcagcataagtcaggtcatcttgaacactgaggtcttccattggtagttgctcctcaggtaccctgaggcacttctttagctgggacacatggaatacatcatgtacatctgacagatgattgggtaactccaattgatatgcaacttctcccactcgctttaagatcaagaaaggtccaatgaagcgaggggacaactttcctttaactttaaatctcctcatacctcggagtggtgacaccttcaaatagacatgatcaccctccttaaactccagtagtcttctcctattatcagcatagctcttttgcctggattgtgcaattctcgaattctcccttatcatttgaacttgttcttctgcctcttgtataagttcaggaccaaagaattgtctttctccagtttgatcccaatacagtggagtcctgcattttctaccatacagagcctcaaacggagacatcttcaaactggcttgataactattattataggaaaactcagcatagggtagactcttctcccaactgccaccatgcttgagagcacaagctcttaacatatcttccagcacttgatttgttctctctgtctgtccatcagtctggggatggtaggctgaactaaaattcaactttgtatccaagctctcatgcaacttcttccaaaatcgagaagtaaactgtgatcctcgatcagacacgatcttcttaggtactccatgtagacaaactatccgagtcatatacaattctgctagcttggctcccgtgtaattagtcctcacaggtatgaaatgagccacttttgtcaatctgtctacaattacccaaatagagtcatatcctgctggagtgcggggtagtccaacagtaaaatccataccaattttttcccatttccactcaggaatcttaagagggtgcaatagtccagctggtctttgatgttcggccttgactctttgacacacatcacacttagccacatgagcagcaacatctcttttcagtccataccaccaatacttttgcttcaaatcttgatacatcttagtgctaccagggtggatagaataatcagaatcatgggcttccttcaatatagtctcccggaggctatcaatctctagaacacatatccgatctttgaaccatatggtaccttgctcatcctccgtgaattctggaactcgaccttcagtaataagatccttaatctcttgaattttagcatcaccaacctgacctttacgaatctcttgctccaaggtaggttccaattcaatggtaactccttcagtgtgagtaacaattcccaggttgagtctctcaaagtcttttgctaattcatcaggtagcaaatttgccttgcccgggtgatagtgaatctccaaatcataatccttaatgagctccaaccaacggcgttgcctaaggttgagatccttctgagtgaatatatacttcaaactcttatgatccgtgtacacttggcacttagtccccataatgtagtgtctccaaatcttaagtgcatgcacaacggcagccaattccaagtcatgagtggggtagttcaattcatgcttccgcaactgacgagatgcataggcaatcacatgtccttcttgcataagcacacatccaagtccttggccacatgcatcacaataaatgtcaaatcccttctgcagatctggcataatcaatatcggaggtgacatcaatctctccttcaattgatcaaagctctcttgacatttctcatcccacttaaattctcttcctttctccaaaagcgatgtcataggtttggcaattttagagaatccctcaatgaatctccgataatatcctgcgagtcccaagaaactccgaatctcagtaactgtagtgggcactctccactccattatctctttcactttagcaggatccactgctattcctccattagaaataatatgaccaaggaatggcaccttgtcaatccaaaactcgcacttgctgaacttagcgtagagttgattatctcgtaacttctgtagcaccaaccttagatgttgttcatgatcactttcattcttagaatagataagaatatcgtcgataaacaccacgacgaatctgtccaaatactccataaacactttgttcatcaaattcatgaaataagctggtgcattggtcaatccaaacgacataacagtaaactcatataatccatatcgagtcgagaaagccgtcttgggaatatccgatggtctaatcctcatctgatggtatcccgatcggagatcaatcttcgagaataccctagcacctctcatctgatcaaatagatcctcaatacggggcaacggatacttgttcttcacagtaacatcattgagtgatctatagtccacacacatccgttgtgatccatccttcttctgtacgaataacaccggtgctccccaaggtgaggaacttggacgaatgtaaccagcctcttgtaactccgtcaactgcttcttcagttccttcaactcctctacggacattctatatggccgttttgaaataggggcggttccaggtaagagatcaataacaaactcaacttctctatcaggtggcatccctggtaactcctctggaaagacatctggaaaatctctaaccacccggatgttgttaccaacaaactcctcaggcataaagaacattgcacgcatggatgaggaggttactgcaatattaacttgaaatctttctcctttagcagtagtgagttctacggtacctcgaccacatgctataacggcctttgcctttcttagccatgacataccaaggatcagatctatactgcttgactctaatattatagcagtagctccaaattctctacccataatggttaatgtcaatctacgtgtcatttgattcgcctcaacaggccctttaggtgtaattactatcatgggttttctcatatttagcagtggtatttcatttgtgttggcatatctagcagacatgaatgaatgtgtagcaccagaatcaaataatattgttgcaggaattgcattaacataaaacataccaattacgaggtccccaccatcaggagtatcatcaacgctgacttgattcaccctggctatagaatatcccttgctagatcctggagtttgctgcctgttctgaactggagtagtagcaatcctctgtgggcagacatttgcatagtgaccagtcttcccacacttgtaacaagtagtgcctggactctgtcctgaaaacttcgtcggggtgccggtaggggtagcctgtcgaggaggtggagtcctcaaaggtgattgctgaattgggcgctggcctccgccagtgcgagctggtgtaccctggggtgaactgtagcgaggtcgaacactgctgcttccttgtccttgagatatagcctttctcttcaaatctcccagctgaacacgcttgtgttcaatagccagggccttatcaagcagcctctgaaatgatggaaatgtatgtgccactagagcatactgcagtggtccattaagtccttcaataaaatgctcctgcttcctctcatcttcagcaacttcatcaggggcatatctggataactggataaacttgtcgcggtactcgctgactgtcatgcttccttgcttcagcgatagaaattccttcttcttaatcttcatcaatccagctggtatatgataattcctgaactgtgtactgaactctgcccaagtgatagtatcagcagcatcgtgggcggcagtatatgaatcccaccagtcagcagcaggacctgtcagacgtccagaagcatataaaaccttctcccggtcagtacattgtgcaatattcagcatcttctcaacggacttcagccaatcatccgcgtccagtggatcaggtgagctagcgaatgtaggtggcttatgactcatgaactccctatgcttatcacggggtggaactggtggtggtggtggaggcagtggtacttgttgctgttgctgttgcatttgttgttgcagctgctgttgttgcgccctcctttcctgacgtatctcttctcgttcttggcgcagctctcgacgtatatcctcccgctcttggcgcatctcctggcgttcctgctgcatctgagcacgcatatctgtcatagtgtccgccatctgttgcatcatcctcatctgagctgcaaccagtgggtcaactcctgccggtggaggcggtggtggaggatccatctctactggttgtggctggggttgtctaaatatcctccgagtgtgtcgattgggcggtaaatcaattccaccaccccgcctggtattgaccatcagttttacactctgcagaggttgcacatctttacccacaagtcgtgttacccatctgccaaggggtcatgaatcccatacacctctaccaaggaagcgaggcagggtaacactacgaggcctttacaaagttccactagcttcagaaaacccgctacagtttctagggagcgcaatgcaggaatcccccgtctgaccgccattgtagcaaaatcaacccaagaacctccctacacagaccactcccctactgtccttgccccttttagataaggtagtcatccagtagctttcctcattagtcagccaagggcgtcccatatcacccttgtgggagcactattttcccgggtggttctccatgttccaattaacataatgatcttgtcatgaatcagtaaataacaaattgataataaaaagatgatcatgaataatgtgtatcttaatacccaaaaccacataaagcaatagcaggtactacccaaaagttcagtggtaaacaaggtataaagatagtcagactacggtaacctattgggtcccatcaaaattaatctatgcagatcataatgattaaaaagaacattattgggcaaatagaagtgatcaagggcacaacttggcttcaacgagctcctgctcaacagtctccacctgctgaacacctgggtcctcagtggcttgctcgtccacgattgcagtgaaggcgcgcctgtccacggcgtgaagcggccctacagcggtgatggactccggtgaggaattcaccacacaccgagggttcctctcccccaacggcgctgaggatacttccgccgcaccctaaaggagcctcccaaccaatgctattggcccaagcggcgtcggagacgagatccaaccaacggcgccgctatcctcctctccaattctcaccacggggaaggtatggcttcagggcgagggttcatcgcgcttgaggactgagggtgctacttatgagctgaagtgatggcatctgagaagtttgggagccgttcaactggctggctgagccgggcaaatcgcggcggtggttgagtacgcggagaaaaaggaggaagaggaacaggacttgcaaggtgactagctgtgggtctagcgggtgggtgtctgggccccg

SEQ ID NO: 4517 - DNA, 3651 bp, Zea mays
  Clone ID: TF_ZM4410.C4.o3.fg
atggatactaagggaaaggggatggtgatcaacgacaaggagaaggaatccttcatcaatgagccaaaagacgacaagcccactgactcgggctcaagtcaaaagaagaaggatggaaagaagaagaggcgcatcaagaagattgtctactactacagcgacgaatcttcctcttctcaaaaggacgacgaatacgaggagaaaaagaaaacggttaactcgaacttttctttcaattattcttgtattccgcataattccaatgctcatttgctttccattccacttggtaaacctccacactttgatggagaggactacggattttggagtcacaaaatgcgtagccatttgttctctcttcatccaagtatatgggagatagtagaaaatggaatgcaatttgatagtttggataattctatgtttatcaatgaacaaatccataaaaatgcacaagctactactgttcttttagcatccttgtgcagggaagaatacaataaggtgagcggcttggataatgccaagaaaatctgggacaccctcaagatctcgcatgaggggaacgacgccaccatgctcaccaagatggagttggtggaaggtgaactaggaaggttcgcgatgattaggggagaggagctaactcaaacgtacaataggctcaagaccctggtcaacaagataaggagctatgggagcacgagatggacggaccacgacgtcgtccgacttatgctaaggtccttcactgtccttgatcctcgtcttgtaaactctattcgtgagaatcctaggtacatcaagatgacgcccgaggaaatactcggaaagttcgtaagcgggcgaatgatgatcaaggaggcaagatatgttgatgatgcattgaatggcccaatgccgatctacgagcctcaaactgttgctctcaaagcaacaagtagcagggaggcactacctagcaaggtggcgcaagttgaggtggccgggctaaatgaggacgaaatggccctcatcatcaagcgcttcaagacggtgctcaaaggtcgcaaggagcatcccaacaagagcaagacgaagggaaagcgctcctgcttcaagtgtggtaagattggtcactttattgctaactgtcccaacaatgatagtgatcaggaacaaggaaagagcggaaagtgggaaaagaagaagacctacaaaaaggcgaagggcgaggcacaccttggaaaggagtgggattcggattgctcctcgtccgactccgacaacgaaggactcactgcctcatccttcaacaagtcggctctcttccccaacgagcatcacacatgcctcatggcaaaggaaaagaaggtacatactcgaagtactgttacatatgcttcttcaagtgatgatgagtctagtgatgatgaagtagactacacaagcttattcaaaggtttagatagaactaaaattgataagatcaatgaattatatgatgctttgaatgagaagaatagattgttagagaagcaagaggatcttttatatgaagagcatgataaatttgttagtgcgcaaaattctcttgctttagaagttaaaagaaatgaaatgctttcatgtgaattatctacatgccatgaatctatttctagcttaaagagtattaatgttgatttaaatactaagttagaaatagctaataaatcaagctcttgtgtagaacatgttgtgatttgcaataggtgtaaggattttaatgttgatgcttgtagtgaacacttaatttccatctcaaaattaaatggtgaagtggctagtcttaatgcccaacttaagactagcaaaaatgattttgataaactaaaatttgcaagggatgcctacaccattggtagacacccctcaattaaggatgggcttggcttcaagagagaagccaagaacttaacaagccaaagagctcccatttccaacaaggaaaaggggaaggctcctatggctaatagtagtcaaaagaatcatgcatttatttatgatagaaaaatttctagaaatgttcatcattataggagttgtaatgcttatgattcaaatgccatgtttgcttcaagttcttcctttgtgcatggtagagatatgcctaggataaatgttgttcatgtttatgcatccgggggctcaagctggattatggacagtggatgcacaaaccacatgacgggggagaagaagatgttcacctcctacgtcaagaacaaagattcccaagattcaatcatattcggtgacgggaatcaaggcaaggttaaaggactaggaaagattgccatttcattcgagcactccatttcaaatgtgtttttagttgattcgctcggcaagaacgtgatgaccacatcaagacccctggagctgctgcatatggacctcttcggacccatcgcctacctcagcatcgggggaagtaagtatggtcttgttatagttgatgatttttcccgcttcacttgggtattctttttgcaggataaatctgaaacccaagggacccttaaacgctttctaaggagagctcaaaatgaatttgagctcaaggtgaagaagataaggagcgacaatgggtctgagttcaagaaccttcaagtggaggagtaccttgaggaggaaggaatcaagcacgagttctccgctccctacacaccacaacaaaacggtgtggtagagaggaagaacaagacgcttttagacatggcgaggacgatgcttggagagttcaagacgcccgagcgattttggtcggaagccgtgaacacggcttgccacgccataaaccgggtctaccttcatcgcctcctcaagaagacttcgtatgagcttctaaccggtaacaaacccaacgtttcatatttttgtgtatttgggagtaaatgctacattctagtgaagaaaggtaggaattctaaatttgctcccaaagctgtagaagggtttttgttaggttatgattccaatacaaaggcgtatagagtcttcaacaaatcatcgggtttagttgaagtctctagcgacgttgtatttgatgagactaatggctctccaagagagcaagttgatcttaatgatgtagatgaagatgatgttccaacggtcgcaatacgcaacatggcgattgtagatgtgcgaccacaggaacaaacggagcaagatcaaccttcttcctcaacaatggtgcatcccccgactcaatctgatgaacagcaaaacgttgtgggaaccaagtgggtgttctgcaacaaacaagacgagcacggagtggtgacaaggaacaaggctagacttgtggcaaaaggttatgcccaagtcgcaggtttggactttgaggagacttttgctcctgtggctaggctagagtctattcatattttgttagcctatgccgctcaccattctttcaggttgttccaaatggatgtgaagagcgctttcctcaacgatccaatcaagaaggaggtgtacgtagagcaaccccatggctttgaggatgaacggtaccccgaccacgtgtgtaagctctctaaggcgctctatggacttaagcaagccccaagagcatggtatgaatgccttagagactttttaattgctaatgctttcaag

SEQ ID NO: 4518 - DNA, 1164 bp, Zea mays
  Clone ID: TF_ZM4796.C5.o1.fg
atggatcctaagggaaaggggatagtgatcaacgacaaggagaaggagtccttcatcaatgagccaaaagacgacaagcctactgactcgggctcaagtcataagaaaaaggaagggaagaagaagaggcgcatcaagaagatcgtctactacgacgacagcgacgagtcctcttcttcccaaaaggacaacgatgacaacgactacgagaaaaagaagacggttaactcgaacttttcttttgattactctcgtatgccgcatagttcaaatgcacatttactctccattccacttgcatcattgtgcagggatgaataccataaggtgagcggcatggataacgctaagcagatctgggacaccctcaagatctcgcatgaggggaacgatgtcaccatgctcaccaagatggagttggtggaaggcaaacttgggagattcgcaatgatcaggggagaggagccaacccaaatgtacaaccggctcaagaccctcgtcaacaaaataaggagctatggaagcacacaatggacggaccacgacgtcgtccgcctaatgctaagctctttcactgtccttgatccacatcttgtaaacaatattcgtgagaatcctaggtacaccaagatgacgcccgaggaaatacttgggaagtttgtaagcgggcggatgatgatcaaggaggcaagatacgttgatgatgcgttgaatggcccaatccacgagcctcaaaccgttgctctcaaagcaacgaggagcaaggaagtgctacctagcaaggtggcgcaagtgaaggcggccgagcttaataaggaagaaatggccctcatcatcaagcgtttcaagacgacgctaaagggtcgcaaggagcatcccaacaagaacaagacgaaggggaagcgttcatgcttcaaatgtggtaagattggtcactttatcgctaattgtcccaataatgatagtgaccaggaacaagagaacaagagggaaaagaagaaggcttacaagaaggctaagggcgaggcacaccttggcaagaagtgggactcggattgttcgtcgtctgactccgacaacgaaggactcgccgtctcggccttcaacaaattgtccctcttccccaacgagcatcacacctgcctcatggcaaaggagaagaag

SEQ ID NO: 4519 - DNA, 2396 bp, Zea mays
  unsure (1)..(2396): unsure at all n locations
  Clone ID: TF_ZmC10764_2
tcctcagtccctcacacactcactatacactgctctgctgcagcagnaaggaagaactagcgcctccctagctctcgttgtcagcaatggccaccaccgccgcgtccagcctcctcaatcgtccttcgcgggctcccggctccgggatttaggttggtaactgtttattttccccacattgagagagtgtttctacttgtagctcgaggccggggaagccctgctagcggtgtccggtccggcgcccccctatttcctctcgcagcctcttctccccaaaccctaatcttgctcctgcctatctctgctccaatccgttggtggagcggcggcgatggaggggaaggaggaaggtcggatcttcgtgggcggcctgtcgtggcaaacggacgagcgcaagcttcaggacgcctttggtcgcttcggcaaggtcgtcgatgttcagatcatgctggagaggcacacaaaccgccacaggggctttggcttcgtgacattcgaagatcgaagggcagttgacagcgctatcaaagagatgcgtggccaagagttagatggtcgtaccatctcagtgaacaaggctgagcctaagatgaatacagatgacacaaggttcgacaatggcggtggacgagactatcgaggtggtagaggtgatggtccaccccctggcaattgctatgagtgtggccgtcctggtcattgggtccgtgactgccctagtgctgctggtggtcgttctggcagattcccgtccaagttcagtggtggtggcaggggagaccgcttttctggatcagataggtttagtgatcgttacatggatgatcgttatgatggtggtcgttatgggtaccgtgatcaagttgatgcaagggacaagtatgctgggggccgagatcgttatgccaatgatcgctactccgctggtggcgatcactttgacggagacaggtatggaggtggcccggatcggtacgcgccaaatggttatgggagggaacgagaaagaagctacgagagagatggagttcgtggcggcggtggctatgataggaatgactcaagaggtggtggaagctatgacagggatggccctagaggcggcaagggtggtggctatgtcagggatggcccacgcggtggtgttgctgatcgttatggtggtggaggacctgcacgctatgatgggggaagttacagggacaggcctgggccatatgatcgccctagcaggggaggaggtcgttttgatgatcgccactgatgaactgcttctagacccgagcccctggtcttgtagtttagctttttgcagttttgcatagcttaatgcttaatgggctatggaagatgcctaatttacccccctctttggcacttcaatgtctgctctgtatttcaaccagtacttgggcaccggtgttgccttctcgataagtttatcaagctgactgtttttgcatgagacgggtcatcctttgggctactactctgcctgttggtccggatgtttcagttgtgcatgtcgtgcgtcctgcagttatagtggagtcgaggttctcagtgattgtttgtcattgttgatctgaatatctggtatgcatggactgactatgttttcagtgattgcctgtcaccgttggtctgaatatctggtgaacatatatgctcagtgacggtgcttgtcattgttgttggtctggatatttgggttcgcaaggatatatttgcagtgctgagatgcaagtgcttaaccgaactgtagccaaagtaaccctatgctagaagtaactggcaaccatgttgaattgttaatctcgttagttttttgtctggggtcttgaaaatgccctccagatctctcacgagaacgtgaacttcacctatcttctctatcgagctgcatcgccctctcttttggcgagcaggtctttggattcaccgtttgcttgtgtgatatctgcttagttgtgtggggatgatcaagtggttggaaagctttgctgtgactgttcgttgatcttctttctgccgctcattggatcggaggaccgtcttgtttttgtgtgaatgttcgaggaacgacactgttaacaactgacctttttatgttgacaaattacagagttgttcaccttggcattagatgttcgtttgactttaatccaaaatgtcttctattgtttgttgaaaaaaataaaaaaaaaaaaaaaaaaaaaaaaaaaaaaataaataaaaaataaaaaaaaaaaaaaaaaaaaataaaaaaagggcgggcaccaagtggggagcctgtttacccagaaaattaattccaaacagaaaccgtgagacggtaccatctatagcttaataaaattaattcgaaaaataaaaattaggattaaaaattt

SEQ ID NO: 4520 - DNA, 1577 bp, Zea mays
  Clone ID: TF_ZmC7043_1
cattgggtacctcgaggccggccgggaccgggatctcgccctcgctcacctacagctccgtccgccagcgtcagccaggctgccccgggaggccgggaggaagcagatcggagaaggtgatctgttgtaatggctcgattgtacatcggcaacctggatccccgggtgaccgctcgggagctggaggacgagttccgcacgttcggggttcttcgcagtgtctgggttgctcggaaaccacctggctttgcgtttattgattttgatgataagagggacgcagaggatgcaatccgtgacctagatggcaagaatggatggagagttgagttatctcgtaatgccagcggtggtcgtggaggtcgtgaccggcatggtgggtctgagtccaagtgttacgagtgtggtgagactggtcactttgctcgtgagtgccgtttgaggattggttctggaggtctaggcagcggaaggcgccgaagccgtagccgtagccgcagtcgcagtcccagatatcgccggagtccaagttacggtagaaggagttacagtcctgcagcacgctctccaaggcgtcgtagcgtctcaccagctcgtggacgcagctatagcaggtcaccacagcacaagggtgcacgtgaagaatctccctatgataatggataccgccgcagcaggagctagagccagatcgttgtatccgacgacgagcgttatgtgacagatattgggaaagctatggtcaataacctgcttgacagatccttcgtcgactgcttgactttggttagctcataactttctatatacctatcctttagcaaggcatcgtcctgcactgcttaaacgactcggccgactacggctttcagttctgtcttcatggttttgttctgcgctctacattcttcgcacaccctcgcatgcttcattcagtctgccgtgtgttaatctgcctgcgtatcttctcgaagatgctgcgcatcgcaaaagcagtaatgaccttccttctcataccatttggtaaggtttgatttgctgacaaatgcagcatctggtaagtttctccccgtaggtttggtctccgtgctgcgtgcgctgctcctggttcaggaactgcagtatgttagatggatgaggatgactgaatgactcacctactcacgttatcatgccttcagaggacccaagttagtgagcgccaggaagtgaattgaccaggccaaatgctacgttgagccgactttggctttgctctgcgatctccacttgccaacatgtgttgccttcgacgaagtcttcttcgccttccgcttccttctctgcagcatcctgattgatattcttcattcttcgagtgacatgcagtcaccctaattgatcgtcatagagcctgcgttgaagtcgaatcccccctaatggacaatgtagttaaattgttattagcttgtttcttgttggatagactaatgtcagatgctgtttggtataaaatggtaaccatctggttgatgattggcggcgaaaaaaaaaaaaagcacgtggttgctatatgacaagtcccaaggtattattac

SEQ ID NO: 4521 - DNA, 1546 bp, Zea mays
  unsure (1)..(1546): unsure at all n locations
  Clone ID: TF_ZmC7043_2
gtacctcgaggccggccnnnnnnnnnnnnnnnnaaaaaaaaaaaaaaaaaaaaaaaaaaaaaaaaaactctttctcgccctcgctcacctacagctccgtccgccagcgtcagccaggctgccccgggaggccgggaggaagcagatcggagaaggtgatctgttgtaatggctcgattgtacatcggcaacctggatccccgggtgaccgctcgggagctggaggacgagttccgcacgttcggggttcttcgcagtgtctgggttgcccggaaaccacctggctttgcgtttattgattttgatgataagagggacgcagaggatgcaatccgtgacctagatggcaagaatggatggagagttgagttatctcgtaatgccagcggtggtcgtggaggtcgtgaccggcatggtgggtctgagtccaagtgttacgagtgtggtgagactggtcactttgctcgtgagtgccgtttgaggattggttctggaggtctaggcagcggaaggcgccgaagccgtagccgtagccgcagtcgcagtcccagatatcgccggagtccaagttacggtagaaggagttacagtcctgcagcacgctctccaaggcgtcgtagcgtctcaccagctcgtggacgcagctatagcaggtcaccacagcacaagggtgcacgtgaagaatctccctatgataatggataccgtcgcagcaggagctagagccagatccttgtatctgacgacgagcgttatgtgacagatattgggaaagctatggtcaataacctgcttgacagatccttcgtcgactgcttgactttggttaaggcatcgtcctgcactgcttaaacgactcggccgactacggctttcagttctgtcttcatggttttgttctgcgctctacattcttcgcacgccctcgcatgcttcattcagtctgccgtgtgttaacctgcctgcgtatcttctcgaagatgctgcgcatcgcaaaagcagtaatgaccttccttctcataccatttggtaaggtttgatttgctgacaaatgcagcatctggtaagtttctccccgtaggtttggtgtccgtgctgcgtgcgctgctcctggttcaggaactgcagtatgttagatggatgaggatgactcacctactcatgttatcatgccttcagaggacccaagttagtgagcgccaggaagtgaattgaccaggccaaatgctacgttgagccgactttggctttgctcagcgatctccacttgctaccatgtgttgccttcgacgaagtcttcttctccttccgcttccttctctgcagcatcctgattgattcattcttcgagtgacatgcagtcaccctaattgatcgtcattgagcctgcgttgaagtcgaatcctgcatccttattattcaaccgttcccccccccctaatggacaatgtagttacattgttattagcttgtttcttgttcgatagactaatgtcagatgctgtttgatatataatggtaaccatctggttgatgattggcggcg

SEQ ID NO: 4522 - DNA, 1564 bp, Zea mays
  Clone ID: TF_ZmC7043_3
cgttcacctacagctccgtccgccagcgtcagccaggctgccccgggaggccgggaggaagcagatcggagaaggtgattcgttttgatggctcgattgtacatcggcaacctggatccccgggtgaccgctcgggagctggaggacgagttccgcacgttcggggttcttcgcagtgtctgggttgctcggaaaccacctggctttgcgtttattgattttgatgataagagggacgcagaggatgcaatccgtgacctagatgatttttatggttctgtaggcaagaatggatggagagttgagttatctcgtaatgccagcggtggtcgtggaggtcgtgaccggcatggtgggtctgagtccaagtgttacgagtgtggtgagactggtcactttgctcgtgagtgccgtttgaggattggttctggaggtctaggcagcggaaggcgccgaagccgtagccgtagccgcagtcgcagtcccagatatcgccggagtccaagttacggtagaaggagttacagtcctgcagcacgctctccaaggcgtcgtagcgtctcaccagctcgtggacgcagctatagcaggtcaccacagcacaagggtgcacgtgaagaatctccctatgataatggataccgccgcagcaggagctagagccagatcgttgtatccgacgacgagcgttatgtgacagatattgggaaagctatggtcaataacctgcttgacagatccttcgtcgactgcttgactttggttaaggttctcataactttctatatacctattatcttgtgtctactttataagtagcagtaaaaccttttgatgagtgtatttgttgaactaagacctactgtcttttcttgtgtggtaaaaaggcatcgtcctgcactgcttaaacgaataaaaaaaaaaaaaaaaaagcggccgactacggctttcagttctgttttcatggttttgttttgcgctttacatttttcgcacgccctggcatgtttcattcagtctgccgtgtgttaacctgcctgcgtattttctcgaagatgctgcgcatcgcaaaagcatttctccccgtaggtttggtgtccgtgctgcgtgcgctgctcctggttcaggaactgcagtatgttagatggatgaggatgactcacctactcatgttatcatgccttcagaggacccaagttagtgagcgccaggaagtgaattgaccaggccaaatgctacgttgagccgactttggctttgctcagcgatctccacttgctaccatgtgttgccttcgacgaagtttttttctccttccgcttccttttttgcagcatcctgattgattcattcttcgagtgacatgcagtcaccctaattgatcgtcattgagcctgcgttgaagtcgaatcctgcatccttattattcaaccgttccccccccccctaatggacaatgtagttacattgttattagcttgtttcttgttcgatagcctaaaaaaaaaaaaaaaaaaaaaaaaaaaaaaaaaaaaaaagaaaaaaaaagaaaaaaagcggccct

SEQ ID NO: 4523 - DNA, 935 bp, Zea mays
  Clone ID: TF_ZmC7043_4
tctcgccctcgctcacctacagctccgtccgccagcgtcagccaggctgccccgggaggccgggaggaagcagatcggagaaggtgatctgttgtgatggctcgattgtacatcggcaacctggatccccgggtgaccgctcgggagctggaggacgagttccgcacgttcggggttcttcgcagtgtctgggttgctcggaaaccacctggctttgcgtttattgattttgatgataagagggacgcagaggatgcaatccgtgacctagatggcaagaatggatggagagttgagttatctcgtaatgccagcggtggtcgtggaggtcgtgaccggcatggtgggtctgagtccaagtgttacgagtgtggtgagactggtcactttgctcgtgagtgccgtttgaggattggttctggaggtctaggcagcggaaggcgccgaagccgtagccgtagccgcagtcgcagtcccagatatcgccggagtccaagttacggtagaaggagttacagtcctgcagcacgctctccaaggcgtcgtagcgtctcaccagctcgtggacgcagctatagcaggtcaccacagcacaagggtgcacgtgaagaatctccctatgataatggataccgccgcagcaggagctagagccagatcgttgtatccgacgacgagcgttatgtgacagatattgggaaagctatggtcaataacctgcttgacagatccttcgtcgactgcttgactttggttaaggttctcataactttctatatacctattatcttgtgtctactttataagtagcagtaaaaccttttgatgagtgtatttgttgaactaagacctactgtcttttcttgtgtggtaaaaaggcatcgtcctgcactgcttaaacgactcggccgactacggctttcagttcccaacac

SEQ ID NO: 4524 - DNA, 915 bp, Zea mays
  Clone ID: TF_ZmC7043_5
cattgggtacctcgaggccggccgggcggcatctcgccctcgctcacctacatctccgtccgcaagcgtcagccaggctgcccccgggaggccgggaggaagcagatcggagaaggcaagccacggatttccttctcgccttctggaccccatgtgatctgttgtaatggctcgattgtacatcggcaacctggatccccgggtgaccgctcgggagctggaggacgagttccgcacgttcggggttcttcgcagtgtctgggttgctcggaaaccacctggctttgcgtttattgattttgatgataagagggacgcagaggatgcaatccgtgacctagatggcaagaatggatggagagttgagttatctcgtaatgccagcggtggtcgtggaggtcgtgaccggcatggtgggtctgagtccaagtgttacgagtgtggtgagactggccactttgctcgtgagtgccgtttgaggattggttctggaggtctaggcagcggaaggcgccgaagccgtagccgtagccgcagtcgcagtcccagatatcgccggagtccaagttacggtagaaggagttacagtcctgcagcacgctctccaaggcgtcgtagcgtctcaccagctcgtggacgcagctatagcaggtcaccacagcacaagggtgcacgtgaagaatctccctatgataatggataccgccgcagcaggagctagagccagatcgttgtatccgacgacgagcgttatgtgacagatattgggaaagctatggtcaataacctgcttgacagatccttcgtcgactgcttgactttggttaaggttctcataactttctatatacctattatcttgtgtctactttataagtagcagtaaaaccttttgatgagtgtatttgttgaact

SEQ ID NO: 4525 - DNA, 594 bp, Zea mays
  Clone ID: TF_ZM4454.C1.o3.fg
atggactatcacctgcacacagtttcagccccgtcgtcgcatcagttccaagaaacaaaagggaaacatggaaaaagtcaagaaataacttcaagaaaagcttgttatctatgtggacgtgaaggtcattacttccgtaactatcttgagaagagttcactaccggatacctctgagataaagctatcccagtctctagacatggaatatgaacaaaaatgcgtagaaacttttatcaacatagtgaagaacaacaaaaggtatagaaaaacatttggatatatgagtagtccacctcaaccacaagcaaaagccccgaaaaacatggatacccaaacagaagaatcaagccagactcagctatatgagatacagacccccaatcatccctcattcccgattggtcaagcaaagttgactcgcaaagaactcaatgcaagaggtgcttgcttctactgcaagaatgaagaacatattattcatgaatgccccaagaagcgtctagaccgactaaagaagaagacggtgaagcaagacccaaacaataatccagaagaccaaccagttataagtacgatgatgaagattggttga

SEQ ID NO: 4526 - DNA, 3651 bp, Zea mays
  Clone ID: TF_ZM4992.C2.o1.fg
atgtcgggagatcacgccaagagggagatcgaaaccggcgacaagcccgcaagccttgggaaggctccatcaagggagtccggcaacaaagccaaggagggatcccctccctccatcaagttgcatcggagtggcgacaagaaaaagaagatgaagaaggtggtctactacgagaccgactcatcgtcaccctccacatcaagctccgaggcatccatcgcttctaagcgccatgagcgcaagaagtatagtaagatgccactttgctatccccgtatttctaagcgcactcctctactttccgttcccttaggcaaaccaccatattttgatggtgaggattattgtatgtggagtgataaaatgaggcatcacctaacctcactccacgcaagcatttgggacattgttgagtttggagcgcaggagtataataaggtgcaagagttaaagagtgccaaagagatttgggacgttctcaagacagcgcacgaaggggacgaggtgaccaagatcaccaagcatgaaacgattgagggagaactcggtcgattcgtccttaacaagggagaggagccacaagcaatgtacaaccggctcaagaccttggtgaaccaagtgcgcaacctcgggagcacaaaatgggatgaccatgaaatggtcaaggttattctacgatcccttgtatttcgtaatcccactcaagttcaattaatacgtggggatcctagatacatgctaatgtctctcgaggagcaacggaggggggaggactacaagccccgctctaagagggtgtgctacaaatgtggtaagcccggtcattttattgctaaatgtacaaattcaagtgatagtgataggggcgacgataagaagggaaataagagggaaaagaagaggtattacaagaagaagggcggtgatgcccatgtgtgtcgggaatgggactccgacgagagctctaccgactcctcctccgatgaggatgacaccaacatcgtcgtcaataagggactcctcttctccaacgtcggccacaagtgtttcatggctaaggacgacaaaaagaaggaagtagaaaagtgtgaaaacttgactaaggaacttaacatttgcaatgattcaattataagtcttagaaatgaaaatgctagtctaaatgctaagattgatgaattaaatgtttgcaatgatacaatttctagtcttagaactgaaaatgataatttaatttctaagattaaagaattgagtgtttgcaaagattctatttcctgtcttagaaatgataatgccatattacatgctaagatagaagaattaaatgtttgcaaaccctctacatctactgtcgagcatgtttccatttgcactagatgtagagatattaatgttgaggctattgatgatcaccttgccataattaaacaacaaaatgatcacatagctaaattaactgctaaaattaatgaacatgaacttgaaaatgaaaagtttaaatttgctagaagcatgctctataatgggagacgccatggtattaaagatggcattggtttccaacagggaagcaatgttaagcttaatgcccctaaaagattgtctaattttgttaagggaaaagctcccatggttcaagataatgagggctatattttatatcctgctaattatcctgagcacaagattaggagaattcatgctaggaaacctcataatgtttctcatcatgcttttatgtataaaaatgaggcttctagctctaggcattctactcgtgttaaaatgcctaaaaagaaaactcctgctgtatcaaatgagtctaacatttcatttaaaacttttgatgcatcatatgtgtttactaacaaatcagacaaagtagttgccaaatatgttgggggcaaacacaagggttcaaagacttgtgtttgggtacccaaggaaaaaccacaaacccaagagaccttaaagggattcttaagacgagctcaaaatgagttcggattaaggatcaaaaagataagaagcgataatgggacagagttcaagaactcacaaattgaaggctttcttgaggaggagggcatcaagcatgagttctcttctccctacacaccacaacaaaatggtgtagtggagaggaagaatagaactctattggacatggcaagaaccatgcttgatgagtacaagactctggaccggttttgggcggaagcaatcaacactgcttgctactccatcaaccggctctaccttcaccaaatcctcaagaagacatcatatgaactcctcaccggtagaaaatctaaatttgctcctaaggctgtagaaggctttttactcggttatgactcaaacacaagggcatatagagtcttcaacaaatccactagactagttgaggtttcttatgacattgtgtttgatgagactaatggctcccaagtggagcaaagcccatacaagcacaagatcaaccgtcatcttccaatcaagcatctccaccaactcaagatgaggaataggctcaagataataaggatgaagatcaagaagatgagccacctcaagaggaggacaatgatcaagggggagatgaggaaaatgaagacaaggaagatgatcaagaaatttagggtcaaagaccgccacacccaagagtccaccaagcaattcaatgagatcaccccgtcaactgcatccttggtgacattcataaggggggtagaggatgcactaagagactcggattgggtactggctatgcaagaggagctcaacaacttcacaaggaatgaggtatggtattcagttccacgtctcaatccaaatgttgtaggtaccaagtgggtattccgcaacaagcaagacgagcatggtgtggtgacaagaaacaaagcccaacttgtagccaaagctaggcttgagttaattcgtatattacttgcctatgctacttaccatggctttaagctctatcaaatggacgtgaaaagtgccttcctcaatggacctatcaaggaagaggtctatattgagcaacctcctcgctttgaatatggtgagtaccctaaccatgtgtataaactctcaaaggcgctttatggactcaagcaagccccaagaggatggtatgaatgcctgcgagatttccttatcactaatggcttcaaagtcggtaaagccgatcctattctctttactaaaattgttgcaaaagatttatttaaaatcgagatgtctatgatgggggagttgaagtatttcctaggatttcaaatcaagcaactccaagagggcaccttcatctgccaaacaaagtacattcaagacatacttaagaagtttgggatgaaggatggcaaacccatcaagacacccatgggaaccaatgggcatctcgacctcgacacgggaggtaagcccgtagatcaaaaggtataccggtcgatgataggatctttactctatttatgtgcatctcaaccggatattatgctttctgtatgcatgtgtgcaaggttccaagccaatcctaaggaagttcaccttagggccgtgaagagaatcatgagatacttagtttacactcctaagtttgggctttggtaccccaagggatccacctttgatttaatatga

SEQ ID NO: 4527 - DNA, 1555 bp, Zea mays
  unsure (1)..(1555): unsure at all n locations
  Clone ID: TF_ZmC210941_1
ngaccaacactaacatagtgtttattccagatggcaggaagagcgcgccgtggacagaatgagtgcattcctccaccaccaccgccgcctcctaccatgcaagaactgatggctcagcagaatgagattctgcgacagttggctcaacgtcagccaccacctcagcactatggtggtggtgatcaccatcagcgtcccccagcagcggccacttatcaggagttcctcagcactcagccgcctttgttcactcgggcagaggatccacttgatgctgatgtgtggcttagggtagtggaatccaaattcccactgcttactggagtttgttcagatgtggctaaggtctgtttcgccacccagcagcttcgcggacccgcgcgaacatggtggatccactttctcgctatgcagccagttgatcacgcagtggaatggggagaattcaaggcagcattcagaggacatcacataccggcaggcatcatggaccgcaagctcaatgagtttctggcacttactcaggggaatcgtactgtgttgcattacactcaggccttcaatgacctgtgtcagtacgtaggctatcttgctgacacagatgagaagaagagggataggttcaggagggcctcagtactaagctccgcgactgtctcaatacagtcagggccaatagctataatgagttagtcaacatggccatttctcaggaagactgcatcacagcctgccaggcagtccgccacacgtccgcccctatggaaggaccttcagctcagcctcagcgtttcaggattgtgtccgacactcagggtaggggacctcagcagtaaggccggtgggtgatccgactacaacagcagcagcaggcacccaaccgctctcagcccccagttcagaaggaacaacacctagccacaacagcagcagtatcgtcagaccaatgacaacagatgtttcacttgtggcagcactggacactacgccaagaattgccccaagaaccagcagaggcaggggcagaattccaatcagaaccaaggcaagaggcagaaagtacaagtgaggcaaggcagactgaacttcaccaccctagctaatagcaatgtctttggcttcatcaccatccgctaagattcagatcatccaccaagcttcggttcactgctcttcggctttgtcatccagtacataacaaagcgttataaggtaaattcaagtttcaaggaaaaggtaagcaaatgtatgagtttattaccggtttgaggtgacttcgagcttcgtcactagccaatcttcgtccaccctttgcccaaatttgagttatgaatctgttcccaatgcttcgggccaggctaaggatggcattcaagtccgctggtgataagctgaagttcggcctgtttacaatattcccgtgcatgcaaccagccttcataaaagcaacagctgtgccacgagaagctagcagagcacagaaatcaccatgcccagctatgacttcatcaagagcatcaacttcgcctttaatatgatcgaagatgcctggcag

SEQ ID NO: 4528 - DNA, 1049 bp, Zea mays
  Clone ID: TF_ZmC4527_1
agctgaaataattcgtgactacaagactggagatagtttatgctatgcttttattgaattcgatacaaaggaggcttgtgagcgtgcatatttcaagatggacaattgtctgattgacgatagaaggatccatgttgattttagtcagagtgtttcgaagctgtggggtcaattcagacaaagcaaaagaaatgcaaagaaagatgggtgttttaagtgtggcgcccctgatcacctagccagagactgcgatcaagacggtgagcagaaaaacaaaggcccaagttatgttctaaaagatgaaaatacacaacgtggtggaaatcaccgtagaagctatgatctagtatttgacgaagacgaagctgattgttctgaagagagagatcatgaaaatggccacagaagaaagaatcgaagaatagatgatcgaaaatcagagctaccacctcgtggtggtcgtgatagaaatagccatgagagaacacacagtgatgagaaaggaagcaagcatgggaaagatgataggaaccgaggggatcggaaacatgatgactaccacagttacagtagatccggtgacagaagctctggtagaaacgatgatcgtgattatagcaagcgccacgacagaagcagaagtggggaggaagagaagggctacagacgaagggataagtctgatggtgagcggcaccatagagacgatggctacgatcgccgcaggagagatgaagacagccacaggaaaaggagcccagatagtaaacatagaagagaagacggagggcaccatgtgagaaaccagcagtctgatgataggtcctacaaggagagaaggcacagagatggtagataagaaagtttctgcacgactcggttttcttgcctgctttccactgatgtctctataagctggtattcttagctcaacttttttttttttgtaagtcaatgtaactgcctggaatatgttgaattgttgtagtgtccagatctgaatctttttttgtgtgtttacagtttttgctggataatttattgcaatc

SEQ ID NO: 4529 - DNA, 2025 bp, Zea mays
  Clone ID: TF_ZmC10872_11
atgtcgggaaaatccgctaagagggagatggaaaccggcaagaaggccacaagccacgggaaggctccatcaagggagtccagcaccaaagccaaggagggatcccctccctgcgtcaagtcgcatcggagaggcgacaagaagaagaagatgaagagagtggtctactacgagatcgactcttcgttaccctttagatctgactctaacgcgacgtccatcacttctaagcgccaagagcgcaagaagtatagtaagatgccacttcgttatccccgtatttctaagcgcactccattactttccgttccattaggcaagccaccatgttttgatggtgaagactattctatgtggagtgataaaatgaggcatcatctaacctcactccacgaaagcatatggaacattgttgagtttggagtgcaggtacctaaggtaggggacgacggctacgactcggatgaggtcgcccaaatccgacactttaactcccaagcaactactatactccttgcctccttatgtcgagaggagtctaataaggtgcaagggttaaaaagtgccaagaagatttgggacgtcctaaagaccgcgcacgaaggagatgaggtgaccaagatcactaagcgggagacgatcgagggggagctcggtcgattcatcctcaaccaaggagaggagccacaaacgatgtacaactggctcaagaccttggtcaatcaagtgcgcaacctcgggagcacaaaatgggatgaccatgaaatgctcaaggttattcatagatccctcacattttgtaatcccactcaagttcaattaatatgtggtgatcctagatataagctaatgtctctcgaggaggtaattggaaaatttgtgagctttgaattaatgatcaaaaactccaaacacatcgtcaacttggagcaaggcgccacctcaacgcccaaggtgcaacccgtcgcattcaaagcgacagaagagaagaaagaagagtctacatcaagtaggctccccatcgacgcctctaagctcgacaatgaggagatggcgctcatcatcaagagcttccgtcaaatcctcaagcaaaggagggggaaggattacaaaccccgctccaagagggtgtgctacaaatgtggtaaacccggtcattttattgctaaatgtcctatgtctggtgatagtgacaggggcgacgacaagagggggaagaagaaggagaagaagagatactacaagaagaagggcagcgatgcccacgtatgtcgggaatgggactccgatgagagctccattgactcctccgacgaggatgccgccaacattgttgtcaacaagggacttctcttccccaacgtcggccacaaatgcttcatggcaaaggatggcaaaaagaagaaggtacaaactagaaccacccccaagtatactacatctagtgatgagggtagttctagtgaagatgaagatgacttgcttactctttttgctaaccttaacatgcaacaaaaagaaaagttaaatgaattgataggagctattcatgataaggatgaacttttggatagccaagaggaattccttattaaagaaaacaaaaggcatgttaaatttaaaaatgcttatgctcaggaagtagagaaatgtgaaaaattatctaaggagcttagcatttgccatgaatcaatttctaaccttagaactgagaatgctaatttaattgctaatgttgaaaagttaaatgtttgtaatgattcaatttccaatcttagaaaagaaaatgctagtctaattgctaagattgacgaattgaatgtttgcaaaaaatctatttcctgtcttaaaaatgagaatgccacattacatgctaagatagaagaactaaatgtttgcaaaccatctacatctactattgatcattgttggggacttgttctcaaatgctgtgaattaagaataaggcaacacaaaatgttaaagtttaaagcccttcgtcctttgaagcattatttcccttag

SEQ ID NO: 4530 - DNA, 2989 bp, Zea mays
  Clone ID: TF_ZmC951_370
cgttgctgtcgaagaggtgtatgcaaaatggttgaacactcaaaccttacatacttaaccgttttcatcgttttacccaatttggcatgtttgaggtcgatgttggactctaaaccattaagtcaacttgacttgatctagattgacatatgtgagctccaactcccttgttcatttctcgagcttgatcttgagccttattacttacaccacataactgtagatgttaacttattagttgtaagtcatgtccttatgtagtgatccttgatgcaccataactcttcttaactcgatcaaccttgactttgcaagtcttcttcttcacccctggctttgggttcctagtctccttgaccttctcccgtgcactcggtacctcgaagctcttcttgcctccatcattggcttgatcagttgtcttctcgtcgatgcttatgtaagcaatggggccgaataaatccatgtggagtagctctagcggcctgtcgatcgtcatgatgttcttgtgaggatgatgggagccaacttgcttccctgcttgacatgcgctacaaaccctgtctttctcaaaatgaacatttgttagtcccaaaatgtgttctccctttagaagcttgtgaagattcttcattccaacatgggctagtcggcgttgacagagccaacccatattagtcttaacaatcaagcaagtatcgagttcagcaatattgaaatcaactaagtatagctgaccctctaatactcccttaaatgctactgaatcatcacatcttctaaagacagtaacacctacatcttgatttccatccccgaatgtaatggctctttgggggtctttgtttttctcgtaggaggagaacattcttttctcccctgtcatgtggtttgtgcatccactattaattatccaacttgagcccccggattcataaaccttgggtacccaaacacaagtcttggagcccttgtgtttgcccccaacatatttggcaactactttgcctgatttgttagttagcacataagatgcatcaaaagtcttaaatgaaacattagattcatttgatgcagtaggagatttctttttaggcattttaatatgagtggaatgcctagagctagatgtctcattcttatacatataagcatggtgagaaacataatgagacttcttagcatgaattctcctgattttgtgctcgggataaccaacaggatataaaatgtaacccttgttatcgtgagccacgggagccttgccatctagtgcaaatagaaacatgatcaacagtagatgtagatgtttgcaagcatttaattcatcaatcttagcatgtaaaatagcattctcatttctaagactggaaatagcatcattgcaaacatttaaatctttagccttagaaattaatctagcattttcatccttaaggctagaaattgattcattcaatttatcaatcttagcaataaaactagcattttcatttctaagattggtaattgaatcatgacaaacatctgatttttcaaccttagcaattaaactaacattctcagttctaaggttggagatagtgtcatggcaaatgataagctctctagtcaagttttcacatttttctatctcttgagcataagcatttttcaccttaacatgctttttgttttccttaataaggaattcctcttggctatccaagagtccatccttctcatgaatggcacctatcaattcattcaatttttctttctgttgcatgttaaggttggcaaaaagggtaagcaaattatcttcatcttcactagagctaccctcatcactagatgttgtatatttggtggaggctctagattttaccttcttccttttgtcgtcctttgccatgaagcacttgtggccgacgttggggaagagaagacccttgttgacggcgatgttggcggcatcctcgtcgaaggaggagttggtggagctctcatcggagtcccattcctgacaaacgtgggcatcaccacccttcttcttgtagcacctcttcttctccttctttcccctcttgtcgtcgcacctgtcactatcactagacataggacattttgcaataaaatgaccgggcttaccacacttgtagcacacccttttggagtggggtttgtaatctttccccctcctttgcttgaggatttggcggaagctcttgatgatgagcgccatctcctcgttgtcgagcttggaggcatcgatggggagcctacttgatgtagactcttctttcttctcctccgtcgctttgaatgcgacggattgcacctcgggtgtagaggtgctgccttgctccaagttgacaatttgtttggagcctttgatcatcaattcaaagctcacaaactttcctataacctcctcgggagacattagcttatatctaggatcaccacgtattaattgaacttgagtgggattacaaaatatgagtgatctaagaataaccttgaccatttcatggtcatcccattttgtgctctcgaggttgcgcacttgattcaccaaggtcttgagccggttgtacatggcttgtggctcctctccttggttgaggacgaaacgaccgagctccccctcgatcgtctctcgtttagtgatcttggtcacctcatctccctcgtgcgcggtcttgagcacgtcccaaatctccttggcgctcttcaacccttgcaccttattatactcctctcgacatagagaggcgaggagtatagtagtggcttgggagttgtagcatcccaaaaattcaaatcttgaaattttctcaaacttgcttacaaatgtttcaccattatccccctcaaattctttccagaaatactgcccagatatttcccgagtaatccccttcaagttctttccagaaatactgcccaaatattccaccgatatatctctagatattttcctcctgagaaataccttcagaatcat

SEQ ID NO: 4531 - DNA, 2030 bp, Zea mays
  unsure (1)..(2030): unsure at all n locations
  Clone ID: TF_ZmC10764_3
gtagttacagctagatgcatccggtgangactagattggttctcgactgcttgagccttgaggacagtaaatgattctgccatccggtaatggaagctgaattttgtttagggttaagatttgcatattggtatgttatacaatatattcagtgatcatttatggacacttgaaggaccaatgctgggtgctggagcagaaaattgatgctagcctcaccagtgtggaccctttcagccagctccatgcgatgcattgcagttttgggaagacaaactgggtaactaggagcccagcttaccagcagctcagacttccactgttgttaccatggaaatgcaagtcgtttggctttaggtttgtgcattggtttaaatgatctggtatgcaaactagagaatatggcagtggacatacctgctacattgtcctgtcaccagaatatgctgacatttttgagaagttagttcatgtcggtaacggtaaaattggttccttgttggaaatagcccagttctccaaaacatggttcccagaggctctatagctttgctccttgtccgtgttaacgagctttgctgtcttgggactagactttttcatgaaggtagttacagctagatgcatctgtgtcaggattatgatttgttcttgaattaccgagatccaggaataacctaatctcagtgcttctcttctgagatcatggtggagagacacactaaccgccacaggggctttggcttcgtgacatttgaagatcggagggcagttgacagcgctattaaagagatgcatggccaagaaatagatggccgtaccatctcagtgaacaaggctgagcctaagatgaatacagatgacacaaggtatgccggtggtggtggacgaggagagtatcgtggtggtagaggtgatggtccaccccctggcaattgctttgagtgtggtcgtcctggtcattgggtccgtgactgccctagtgctgctggcggtcgttctggcaggttcccatccaagttcagtggtggcagtggcgttggcaggggagaccgcttttctggttcagataggtttggtgatcgttacatggatgatcgttatgatggtggtcgctatgggtaccgtgatcaagctgatgcaagggacaggtatgctggtggccgagatcgctatgccaatgaccgttacccatctggtggcgatcactttggtggagacaggtatggaggtggtccggattgttatgtgccaagtggttatggtagggagcgagaaagaagctacgagagagatggagttcgtggtggtggtggcggcggcggcggctatgataggagtggcccaaggggtggtggtgggtatgacagggatggtccacgcggcggtggaggaagtgcacgctatgatggaggaaattacagggagaggcctgggccatatgatcgccctagcaggggaggacgttttgatgatcgctactgatgaactgcctgtagactcaagctccttgtcttggtagtttaatgtttgcagttttgcatggccgaatgcttaatgggctatggaagatgcttaatttatccctcttcggcactttaatgtctgctctttatttcaaccagtactggggcactggtttgccttgataagtttatccagctgacagtttttgcatgagatgagtcatgctctgggctattaccctgcctgttggatatttcagtagctgaggtttgcagtgatcgattgtcattgttgatctgaatatctggtatgcgtggactatgtttaaagtgattgcctgtcatcattggtctatatagttggtgagcatatatatgttcagtgtcggtgcttgtcattgttgttggtctggatatctaggcttgcaaggatatatttgcagggctgagttgcaagggcttaacagaacaatagccaaagtaccttatattttagtagctggagaccatgttaattatgctataattagctggagaccatgtaaatttagcttagtttttgtc

SEQ ID NO: 4532 - DNA, 1735 bp, Zea mays
  unsure (1)..(1735): unsure at all n locations
  Clone ID: TF_ZmC10764_5
aggaattcggcacgaggctcttctgaggtaatgtccttttgttgtctgtcagttatctctaaacttattagaagtgattctgcttactgtaacctatttcacgtagtggatactattaattgatatggcgtgtttcgatggttctctcatgtatcactgtgcctcaaggtatcagtgatacaagtgacaacttttttgtgtattactatgctttgtatcaaataatataaagatacaatgcaattttaataaaataggaacaaataatgtttgcacaaccttatttgtaatggatggcgaattattttgctaaattaaataatttcttgacctttagttcatcttaaaattcaagtacttggatggtgcaaataattattcctttgtgtttctgtactattgtaacaattatttctaggccacttgttactgatatttatattcccatcacttangttggtaactgtttattttccccacattgattacgatcatgagtgtttctacttgtagggtacctcgaggccggccggggttccctctcgcagtcgcagacttctcttctcgccaaaccctaatcctgctcctgcctttctcgtctccaaccgttggccgagcagtagcggtggcgatggagggcaaggaagaaggtcggatcttcgtgggcggcctgtcgtggcaaacggacgagcgcaagcttgaggacgcctttggccgcttcggcaaggtcgtcgacgcccagatcatggtggagagacacactaaccgccacaggggctttggcttcgtgacatttgaagatcggagggcagttgacagcgctattaaagagatgcatggccaagaaatagatggccgtaccatctcagtgaacaaggctgagcctaagatgaatacagatgacacaaggtatgccggtggtggtggacgaggagagtatcgtggtggtagaggtgatggtccaccccctggcaattgctttgagtgtggtcgtcctggtcattgggtccgtgactgccctagtgctgctggcggtcgttctggcaggttcccatccaagttcagtggtggcagtggcgttggcaggggagaccgcttttctggttcagataggtttggtgatcgttacatggatgatcgttatgatggtggtcgctatgggtaccgtgatcaagctgatgcaagggacaggtatgctggtggccgagatcgctatgccaatgaccgttacccatctggtggcgatcactttggtggagacaggtatggaggtggtccggattgttatgtgccaagtggttatggtagggagcgagaaagaagctacgagagagatggagttcgtggtggtggtggcggcggcggcggctatgataggagtggcccaaggggtggtggtgggtatgacagggatggtccacgcggcggtggaggaagtgcacgctatgatggaggaaattacagggagaggcctgggccatatgatcgccctagcaggggaggacgttttgatgatcgctactgatgaactgcctgtagactcaagctccttgtcttggtagtttaatgtttgcagttttgcatggccgaatgcttaatgggctatggaagatgcttaatttatccctcttcggcactttaatgtctgctctttatttcaaccactactggggcactggtttgccttgataagtttatccagctgacagtttttgcatgagatgagtcatgctct

SEQ ID NO: 4533 - DNA, 1109 bp, Zea mays
  Clone ID: TF_ZmC10764_7
ttctgagcctaaaatgaatacagatgacacaaggtatgccggtggtggtggacgaggagagtatcgtggtggtagaggtgatggtccaccccctggcaattgctttgagtgtggtcgtcctggtcattgggtccgtgactgccctagtgctgctgccggtcgttctggcaggttcccatccaagttcagtggtggcaggggagaccgcttttctggttcagataggtttggtgatcgttacatggatgatcgttatgatggtggtcgctatgggtaccgtgatcaagctgatgcatgggacaggtatgctggtggccgtgatcgctatgccaatgaccgttacccatctggtggcgctcactttggtggaggcaggtatgcatttggtcctcattgtggtttagtgatcgttacatggatgatcgttatgatggtggtcgttatgggtgtcgtgatcaagttgatgcaagggacaagtatgctgggggccgagatcgttatgccaatgatcgctactccactggtggcgatcactttgacggagacaggtatggaggtggcccggatcggtacgcgccaaatggttatgggagggaacgagaaagaagctacgagagagatggagttcgtggtggcggtggctatgataggaatggctcaagaggtggtggaagctatgacagggatggccctagaggcggcaagggtggtggctatgtcagggatggcccacgcggtggtgttgctgatcgttatggtggtggaggacctgcacgctatgatgggggaagttacagggacaggcctgggccatatgatcgccctagcaggggaggaggtcgttttgatgatcgccactgatgaactgcttctagactcgagcccctggtcttgtagtttagctttttgcagttttgcatagcttaatgcttaatgggctatggaagatgcctaatttacccccctctttggcacttcaatgtctgctctgtatttcaaccagtacttgggcaccggtgttgccttctcgataagtttatcaagctgactgtttttgcaaaaaaaaaaaaaaccaaaaaaaaagaaaaaaaaaaaactcgagggggggg

SEQ ID NO: 4534 - DNA, 3851 bp, Zea mays
  Clone ID: TF_ZmC119_1388
ctaagtgttcactacaagcattaacatcaaaatccttacaccttttaaagaagaaatggtttcattacaagtagaaagttcacaagaaagtattccatttcttttaacttctagagcaagtgaattttgtgtactaacaaatttatcatgttcttcatataaaaggtcttcttgtttctctaagattctatccttttcatttaaggcatcaatcaattcattaatcttagctatcttagttctatccaatcccttgaataaactagagtaatcaatttcatcctcactggattcatcatcactagaagaatcataagtattagcattacgagtgatcaccttcttttcccttgccatgaggcaagtgtgatgctcgttggggaagagagccgatttgttgaaggcagtggcagcgagtccttcgtcgtcggagtcggacgaagagcaatccgaatcccactcctttccaaggtgtgcttcgcctttggccttcttgtaaaccttcttgttctctctcttcccatttttcccttgctcctggtcactatcattttcgggacagttagcaataaaatgaccaagcttaccgcatttgaagcatgatcgctttcccttggtcttggccttgcttggctgtccctttcgaccttttagcgccgtcttgaatctcttgatgatgagagccatctcttcatcattaagaccggcagcctcaatttgtgccaccttgctgggtagcgcctccttgctccttgttgcttttagagcaatgggttgaggctcgtggagtggaccgttcaacgcgtcgtcgacgtatcttgcctccttgatcatcatccgcccgctcacgaattttccaagtacttccttgggcgtcatcatcgtgtacctgggattctcacgaatattgttcacgagatgaggatcaagaacggtaaaggacctgagcattaggcggacgacgtcgtgatccgtccaacgcgtgcttccgtagctccttattttgttgataagggtattgagccggttgtaagtttgagttggctcctctccccttatcatggcgaatcgtccaagctcgccctccaccaactccatcttggtgagcatggtgatgtcgttcccctcgtgagagatcttgagggtgtcccatatctgcttggcattgtccaagccgctcaccttattgtactcttccctgcacaaagacgctaagagaacagtagtagcttgtgcatttctatgaatttgttcatttataagcaaagggctatccgagctatcaaatttcattccattctccacaatctcccatatgcttggatggagagagaataagtgactacgcattttgtgactccaaaatccgtagtcctccccatcgaagtgtggaggtttgccgagaggaatggaaagcaaatgtgaattcgaactatgttgaatacgagaataatcaaatgaaaagttcgaattgaccgtctttttatagtcgttgtcatcatccttttgggaagaagtagactcatcactatcgtcgtagtagatgatctccttgatgcaccttgtcttcttcttcttcccttcctttcgtctatgccccgagccagagtcggtaggcttgtcgtccttcggctcgttgacgaaggattccttctctttgtcgttgatcacaattcccttccccttaggatccatctcttcgggcggtaagtccctttgtgaagagaacggcttcgataccaattgagagcacctagaggggggggtgaataggtgatcctgtaaaaacttaactttgctcttgatttgcactttgttcatccattgcataaattcacattttaagcacttgagttggcactcaatcaccaaaatacttagaaatggcccaagggcacatttccctttcaggaaggatgacaccacagttatcggatgagactcgaagtagtgtcgcaacttccaccgcgttaggatcaccgcgtacagcagcttctgaatttgtggatagcggatcttggtctcggacagtacctcgctgatgaagtagactagcctctggacgggcaatgcatgcccctcttctcgtctctcaactacgattacggcgctaaccacctgagtggtcacggcgacgtagattaagagggcttctccggcagcggggggcaccaagatgggcgcgttcgtgaggagcgcctttaggttcccgagggcttcctcggcctcaggggtccaagtgaagcactcggccttccttaagaggcggtacagaggcaggcctcttttgccgaggcgcgagacaaaacggctcagagccgcaagacatcccgtgactctctgtatgcctttcaaatccttgatgggccccgtgctggtgatggtcgcgatcatctccgggttggcctcgatgccccgctcggagacgatgaaccccaagagcatgcctcggggaaccccgaagacacactttttgggattgagcttcacgcctttcgccttgagacatcggaatgtcacttcaaggtcggaaaggaggttggaggcttccctcgtcttgactacgatgtcatcgacgtaggcctcgaccgttcggccaatgtgttcgccgaacacatggttcatgcactctttgatgaaccctgccgccattagcttgtggatctcctcgcctatggctctgcgcttttcttcgtcgaatcggcgcagaggctgcttcacgggtcgggctccagctcggatatccagcgagtgctcggcgacatccctcggtatgccgggcatgtccgaggaactccacacgaaaacgtcggcgtttgcacggagaaagtcgacgagcactgcttcctcggggaactctcctgcctggtgatcttccttattatcgtcgtcgcgagccctgccaccctccgcgggtggcccagccttgtgaaagtggcgccgaagcatggcgcactcctcaagggtgtgcttgacgggcccctgatgataggggcacggctccttgagcatcttatcgaagaggttggcacctccaggaggtttccgagggttcttgtactcggcgacagcgacaaggtccgcgtcggcggcgtcgtgcttcgcttgcgacttcttcttgcctttcttcttggcgccgcgctgagttgacgcctcctggccagaggcgaacttggtggcgatgtccatcagctcgctcgccctggtgggggtcttgcgacccagcttgctcaccaggtcgcggcaggtggtgccggcgaggaacgcgccgatgacatccgaatcggtgatgttgggcagctcggtgcgctgcttcgagacggctgtcaaccgatcccagggtgaccgcatacgataccccagagggtttggactcgcctctacgagagcgtccaccaaagcgaagtcgcttggtgggtcgaggctgaatccaaaaggcgtgagatgggaatcggttggtacctcttggtcgacgggcggtgacgaagtcacgtcaggggctgactgcaccgtcgtctcaggtacaagggtgatgcccagcaagtccttcgcgagcgtgctggcgtcgtccgtttgcttgggattggcgtgttgcggggagacgacgctcgtcttcgtctcagacgcgaggtcgatgcccgacgtgccccccgttggggcgccggcgccgtcgactcgctcgacagccgacgaggtgccgcctcctgcttggccttggttgccccgcctcctcctccgtcggcgggggaggggacggggcgagctcgaatgttgttcttccaccacgcggggaagacgtcgttgattccgccgccggcgggcgggcgggctggcgggctgacggccgccat

SEQ ID NO: 4535 - DNA, 5016 bp, Zea mays
  Clone ID: TF_ZmC29741_3
tcaatccaagttccgcgaatctaagacatttagctcactacgcatcctgcaaaaggtcttctcatctagaggcttggtaaagatatcggctagttggttctcggtgctaacatgaaacacttcgatatctcccttttgctggtggtctctcaaaaagtgatgccggatgtctatgtgctttgtgcggctgtgctcaacaggattttccgccatgcggatagcactctcattatcacataggagtgggactttgctcagattgtagccaaagtccctgagggtttgcctcatccaaagtagttgcgcgcaacactgtcctgcggcaacatactcggcctcagcggtggatagggcaacggaagtttgtttcttagagttccatgacaccaggaaccttcctaagaattggcacgtccccgatgtactcttcctatcgaccttacatccagcatagtcggaatctcctttgttgaggtcggtgtgtccgtcagttcccatcggcgtttttgcgggcttggcatccttcatcccaaacctctttagcaagtcttgcgtgtactttgtttgggagatgaaagtgtcgtccttgagttgcttcacttggaacccaaggaagtagttcaactcgcccatcatcgacatctcgaatttctgtgtcatcaccctgctaaactcctcacaagactttttattagtagaaccaaatattatgtcatcgacataaatttggcacacaaacaaatcaccatcacatgtattagtgaaaagagttggatcggctttcccaaccttgaaagcattagcaattaagaaatctctaaggcattcataccatgctcttggggcttgcttaagtccatagagcgccttagagagcttacacacgtggtcggggtaccgttcatcctcgaagctagggggttgctctacgtacacctcctccttgattggcccgttgaggaaagcgcttttcacatccatttggaacaacctgaaagaatggtgagcggcatatgctagcaaaatacgaatggactctagcctagccacaggagcaaaggtctcctcaaagtccaaacctgcgacttgggcataaccttttgccacaagtcgagccttgttccttgtcaccacttcgtgctcgtcttgtttgttgcggaacacccacttggttcccacaacattttgcttaggacgaggcaccagcgtccaaacttcattcctcttgaagttgttgagctcctcttgcatggccaacactttaccaatcgccatggttcgtatagcggccgtaggaacatcttcttcatctacatcatcaagatcaacaacttgctctcttggagagccattagtctcatcaaatacaacgtcgctagagacttcaactaaacccgatgatttgttgaagaccctatacgcctttgtatttgaatcataacctaacaaaaacccttctacagctttgggagcaaacttagaatttctacccttctttactagaatgtagcatttactcccaaatacacgaaagtacgatacattgggtttgttaccggttagtagctcatacgacgtcttcttgaggaggcaatgaaggtagaccctgttgatggcgtggcaagccgtattcacggcttccgaccaaaagcactcgggggtcttgaactctcctagcatcgtcctcgccatatcgatgagcgtcctattcttcctttctaccacaccattttgttgtggtgtgtagggagcggagaactcgtgcttaatcccttctttctcaaggaactcctccacttgaaggttcttgaattcggacccattgtcgctccttatcttcttcaccttgagctcaaactcgttttgagctctccttaggaagcgcttgagggttccttgggtctcagacttatcctgtaaaaagaatacccaagtgaagcgggaaaaatcatccacaatgactaaaccatacttacttccccctatgcttagataagcgacgggtccgaagaggtccatatgcagcagctccagaggtcttgaggtggtcatcacattcttgctgtgatgtgctcctcccacttgtttacctgcttgacaagctgcacaaggtctatctttttcgaattgcacgttagtcaaacctatcacgtgttctccctttagaagcttgtgaaggttcttcatccccacatgtgctaagcggcgatgccacagccagcccatgctagtcttagcgattaagcatgcatctagaccggcctcctcttttgcaaaatcaactaaataaagtttgccgtctagtacacccttaaaagctagtgaaccatcacatcttctaaagacagacacatctacattagtgaatagacaattatatcccatattgcataattgactaacagatagtaaattatatccaagagactcaactaaaaacacattagagatagagtgctcattggatattgcaatcttgcctaaacctttcaccttgccttggttcccatcaccgaatatgattgaatcttgggaatccttattcttgacgtaggaggtgaacatctccttctcccctgtcatatggtttgtgcatccgctgtcgataatccagcttgagcccccggatgcataaacccaactcttgttgggtcctacaaggttagtcacaatttccttagggacccaaatgcaagttttatcacccttgcattttgcccctaattttctagcaattatcttcctatcctttctacaaatagcaaaggaagcatttaagacatgataaattgtagaaggttcattaactttcctaggagtattgacaacatttctcctaggcatatgatgaacaacatttcttctaaacacatttctaccatgcatataggaagaactagaagcaaacatggcatgagagtcaaaagcattataagcattacaactcctatcatcatgaacatttctagaaaattttctatcatggtacatgaaggcatggttctttttagcattacttgccataggggccttccctttctcctttgtggagatggaagccttatggcttgttaagttcttgacttccctcttgaagccaagaccatccttaattgaggggtgtctaccaattgtgtaggcatctcttgcaaattttaatttgtcaaattcactttttctaatcttaagttgggcattaagactagcaatttcatcatttaattttgcaatagaggctatgtgttcactacaagcattaatatcaaaatctttacacctattgcaaataacatcattttctacacaagatgttgatttactagctatttctaacttggcattcaaatcatcattaatgcttcttaagttagaaattgtctcatggcaagaagataattcacatgaaagcatttcatttcttttaacttctaaagcatgagatttttgtgcttctataaatttgtcatgttcttcatacaacaaatcttcttgtttttctagaagcctattcttatcattcaaggcatcaattaattcattaactttatctaccttggttctatctaggcccttaaatagacatgaataatctatttcatcctcatcactagattcatcctcacttgaagaagcataagtagagtctcgagtacataccttcttctcccttgccataaggcatgtgtgacgttcgttggggaagagggataacttgttgaaggcggtggcggcgagtccttcattgtcggagtcggacgaggagcaatccgaatcccactccttgccaagatgagcctcgccctttgccttcttatagtttttcttcttctccctcttgttcccttgatcctgatcactatcattgtcgggacagttagcaataaaatgaccaagcttaccgcatttgaagcatgagcgcttctccttggctttggtcttgcttggctgtcccttgcgacctttaagcgccgtcttgaatctcttgatgatgagggccatctcttcatcattaagtccagccgcctcgatttgtgccaccttgctaggtagcgcctccttgcttcttgttgcctttagagcaaggggttgcggctcgttgatcggaccattcaaagcgtcgtccacgtaccttgcctccttgatcatcattcgcccgctcacgaattttccaaggacttcttcgggcgacattttggtgtacctaggattctcacgaatattattcaccaaatgaggatcaagaacggtaaaggaccttagcatcagtcggacgacatcgtggtccgtccatcgcatgctttcgtagctccttattttgttgataagggtcttgagccggttgtatgtttgtgttggctcctcgccccttatcatcgcgaaccgtccaagctcgccctccaccaactccatcttggtgagcaaggtgacgtcgttcccctcatgagaaatcttgagggtgtcccagatctgcttggcgttatccaagccgctcactttgtggtattcatccctgcacaatgaagctagaagaacagtagtagcttgtgcattcttatgaatttgttcattaatgaacatgggactatccgaactatcaaagtgcattccactctctacaatctcccatatactaggatggagagagaacaaatgactacgcattttgtgactccaaaatccgtagtcctctccatcaaaatgaggaggtttaccaagtggaatagataataaatgagcatttgcactttgaggaatacgtgaataatcgaaagaaaagttcgagttaaccgtctttcgtttgtcgtagtcgttgttgtcgttttccttgtgggaagaagtggactcatcactgtcgtcgtagtagacgatctccttaatgcgtcttgtcttcttcttcttcccatctttgcgtctgtgacccgagcccgagtcggtagtcttgtcatccttcagatcgttgacgaaggactccttctctttgtcgttgatcacgattcccttccccttaggatccat

SEQ ID NO: 4536 - DNA, 2768 bp, Zea mays
  Clone ID: TF_ZmC29741_36
aagctattaagcaggtcgactctagaccgacttctttttttgcaaaatcaactaaataaaggttgccgtctaatacacccttaaaagctagggaaccatcactttttctaaagacagacacatctacattagtaaatagacagttataccccatattgcataattgactaacagatagtaaattatatcctagagactctactaaaaacacattagaaattgagtgctcatttgatattgcaattttacctaacccttttaccttgccttgattcccatcaccgaaaataattgaatcttgggaatccttattcttgacgtaggaggtgaacatcttcttctcccccgtcatatggtttgtgcatccgctgtcgataatccagcttgaacccccggatgcataaacctgcaaggcaaatttaggcttgggacttagtacccaactcttgttgggtcctacaaggttagtgcaaatattccttagggacccaaatgcaagttttgtcacccttgcattttgcccctaatttcctagcaattaccttcttaccctttctacaaatggcaaagggagcattgcaagcataataaatggtagaaggtttgttcacaacttttctaggagcatgagcaaaatttctcctaggcatatgcacaacatgagaactagaagcagtcatagcataagagtcataagcatgtgaatcaaaatcattataagcatttctagcatgtttcctatcatagtacaagaaagcatggttccttttagcactactaaccataggggccttccctttctccttgacgaagatggaagccttatggcttgttaagttcttggcttctctcttgaagccaagaccatccttaattgaggggtgtctacccactgtgtaggcatcccttgcaaattttattttatcaacttcactcttgctagtcttaagttgagcattaagactagccacttcatcatttagttttgaaattgaaactaagtgttcactacaagcattaacatcaaaatccttacacctagtgcaaattgtaacattttcaacatacgagttacttgctacttctagtttagcagttaaatcgttaatttcaccttttaaagaagaaatggtttcattacaagtagaaagttcacaagaaagtattccatttcttttaacttctatagcaagtgaattttgtgcactaacaaatttatcatgttcttcatataaaaggtcttcttgtttctctaagattctatccttttcatttaaggcatcgatcaactcattaatcttagctatcttagttctatccaatcccttgaataaactagagtaatcaatttcatcctcactagattcatcatcactagaagaatcataagtattagcattacgagtgattaccttcttttcccttgccatgaggcaagtgtgatgctcgttggggaagagagccgatttgttgaaggcagtggcggcgagtccttcgtcgtcggagtcggacgaagagcaatccgaatcccactcctttccaaggtgtgcttcgcctttggccttcttgtaaaccttcttgttctctctcttcccatttttcccttgctcctggtcactatcattttcgggacagttagcaataaaatgaccaagcttaccgcatttgaagcatgatcgctttcccttggtcttggccttgcttggctgtccctttcgaccttttagcgccgtcttgaatctcttgatgatgagagccatctcttcatcattgagcccggccgcctcaacttgcgccaccttgctaggtagcgactccttgctcctcgttgcctttagagcaatgggttgaggctcgtggagtggaccgttcaatgcgtcgtcgacgtatcttgcctccttgatcatcatccgcccgctcacgaattttccaagtacttcctcgggcgtcatcatcgtgtacctgggattctcacgaatattgttcatgagatgaggatcaagaacggtaaaggacctgagcattaggcggacgacgtcgtgatccgtccaacgcgtgcttccgtagctccttattttgttgataagggtcttgagccggttgtaagtttgagttggctcctctccccttatcatggcgaatcgtccaagctcgccctccaccaactccatcttggtgagcatggtgatgtcgttcccctcgtgagagatcttgagggtgtcccatatctgcttggcattgtccaagccgctcaccttattgtactcttccctgcacaaagacgctaagagaacagtagtagcttgtgcatttctatgaatttgttcatttataagcatagggctatccgagctatcaaatttcattccattctccacaatctcccatatgcttggatggagagagaataagtgactacgcattttgtgactccaaaatccgtagtcctccccatcgaagtgtggaggtttgccaagaggaatggaaagcaagtgcgaattcgaactatgttgaatacgagaataatcaaatgaaaagttcgaattgaccgtctttttgtagtcgttgtcatcatccttttgggaagaagtagactcatcactatcgtcgtagtagatgatctccttgatgcgccttgtcttcttcttctttccttccttccgtctatgccccgagccggagtcgataggcttgtcgtcctttggctcgttgacgaaggattccttctctttgtcgttgatcacgattcccttccccttaggatccat

SEQ ID NO: 4537 - DNA, 4881 bp, Zea mays
  Clone ID: TF_ZmC4916_368
atggatcctaaggggaagggaattgtgatcaacgacaaagagaaggaatccttcgtcaacgagccgaaggatgacaagcctaccgactccggctcggggcatagacggaaggaagggaagaagaagaagacaaggcgcatcaaggagatcatctactacgacgatagtgatgagtctacttcttcccaaaaggatgatgacaacgactacaaaaagacggtcaattcgaacttttcatttgattattctcgtattcaacatagttcgaattcgcatttgctttccattcctcttggcaaacctccacacttcgatggggaggactacggattttggagtcacaaaatgcgtagtcacctattctctctccatccaagcatatgggagattgtggagaatggaatgaaatttgatagctcggatagccctatgcttataaatgaacaaattcatagaaatgcacaagctactactgttctcttagcgtctttgtgcagggaagagtacaataaggtgagtggcttggacaatgccaagcagatatgggacaccctcaagatctctcacgaggggaacgacatcaccatgctcaccaagatggagttggtggagggcgagcttggacgattcgccatgataaggggagaggagccaactcaaacgtacaaccggctcaagactcttatcaacaaaataaggagctacggaagcacacgttggacggatcacgacgtcgtccgcctaatgctcaggtcctttactgttcttgaccctcatctcgtgaacaatattcgtgagaatcccaggtacacgatgatgacgcccgaggaagtacttggaaaattcgtgagcgggcggatgatgatcaaggaggcgagatacgtcgacgacgcgttgaacggtccactccacgagcctcaacccattgctctaaaggcaacgaggagcaaggagtcgctacctagcaaggtggcacaagttgaggcagccgggctcaatgatgaagagatggctctcatcataaaaagattcaagacggcgctaaaaggtcgaaagggacaaccaagcaaggccaaaaccaagggaaagcgatcatgcttcaaatgcggtaagcttggtcattttattgctaactgtcctgaaaatgatagtgaccaggagcaagggaaaaatgggaagagagagaacaagaaggtttacaagaaggccaaaggcgaagcacaccttggaaaggagtgggattcggattgctcttcgtccgactccgacgacgaaggacttgccgccactgccttcaacaaatcggctctcttccccaacgagcatcacacttgcctcatggcaagggaaaagaaggtaatcactcgtaatgctaatacttatgattcttctagtgatgatgaatctagtgaggatgagattgattactctagtttattcaagggattggatagaactaagatagctaagattaatgagttgattgatgccttaaatgaaaaggatagaatcttagagaaacaagaagaccttttgtatgaagaacatgataaatttgttagtgcacaaaattcacttgctctagaagttaaaagaaatggaatactttcttgtgaactttctacttgcaatgaaaccatttcttctttaaaaggtgaaattaatgttttaactactaaactagaagtagcaagtaactcttgtgttgaaaatattacaatttgcactaggtgtaaggattttgatgttaatgcttgtagtgaacacttagtttcaatttcaaaactaaatgatgaaatggctagtcttaatgctcaacttaagactagcaagagtgaagttgataaaataaaatttgcaagggatgcctacacgattggtagacacccctcaattaaggatggtcttggcttcaagagagaggccaagaacttaacaagccataaggctcccatcttcgtcaaggagaaagggaaggcccctatggctaatagtgctaaaaggaaccatgctttcttgtaccatgataggagacatgctagaaatgcttataatgattctgattcacatgtttatgattctcatgccatgtttgcttctagttcttcctataagcatgatagagatatgtgtaggagaaatgttgtgcatatgcctaggagaaattttgctcatgttcctagaaaagttgtgaacaaaccttctaccatttattatgcttgcaatgctccctttgctatttgtagaaagggtaagaaggtttatgcatccgggggatcaagctggattatcgacagcggatgcacaaaccatatgacgggggagaagaagatgttcacttcctacgtcaagaataaggattcccaggattcaattatattcggtgatgggaatcaaggcaaggataagtctgaaacccaagggaccctcaagcgcttcctcaggagagctcaaaatgagtttgagctcaaagtgaagaagataaggagcgacaacgggtccgaattcaagaatcttcaagtggaggaattccttgaggaggaagggatcaagcacgagttctccgctccctacacaccacagcaaaatggtgtggtagagaggaagaacaggacgctaatcgatatggcaaggacaatgcttggagaattcaagacccccgagtatttctggtcggaagccgtgaacacggcttgccacgccatcaacagggtctaccttcatcgcctcctcaagaagacttcgtatgagcttctaaccggtaacaaacccaatgtatcttactttcgtgtatttgggagcaagtgctacattctagtgaagaaaggtagaaattctaagtttgctcccaaagctgtagaagggtttttgttaggttatgactcaaatacaaaggcgtatagagtcttcaacaaatcatcgggtttggttgaagtctctagcgacgttgtatttgatgagactaatggctctccaagagagcaagttgttgattgtgatgatgtagatgaagaagatgttccgacggccgctatacgaaccatggcgattggagaagtacgaccacaggaacaagatgaacgagatcaaccttcttcctcaactatggtgcatcccccaaccgaagatgacgaacaggtacctcaagtggaggcgcttgatcaagggggagcacaagatgatcaagtgatggaggaagaagcgcaaccagcacctccaacccaagttcgagcgatgattcaaagggatcatcccgttgaccaaattctgggtgatattagcaagggagtaactactcgatctcaattagttaatttttgcgagcattactcctttgtctcttctattgagcctttcagggtagaggaggccttgctagatccggactgggtgttggccatgcaggaggagctcaacaacttcaagagaaatgaagtttggacgctggtgcctcgtccgaagcaaaatgttgtgggaaccaagtgggtgttccgcaacaaacaggacgaacacggggtggtgacgagaaacaaggctcgacttgtggcaaaaggttatgcccaagtcgcaggtttggatttcgaggagacttttgctcctgtggctaggctagagtctattcgtatcctgctagcatatgccgctcaccattctttcaggctgttccaaatggatgtgaagagcgctttcctcaacgggccgatcaaggaggaggtgtacgtggagcaaccccctggcttcgaggatgaacggtaccccaaccacgtgtgtaagctctctaaggcactctatggacttaagcaagccccaagagcatggtatgaatgccttagagactttctaattgctaatgctttcaaggttgggaaagccgatccaactctttttactaagacatgtgatggtgatttgtttgtgtgccaaatttatgtcgatgacataatatttggttctactaaccaaaagtcttgtgaagagtttagcagggtgatgacgcagaaatttgagatgtcgatgatgggcgagttgaactacttccttgggttccaagtgaagcaactcaaggacggcaacttcatctcccaaacgaagtacacgcacgatctgctaaagcggtttgggatgaaggacgccaaacccgcaaagactccgatggggaccgacggacacaccgacctcaacaaaggaggtaagtccgttgatcaaaaagcataccggtcaatgataggttctttgctttacttatgtgctagtagaccggatattatgcttagcgtatgcatgtgtgctagatgtcaatccgattctaaggagtgtcacttagtggcagtaaagcgaattcttagatatttggttgctacgccttgcctcgggctctggtatccaaaggggtctacctttgacttagttggatactcagactccgactatgctggatgtaaggtcgataggaagagtacatcagggacgtgccaattcttaggaaggtccctggtgtcatggaactctaagaaacaaacctccgttgccctatccaccgctgaggccgagtacgttgccgcaggtcagtgttgcgcgcaactactttggatgaggcaaaccctccgggactttggctacaatctgagcaaagtcccactcctatgtgacaatgagagtgctatccgcatggcggaaaatcctgttgagcacagccgcacaaagcacatagacatccggcatcactttttgagagaccaccagcaaaagggagatatcgaagtgtttcatgttagcaccgagaaccagctagccgatatcttcactaagcctctagatgagaagaccttttgcaggttgcgtagtgagctaaatgtcttagattcgcggaacttggattga

SEQ ID NO: 4538 - DNA, 4827 bp, Zea mays
  Clone ID: TF_ZmC4916_380
atggatcctaaggggaagggaatcgtgatcaacgacaaagaaaaggaatccttcgtcaacgagccgaaggacgacaagcctaccgactccggctcggggcatagacggaaggaaggaaagaagaagaagacaaggcgcatcaaggagatcatctactacgacgatagtgatgagtctacttcttcccaaaaggatgatgacaacgactacaaaaagacggtcaattcgaacttttcatttgattattctcgtattcaacatagttcgaattcgcatttgctttccattcctcttggcaaacctccacacttcgatggggaggactacggattttggagtcacaaaatgcgtagtcacttattctctctccatccaagcatatgggagattgtggagaatggaatgaagtttgatagctcggatagccctatgcttataaatgaacaaattcatagaaatgcacaagctactactgttctcttagcatctttgtgcagggaagagtacaataaggtgagcggcttggacaatgccaagcagatatgggacaccctcaagatctctcacgaggggaacgacatcaccatgctcaccaagatggagttggtggagggcgagcttggacgattcgccatgataaggggagaggagccaactcaaacttacaaccggctcaagacccttatcaacaaaataaggagctacggaagcacgcgttggacggatcacgacgtcgtccgcctaatgctcaggtcctttaccgttcttgatcctcatctcgtgaacaatattcgtgagaatcccaggtacacgatgatgacgcccgaggaagtacttggaaaattcgtgagcgggcggatgatgatcaaggaggcaagatacgtcgacgacgcgttgaacggtccactccacgaacctcaacccattgctctaaaggcaacgaggagcaaggagtcgctacctagcaaggtggcgcaagttgaggcggccgggctcaatgatgaagagatggctctcatcattaaaagattcaagacggcgctaaaaggtcgaaagggacagccaagcaaggccaagaccaagggaaagcgatcatgcttcaaatgcggtaagcttggtcattttattgctaactgtcccgaaaatgatagtgaccaggagcaaggaaaaaatgggaagagagagaacaagaaggtttacaagaaggccaatggcgaagcacaccttggaaaggagtgggattcggattgctcttcgtccgactccgacgacgaaggactcgccgccactgccttcaacaaatcggctctcttccccaacgagcatcacacttgcctcatggcaagggaaaagaaggtaatcactcgtaatgctaatacttatgattcttctagtaatgatgaatctagtgaggatgaaattgattactctagtttattcaagggattggatagaactaagatagctaagattaatgagttgattgatgccttaaatgaaaaggatagaatcttagagaaacaagaagaccttttatatgaagaacatgataaatttgttagtgcacaaaattcacttgctctagaagttaaaagaaatggaatactttcttgtgaactttctacttgtaatgaaaccatttcttctttaaaaggtgaaattaatgttttaactgctaaactagaagtagcaagtaactcttgtgttgaaaatattacaatttgcactaggtgtaaggattttgatgttaatgcttgtagtgaacacttagtttcaatttcaaaactaaatgatgaagtggctagtcttaatgctcaacttaagactagcaagagtgaagttgataaaataaaatttgcaagggatgcctacacggttggtagacacccctcaattaaggatggtattggcttcaagagagaggccaagaacttaacaagccataaggctcccatcttcgtcaaggagaaagggaaggcccctatggctagtagtgctaaaaggaaccatgctttcttgtaccatgataggagacatgctagaaatgcttataatgattttgattcacatgtttatgattctcatgccatgtttgcttctagttcttcctataagcatgatagagatatgtgtaggagaaatgttgtgcatatgcctaggagaaattttgctcatgttcctagaaaagttgtgaacaaaccttctaccatttattatgcttgcaatgctccctttgctatttgtagaaagggtaagaaggtttatgcatccggaggatcaagctggattatcgacagcggatgcacaaaccatatgacgggggagaagaagatgttcacttcctacgtcaagaataaggattcccaggattcaattatattcggtgatgggaatcaaggcaaggataagtctgaaacccaagggaccctcaagcgcttcctcaggagagctcaaaatgagtttgagctcaaggtgaagaagataaggagcgacaacgggtccgaattcaagaaccttcaagtggaggaatttcttgaggaggaagggatcaagcacgagttctccgctccctacacaccacagcaaaatggtgtggtagagaggaagaacaggacgctaatcgatatggcgaggacaatgcttggagaattcaagacccccgagtgtttctggtcggaagccgtgaacatggcttgccacgccatcaacagggtctaccttcatcgcctcctcaagaagacttcatatgagctactaaccggtaacaaacccaatgtatcttactttcgtgtatttgggagcaagtgctacattctagtgaagaaaggtagaaattctaagtttgctcccaaagctgtagaagggtttttgttaggttatgactcaaatacaaaggcgtatagagtcttcaacaaatcatcgggtttggttgaagtctctagcgacgttgtatttgatgagactaatggctctccaagagagcaagttgttgattgtgatgaagaagatgttccggcggccgctatacgaaccatggcgattggagaagtgcggccacaggaaaaagatgaacaaccttcttcctcaactatggtgcaacccccaaccgaagatgacgaacaggtacctcaagtggaggcgcttgatcaagggggagcacaagatgatcaagtgatggaggaagaagcgcaaccggcacctccaacccaagttcgagcgatgattcaaagggatcatcccgtcgaccaaattctgggtgacattagcaagggagtaacgactcgatctcgattagttaatttttgtgagcattactcctttgtctcttctattgagcctttcagggtagaggaggccttgctagatccggactgggtgttggccatgcaggaggaactcaacaacttcaagcgcaatgaagtttggacactggtgcctcgtccgaagcaaaatgttgtgggaaccaagtgggtgttccgcaacaaacaggatgagcacggggtggtgacgaggaacaaggctcgacttgtggcaaaaggttatgcccaagtcgcaggtttggactttgaggagacgtttgctcctgtggctaggctagaatcaattcgtatcttgctagcatatgccgctcaccattctttcaggttgtaccaaatggatgtaaagagcgctttcctcaacgggccaatcaaggaggaggtgtacgtggagcaaccccctggcttcgaggatgaacggtaccccgaccacgtgtgtaagctctctaaggcgctctatggacttaagcaagccccaagagcatggtatgaatgccttagagactttttaattgctaatgctttcaaggttgggaaagccgatccaactcttttcactaagacatgtgatggtgatttgtttgtgtgccaaatttatgtcgatgacataatatttggttctactaaccaaaagtcttgtgaagagtttagcagggtgatgacacagaaattcgagatgtcgatgatgggcgagttgaactacttccttgggtttcaagtgaagcaactcaaggacggcaccttcatctcccaaacaaagtacacgcaagaactgctaaagtggtttggaatgaaggacgccaagcccgcaaagactccgatggggaccgacggacacaccgacctcaacaaaggaggttctttgctttacttatgcgctagtagaccggatattatgcttagcgtatgcatgtgtgctagatttcaatccgatcctaaggagtgtcacttagtggcggtgaagcgaattcttagatatttggttgctacgccttgcttcgggctctggtatccaaaggggtctacctttaacttagttggatactcagactccgactatgctggatgtaaggtcgataggaagagtacatcggggacatgccaattcttaggaaggtccctggtgtcatggaactctaagaaacaaacctctgttgccctatccaccgctgaggccgaatacgttgccgcaggtcagtgttgcgcgcaactactttggatgaggcaaaccctccgggactttggctacaatctgagcaaagtcccactcctatgtgacaatgagagtgctatccgcatggcggagaatcctgttgagcacagccgcacaaagcacatagacatccggcatcactttttgagagaccaccagcaaaagggagatatcgaagtgtttcatgttagcaccgagaaccagctagccgatatcttcactaagcctctagatgagaagaccttttgcaggttgcgtagtgagctaaatgtcatagattcgcggaacctggattga

SEQ ID NO: 4539 - DNA, 4788 bp, Zea mays
  Clone ID: TF_ZM4266.C12.o4.fg
atggatcctaaggggaagggaatcgtgatcaacgacaaggagaaggagtccttcgtcaacgagccgaaggatgacaagcctactgactcgggctcgggccacaagcgcaaagatgggaagaagaagaagacaaggcgcatcaaggagatcgtctactacgacgatagcgatgagtctacttcttcccaaaaagacgatgacaacgactacaaaaagacggtcaattcgaacttttcatttgattattctcgtattcaacatagttcgaattcgcacttgctttccattcctcttggcaaacctccacacttcgatggggaggactacggattttggagtcacaaaatgcgtagtcacttattctctctccatccaagcatatgggagattgtggagaatggaatgaaatttgatagctcggatagccctatgtttataaatgaacaaattcatagaaatgcacaagctactactgttctcttagcgtctttgtgcagggaagagtacaataaggtgagcggcttggacaattccaagcagatatgggacaccctcaagatctctcacgaggggaacgacatcaccatgctcaccaagatggagttggtggagggcgagcttggacgattcgccatgataaggggagaggagccaactcaaacttacaaccggctcaagacccttatcaacaaaataaggagctacggaagcacgcgttggacggatcacgacgtcgtccgcctaatgctcaggtcctttaccgttcttgatcctcatctcgtgaacaatattcgtgagaatcccaggtacacgatgatgacgcccgaggaagtacttggaaaattcgtgagcgggcggatgatgatcaaggaggcaagatacgtcgacgacgcgttgaacggtccactccacgagcctcaacccattgctctaaaggcaacaaggagcaaggagtcgctacctagcaaggtggcgcaagttgaggcggccgggctcaatgatgaagagatggctctcatcatcaagagattcaagacggcgctaaaaggtcgaaagggacagccaagcaaggccaagaccaagggaaagcgatcatgcttcaaatgcggtaagcttggtcattttattgctaactgtcccgaaaatgatagtgaccaggagcaagggaaaaatgggaagagagagaacaagaagggttacaagaaggccaaaggcgaagcacaccttggaaaggagtgggattcggattgctcttcgtccgactccgacgacgaaggacttgccgccactgccttcaacaaatcggctctcttccccaacgagcatcacacttgcctcatggcaagggaaaaaagtgataatgaatctagtgaggatgagattgattactctagtttattcaagggattggatagaactaagatagctaagattaatgagttgattgatgccttaaatgaaaaggatagaatcttagagaaacaagaagaccttttatatgaagaacatgataaatttgttagtgcacaaaattcacttgctttagaagttaaaagaaatggaatactttcttgtgaactttctacttgtaatgaaaccatttcttctttgaaaggtgaaattaatgttttaactgctaaactagaagtagcaagtaactcgtgtgttgaaaatattacaatttgcactaggtgtaaggattttgatgttaatgcttgtaataaacacttagtttcaatttcaaaactaaatgatgaagtggctagtcttaatgctcaacttaagactagcaagagtgaagttgataaaataaaatttgcaagggatgcctacacagtgggtagacacccctcaattaaggatggtcttggcttcaagagagaggccaagaacttaacaagccataaagctcccatcttcgtcaaggagaaagggaaggcccctatggctagtagtgctaaaaggaaccatgctttcttgtaccatgataggagacatgctagaaatacttataatgactttgattcacatgtttatgattctcatgccatgtttgcctctagttcttcctataagcatgatagagatatgtgtaggagaaatgttgtgcctaggagaaattttgctcatgttcctagaaaagttgtgaacaaaccttctaccatttattatgcttgcaatgctccctttgctatttgtagaaagggtaggaaaatagttgctagaaaattaggggcaagatgcaagggtgacaaaacttgcatttgggtccctaaggatatttgtgctaaccttgcaggacccaacatgagttgggtttatgcatccgggggttcaagctggattatcgacagcggatgcacaaaccatatgacgggggagaagaagatgttcacctcctatgtcaagaataaggattcccaagattcaattatattcggtgatgggaatcaaggcaagatagaccttgtgcagcttgtcaagcaggataagtccgaaacccaagggaccctcaagcgcttcctcaggagagctcaaaatgagtttgagctcaaggtgaagaagataagaagcgacaatgggtccgagttcaagaaccttcaagtagaggagttccttgaggaggaagggatcaagcacgagttctccgctccctacacaccacaacaaaatggtgtgaattcaagaccccccgagtgtttctggtcggaagccgtgaacacggcttgccacgccatcaacagggtctaccttcatcgccttctcaagaagacttcgtatgagctactaaccggtaacaaacccaatgtatcttactttcgtgtatttgggagcaagtgctacattctagtgaagaaaggtagaaattctaagtttgctcccaaagctgtagaagggtttttgttaggttatgactcaaatacaaaggcgtatagagtcttcaacaaatcatcgggtttggttgaagtctctagcgacgttgtatttgatgagactaatggctctccaagagagcaagttgttgattgtgatgatgtagatgaagaagatgttccgacggccgctatacagaccatggcgattggagaagtacggccacaggaacaagatgaacaagatcaaccttcttcctcaacaacggtgcatcccccacctcaagatgatgaacatgttcatcaacaggaggcggatgatcatgtgatggaggaagatgcgcaaccggcacctccaacccaagttcgagcgatgattcaaagggatcatcccgtcgaccaaattctgggtgacattagcaagggagtaactactcgttctcgattagttaatttttgtgagcattactcctttgtctcttctattgagcctttcagggtagaggaggccttgctagatccggattgggtattggccatgcaggaggagctcaacaacttcaagcgcaatgaagtttggacactggtgcctcgtccaaagcaaaatgttgtgggaaccaagtgggtgttccgcaacaaacaggacgagcacggggtggtgacgagaaacaaggctcgacttgtggcaaaaggttatgcccaagtcgcaggtttggactttgaggagacgtttgctcctgtggctaggctagaatcaattcgtatcttgctagcatatgccgctcaccattctttcaggttgttccaaatggatgtgaagagcgctttcctcaacgggccaatcaaggaggaggtgtacgtggagcaaccccctggcttcgaggatgaacggtaccccgaccatgtgtgtaagctctctaaggcgctctatggacttaagcaagccccaagagcatggtatgaatgccttagagactttttaattgctaatgctttcaatgtcgggaaagccgatccaactctctttacaaagacatgtgatggtgatttgtttgtgtgccaaatttatgtcgatgacataatatttggttctactaaccaaaagtcatgtgaagagtttagcagggtgatgacgcagaaattcaagatgtcgatgatgggcgagttaaactacttccttgggttccaagtgaagcaactcaaggacggcaccttcatctctcaaacaaagtacacgcaagatctgctgaagcggtttgggatgaaggacgccaagcccgcaaagactccgatgggaaccgacggacacactgacctcaacaaaggaggtaagtccgttgatcaaaaagcataccggtcaatgatagggtctttactttatttatgtgctagtagaccggatattatgcttagctatccaaaggggtctacctttgacttagttggatactcagactccgactatgctggatgtaaggtcgataggaagagtacatcggggacgtgccaattcttaggaaggtccctggtgtcatggaactctaagaaacaaacttccgttgccctatccaccgctgaggccgagtatgttgccgcaggacagtgttgcgcgcaactactttggatgaggcaaaccctccgggactttggctacaatctgagcaaagtcccactcctatgtgataatgagagtgctatccgcatggcggaaaatcctgttgagcacagccgcacaaagcacatagacatccggcatcactttttgagagaccaccagcaaaagggagatatcgaagtgtttcatgttagcaccgagaaccagctagccgatatctttaccaagcctctaggtgagaagaccttttgcaggttgcgtagtgagcttaatgtcttagattcgtggaacttggattga

SEQ ID NO: 4540 - DNA, 1990 bp, Zea mays
  Clone ID: TF_ZM4707.C2.o8.fg
atggatcctaaggggaagggaatcgtgatcaacgacaaagagaaggagtccttcgtcaacgagccgaaggacgacaagcctaccgactccggctcggggcatagacggaaggaagggaagaagaagaagacaaggcgcatcaaggagatcatctactacgacgatagtgatgagtctacttcttcccaaaaggatgatgacaacgactacaaaaagacggtcaattcgaacttttcatttgattattctcgtattcaacatagttcgaattcacatttgctttccattcctcttggcaaacctccacacttcgatggggaggactacggattttggagtcacaaaatgcgtagtcacttattctctctccatccaagcatatgggagattgtggagaatggaatgaaatttgatagctcggatagccctatgcttataaatgaacaaattcatagaaatgcacaagctactactgttctcttagcgtctgtgtgcagggaagagtacaataaggtgagtggcttggacaatgccaagcagatatgggacaccctcaagatctctcacgaggggaacgacatcaccatgctcaccaagatggagttggtggagggcgagcttggacgattcgccatgataaggggagaggagccaactcaaacttacaaccggctcaagactcttatcaacaaaataaggagctacggaagcacacgttggacggatcacgacgtcgtccgcctaatgctcaggtcctttaccgttcttgatcctcatctcgtgaacaatattcgtgagaatcccaggtacacgatgatgacgcccgaggaagtacttggaaaattcgtgagcgggcggatgatgatcaaggaggcaagatacgtcgacgacgcattgaacggtccactccatgagcctcaacccattgctctaaaggcaacgaggagcaaggagtcacttcctagcaaggtggcgcaagttgaggcggccgggctcaatgatgaagagatggctctcatcatcaagagattcaagacggcgctaaaaggtcgaaagggacagccaagcaaggccaagaccaagggaaagcgatcatgcttcaaatgcggtaagcttggtcattttattgctaactgtcccgaaaatgatagtgaccaggagcaagaaaaaaatgggaagagagagaacaagaaggcttacaagaaggccaaaggcgaagcacaccttggaaaggagtgggattcggattgctcttcgtccgactccgacgacgaaggactcgccgccactgccttcaacaaatcggctctcttccccaacgagcatcacacttgcctcatggcaagggaaaagaaggtaatcactcataatgctaatacttatgattcttctagtgatgatgaatctagtgaagatgaaattgattactctagtttattcaagggattggatagaactaagatagctaagattaatgagttgattgatgccttaaatgaaaaggatagaatcttagagaaacaagaagaccttttatatgaagaacatgataaatttgttagtgcacaaaattcacttgctctagaagttaaaagaaatggaatactttcttgtgaactttctacttgtaatgaaaccatttcttctttaaaaggtgaaattaatgttttaactgctaaactagaagtagcaagtaactcgtgtgttgaaaatattacaatttgcactaggtgtaaggattttgatgttaatgcttgtagtgaacacttagtttcaatttcaaaactaaatgatgaggtggctagtcttaatgctcaacttaagactagcaagagtgaagttgataaaataaaatttgcaagggatgcctacacggttggtagacacccctcaattaaggatggtcttggcttcaagagagaggccaagaaattaacaagccataaggctcccatcttcgtcaaggagaaagggaaggcccctatggcta

SEQ ID NO: 4541 - DNA, 1551 bp, Zea mays
  Clone ID: TF_ZM4712.C2.o2.fg
atggatcctaaggggaagggaatcgtgatcaacgacaaagagaaggaatccttcgtcaacgagccgaaggacgacaagcctaccaactccggctcggggcatagacggaaggaagggaagaagaagaagacaaggcgcatcaaggagatcatctactacgacgatagtgatgagtctacttcttcccaaaaggacgacgacaacgactacaggaagacggcaacgaggagcaaggagtcgctacctagcaaggtggcgcaagttgaggcggtcgggctcaatgatgaagagatggctctcatcatcaagagattcaagacggcgctaaaaggtcgaaagggacagccaagcaaggccaagaccaagggaaagcgatcatgcttcaaatgcggtaagcttggtcattttattgctaactgtcccgaaaatgatagtgaccaggagcaagggaaaaatgggaagagagagaacaagaaggtttacaagaaggccaaaggcgaagcacaccttggaaaggagtgtgattcggattgctcttcgtccgactccgacgacgaaggactcgccgccactgccttcaacaaatcggctctcttccccaacgagcatcacacttgcctcatggcaagggaaaagaaggtttatgcatccgggggttcaagctggattattgatagcggatgcacaaaccatatgacgggggagaagaagatgttcacctcctacgtcaagagtaaggattcccaagattcaattatattcggtgatgggaatcaaggcaaggataagtctgaaacccaagggaccctcaagcgcttcctcaggagagctcaaaatgagtttgagctcaaggtgaagaagataaggagcgacaacgggtccgaattcaagaaccttcaagtggaggaattccttgaggaggaagggatcaagcacgagttctccgctccctacacaccacagcaaaatggtgtgatgaagaagatgttccgacggccgctatacggaccatggcgattggagaagtacggccacaggaacaagatgaacgagatcaaccttcttcctcaactatggtgcatcccccaaccgaagatgacgaacaggttgtaccaaatggatgtgaagagcgctttcctcaacgggccaatcaaagaggaggtgtacgtggagcaaccccctggcttcgaggatgaacggtaccccgaccatgtgctctcagggggctacacgcacctgctggtcgccatcgacaaattctccaagtggatcgaggtccgacccctaaacagcatcaggtccgaacaggtagtggcgttctttaccaacatcatccatcgctttggggtcccgaactccatcatcaccgacaacggcacccagttcaccggcggaaagttcctggacttctgcgaggatcaccacatccaggtggactgggccgccgtggctcaccccatgatgaatgggcaagtagagcgtgccaacaacatgattctgcaaggactcaagccacggatctacaacgacctcaacaagttcggcaagtga

SEQ ID NO: 4542 - DNA, 4998 bp, Zea mays
  Clone ID: TF_ZM4715.C1.o7.fg
atggatcctaaggggaagggaatcgtgatcaacgacaaagaaaaggaatccttcgccaacgagccgaaggacgacaagcctaccgactctggctcggggcatagacggaaggaaggaaagaagaagaagacaaggcgcatcaaggagatcatctactacgacgatagtgatgagtctacttcttcccaaaaggatgatgacaacgactacaaaaagacggtcaattcgaacttttcatttgattattctcgtattcaacatagttcgaattcgcatttgctttccattcctcttggcaaacctccacacttcgatggggaggactacggattttggagtcacaaaatgcgtagtcacttattctctctccatccaagcatatgggagattgtggagaatggaatgaagtttgatagctcggatagccctatgcttataaatgaacaaattcatagaaatgcacaagctactactgttctcttagcatctttgtgcagggaagagtacaataaggtgagcggcttggacaatgccaagcagatatgggacaccctcaagatctctcacgaggggaacgacatcaccatgctcaccaagatggagttggtggagggtgagcttggacgattcgccatgataaggggagaggagccaactcaaacttacaaccggctcaagactcttatcaacaaaataaggagctacggaagcacgcgttggacggatcacgacgtcgtccgcctaatgctcaggtcctttactgttcttgatcctcatctcgtgaacaatattcgtgagaatcccaggtacacgatgatgacgcccgaggaagttcttggaaaattcgtgagcgggcggatgatgatcaaggaggcaagatacgtcgacgacgcattgaacggtccactccacgaaccccaacccattgctctaaaggcaacgaggagcaaggagtcgctacctagcaaggtggcgcaagttgaggcggccgggctcaatgatgaagagatggctctcatcattaaaagattcaagacggcgctaaaaggtcaaaagggacagccaagcaaggccaagaccaagggaaagcgatcatgcttcaaatgcggtaagcttggtcattttattgctaactgtcccgaaaatgatagtgaccaggagcaagggaaaaatgggaagagagagaacaagaaggtttacaagaaggccaaaggcgaagcacaccttggaaaggagtgggattcggattgctcttcgtccgactccgacgacgaaggactcgccgccactgccttcaacaaatcagctctcttccccaacgagcatcacacttgcctcatggcaagggaaaagaaggtaatcactcgtaatgctaatacttatgattcttctagtgatgatgaatctagtgaggatgaaattgattactctagtttattcaagggattggatagaactaagatagctaagattaatgagttgattgatgccttaaatgaaaaggatagaatcttagagaaacaagaagaccttttatatgaagaacatgataaatttgttagtgcacaaaattcacttgctctagaagttaaaagaaatggaatactttcttgtgaactttctacttgtaatgaaaccatttcttctttaaaaggtgaaattaatgttttaactgctaaactagaagtagcaagtaactcttgtgttgaaaatattacaatttgcactaggtgtaaggattttgatgttaatgcttgtagtgaacacttagtttcaatttcaaaactaaatgatgaagtggctagtcttaatgctcaacttaagactagcaaaagtgaattcgaaaaactaaaatttgcaagggatgcctacactattggtagacacccctcaattaaggatgggcttggcttcaagagggaagccaagaacttaacaagccataagactcctatctccaccaaggagaaagggaaggctcctatggctaatagtgttaagaagaatcatgctttcatgtattatgataggagatactctagaaatgcttttaggagtaatgatgtttttgattcacatgcttatgactcttatgctatgactgcttctagttctcatgttatgcatggtagaaatgtgtttagaagaaatgttgttcaccaaatgcctaggagaaatgtagatcataatgctcctaggaaagtagtgaatgaaccttccgaaatttattgtgctctaaatgcttcctttgctatttgtagaaaggataagaaaattgttgctaggaagttaggggcaagatgcaagggagataaaacttgcatttgggtccctaagaatatttgtgctaaccttgtaggacccaacatgagttgggtttatgcatccgggggttcaagctggattattgatagcggatgcacaaaccatatgacgggggagaagaagatgttcacttcctacgtcaagaataaggattcccaagattcaattatattcggtgatgggaatcaaggcaaggataagtctgaaacccaagggaccctcaagcgcttcctcaggagagctcaaaatgagtttgagctcaaggtgaagaagataaggagcgacaacgggtccgaattcaagaaccttcaagtggaggaatttcttgaggaggaagggatcaagcacgagttctccgctccctacacaccacaacaaaatggtgtggtagagaggaagaacaggacgctaattgatatggcgaggatgatgcttggagaattcaagacccccgaatgtttctggtcggaagccgtgaacacggcttgtcacgccatcaacagggtgtaccttcaccgcctcctcaagaagacatcgtatgagctactaaccggtaacaaacccaatgtatcttactttcgtgtatttgggagcaagtgctacattctagtgaagaagggtagaaattctaaatttgctcccaaagctgtagaagggtttttgttaggttatgattcaaatacaaaggcgtatagagtcttcaacaaatcatcgggtttggttgaagtctctagcgacgttgtatttgatgagactaatggctctccaagagagcaagttgttgatcttgatgatgtagatgaagaagacgttccaacggccgctatgcgcaccatggcgattggtgatgtgcgaccacaggaacaattggagcaagatcaacctcactcctcaactatggtgcaacccccaactcaagacgatgaacaggttcatcaacaggaggcgtgtgatcaagggggagcacaagatgatcgagtgatggaggaagaagcgcaaccggcacctccaacccaagttcgagcgatgattcaaagggatcatcccgtcgatcaaattatgggtgacattagcaagggagtaactactcgatctcgattagttaatttttgtgagcattactcctttgtctcttctattgagcctttcagggtagaggaggccttgctagatccggactgtgtgttggccatgcaggaggagctcaacaacttcaagagaaatgaagtttggacactggtgcctcgtccgaagcaaaatgttgtgggaaccaagtgggtattccgcaacaaacaggacgagcacggggtggtgacgaggaacaaggctcgacttgtggcaaaaggttatgcccaagtcgcaggtttggatttcgaggagacttttgctcctgtggctaggctagagtcaattcgaatcttgctagcatatgccgctcaccattctttcaggttgtaccaaatggatgtgaagagcgctttcctcaacgggccgatcaaggaggaggtgtacgtagagcaaccccctggcttcgaggatgatcggttcctcgaccatgtgtgtaagctctctaaggcgctctatggacttaagcaagccccaagagcatggtatgaatgccttagagatttcttagttgctaatgctttcaatgttgggaaagccgatccaactctttttactaagacttgtaatggtgatttgtttgtgtgccaaatttatgtcgatgacataatatttggttctactaaccaaaagtcttgtgacgagtttagcagggtgatgacgcagaaattcgagatgtcgatgatgggcgagttgaactacttccttgggttccaagtgaagcaactcaaggatggcaccttcatctcccaaacgaagtacacgcaagacttgctaaaaaggtttgggatgaaggacgccaagcccgcaaagacgccgatgggaaccgacggacacacagacctcaacaaaggaggtaagtccgttgatcaaaaagcataccggtcaatgatagggtctttactttatttatgtgctagtagaccggatattatgcttagcgtatgcatgtgtgctagatttcaatccgatcctaaggagtgtcacttagtggcggtgaagcgaattcttagatatttagttgctacgccttgcttcggactctggtatccaaaggggtctacctttgacttggttggatactcagattccgactatgctggatgtaaggtcgataggaagagtacatcggggacgtgccaattcttaggaaggtccctggtgtcatggaactctaagaaacaaacctccgttgccctatccaccgctgaggccgagtatgttgccgcaggacagtgttgcgcgcaactactttggatgaggcaaaccctccgggactttggctacaatctgagcaaagtcccactcctatgtgataatgagagtgctatccgcatggcggaaaatcctgttgaacacagccgcacaaagcacatagacatccggcatcactttttgagagaccaccagcaaaagggagatatcgaagtgtttcatgttagcaccgagaaccagctagccgatatctttaccaagcctctagatgagaagaccttttgcaggctgcgtagtgagctaaatgtcttagattcgcgaaacttggattga

SEQ ID NO: 4543 - DNA, 2118 bp, Zea mays
  Clone ID: TF_ZM4843.C9.o1.fg
atggatcctaaggggaagggaatcgtgatcaacgacaaagagaaggaatccttcgtcaacgagccgaaggacgacaagcctaccgactccggctcggggcatagacgaaaggaagggaagaagaagaagacaaggcgcatcaaggagatcatctactacgacgatagtgatgagtctacttcttctcaaaaggatgatgacaacgactacaaaaagacggtcaattcgaacttttcatttgattattctcgtattcaacatagttcgaattcgcatttgctttccattcctcttggcaaacctccacacttcgatggggaggactacggattttggagtcacaaaatgtgtagtcacttattctctctccatccaagcatatgggagattgtggagaatggaatgaaatttgatagctcggatagccctatgcttataaatgaacaaattcatagaaatgcacaagctactactgttctcttagcgtctttgtgcagggaagagtacaataaggtgagtggcttggacaatgccaagcagatatgggacaccctcaagatctctcacgaggggaacgacatcaccatgctcaccaagatggagttggtggagggcgagcttggacgattcgccatgataaggggagaggagccaactcaaacttacaaccggctcaagactcttatcaacaaaataaggagctacggaagcacacgttggacggatcacgacgtcgtccgcctaatgctcaggtcctttaccgttcttgatcctcatctcgtgaacaatattcgtgagaatcccaggtacacgatgatgacgcccgaggaagtacttggaaaattcgtgagcgggcggatgatgatcaaggaggcaagatacgtcgacgacgcattgaacgatccactccatgagcctcaacccattgctctaaaggcaacgaggagcaaggagtcgcttcctagcaaggtggcgcaagttgaggcggccgggctcaatgatgaagagatggctctcatcatcaagagattcaagacggcgctaaaaggtcgaaagggacagccaagcaaggccaagaccaaaggaaagcgatcatgcttcaaatgcggtaagcttggtcattttattgctaactgtcccgaaaatgatagtgaccaggagcaaggaaaaaatgggaagagagagaacaagaaggcttacaagaaggccaaaggcgaagcacaccttggaaaggagtgggattcggattgctcttcgtccgactccgacgacgaaggactcgccgccactgccttcaacaaatcggctctcttccccaatgagcatcacacttgcctcatggcaagggaaaagaaggtaatcactcgaaatgctaatacttatgagtcttctagtgatgatgaatctagtgaggatgaaattgattactctagtttattcaagggattggacagaactaagatagctaagattaatgagttgatcgatgccctaaatgaaaaggatagaaccttagagaaacaagaagacctcttatatgaagaacatgataaatttgttagtgcacaaaattcacttgctctagaagttaaaagaaatggaatactttcttgtgaactttctacttgtaatgaaaccatttcttctttaaaaggtgaaattaacgatttaactgctaaactagaagtagcaagtaactcgtatgttgaaaatattacaatttgcactaggtgtaaggattttgatgttaatgcctgtagtgaacacttagtttcaatttcaaaactaaatgatgaagtggctagtcttaatgctcaacttaagactagcaagagtgaagttgataaaataaaatttgcaagggatgcctacacagtgggtagacacccctcaattaaggatggtcttggcttcaagagagaagccaagaacttaacaagccataagactcctatctccaccaaggagaaagggaaggctcctatggctaatagtgttaagaagaatcatgctttcatgtactatgataggagatactctagaaatgcttttagaagtaatgatgtttttgattcacatgcttatgactcttatgctatgactgcttctagttctcat

SEQ ID NO: 4544 - DNA, 2109 bp, Zea mays
  Clone ID: TF_ZM4989.C2.o1.fg
atggatcctaaggggaagggaatagtgatcaacgacaaggaaaaggagttcttcgtcaacgacccaaaagatgacaaatccaacgactccggctcggggcataaacggaaggaagggaagaagaaaaagacaaggagcatcaaggagatcatctactacgacgatagtgataagtctacttcttcccaaaaggatgatgacaacgactacaaaaagacggtcaactcgaacttttcatttgattattctcgtattcaacatagttcgaattcgcatttgctttccattcctcttggcaaacctccacacttcgatggggaggactacggattttggagtcacaaaatgcgtagtcacttattctctctccatccaagcatatgggagattgtagagaatggaatgaagtttgatagctcagatagccctatgcttataaatgaacaaattcatagaaatgcacaagctactactgttctcttagcatctttgtgcagggaagagtacaataaggtgagcggcttggacaatgccaagcagatatgggacaccctcaagatctctcacgaggggaacgacatcaccatgctcaccaagatggagttggtggagggcgagcttggacgattcgccatgataaggggagaggagccaactcaaacttacaaccggctcaagacccttatcaacaaaataaggagctacggaagcacgcgttggacggatcacgacgtcgtccgcctactgctcaggtcatttaccgttcttgatcctcatctcgtgaacaatattcgtgagaatcccaggtacacgaagatgacgcccgaggaggtacttggaaaattcgtgagcgggcggatgatgatcaaggaggcaagatacgtcgacgacgcgttgaacggtccactccacgagcctcaacccattgctctaaaggcaacaaggagcaaggagtcactacccagtaaggtggcacaaattgaggcagccggtcttaatgatgaagagatggccctcatcattaaaagattcaagacggcgctaaaagatcgaaagggacagccaagcaaggccaagaccaagggaaagcgatcatgcttcaaatgcggtaagcttggtcattttattgctaactgtcccgaaaatgatagtgaccaggagcaagaaaaaaatgggaagagagagaacaagaaggtttacaagaaggccaaaggtgaagcacaccttggaaaggagtgggattcggattgctcttcgtccgactccgacgacgaagggcttgctgccactgccttcaacaaatcggctctcttccccaacgagcatcacacttgcctcatggcaagggaaaagaaggtaatcactcgtaatgctaatacgtatgattcttctagtgatgatgaatctagtgaggatgagattgattactctagtttattcaagggactggatagaactaagatagctaagattaatgagttgattgatgccttaaatgaaaaggataaaatcttagagaaacaagaagacctgttatatgaagaacatgataaatttgttagtgcacaaaattcacttgctctagaagttaaaagaaatggaatactttcttgtgaactttctacttgtaatgaaaccatttcttctttaaaaggtgaaattaatgttttaactgctaaactagaagtagcaagtaactcgtgtgttgaaaatattacaatttgcactaggtgtaaggattttgatgttaatgcttgtaatgaacacttagtttcaatttcaaaactaaatgatgaagtggctagtcttaatgctcaacttaagactagcaagagtgaagttgataaaataaaatttgcaagggatgcctacacagtgggtagacacccctcaattaaggatgggcttggcttcaagagagaggccaagaacttaacaagccataaagctcccatcttcgtcaaggagaaagggaaggcccctatggctagtagtgctaaaaggaaccatgctttcttgtactatgataggagacatgctagaaatgcttataatgattttgattcacatgcttatgattcttatgctatgactgcttctagttctcat

SEQ ID NO: 4545 - DNA, 5199 bp, Zea mays
  Clone ID: TF_ZM5043.C4.o4.fg
atggatcataaggggaagggaatcgtgatcaacgacaaagagaaggaatccttcgtcaacgagccgaaggacgacaagcctaccgactccggctcggggcatagacggaaggaagggaagaagaagaagacaaggcgcatcaaggagatcatctactacgacgatagtgatgagtctacttcttcccaaaaggatgatgacaacgactacaaaaagacggtcaattcgaacttttcatttgattattctcgtattcaacatagttcgaattcgcatttgctttccattcctcttggcaaacctccacacttcgatggggaggactacggattttggagtcacaaaatgcgtagtcacttattctctctccatccaagcatatgggagattgtggagaatggaatgaaatttgatagctcggatagccctatgcttataaatgaacaaattcatagaaatgcacaagctactactgttctcttagcatctttgtgcagggaagagtacaataaggtgagtggcttggacaatgccaagcagatatgggacaccctcaagatctctcacgaggggaacgacatcaccatgctcaccaagatggagttggtggagggcgagcttggacgattcgccatgataaggggagaggagccaactcaaacttacaaccggctcaagacccttatcaacaaaataaggagctacggaagcacgcgttggacggatcacgacgtcgtccgcctaatgctcaggtcatttaccgttcttgatcctcatctcgtgaacaatattcgtgagaatcccaggtacacgatgatgacgcccgaggaagtacttggaaaattcgtgagcgggcggatgatgatcaaggaggcaagatacgtcgacgacgcattgaacggtccactccacgagcctcaacccattgctctaaaggcaacaaggagcaaggagtcgctacctagcaaggtggcgcaagttgaggcggcagggctcaatgatgaagagatggccctcatcattaaaagattcaagacagcactaaaaggtcgaaagggacagccaagcaaggctaagaccaagggaaagcgatcatgcttcaaatgcggtaagcttggtcattttattgctaactgtcccgaaaatgatagtgaccaggagcaagggaaaaatgggaagagagagaacaagaaggtttacaagaaggccaaaggcgaagcacaccttggaaaggagtgggattcggattgctcttcgtccgactccgacgacgaaggactcgccgccactgccttcaacaaatcggctctcttccccaacgagcatcacacttgcctcatggcaagggaaaagaaggtaatcactcgtaatgcttatgattcttctagtgatgatgaatctagtgaggatgaaattgattactctagtttattcaagggattggatagaactaagatagataagattaatgagttgattgatgccttaaatgaaaaggatagaatcttagagaaacaagaagaccttttatatgaagaacatgataaatttgttagtgcacaaaattcacttgctctagaagttaaaagaaatggaatactttcttgtgaactttctacttgtaatgaaaccatttcttctttaaaaggtgaaattaatgttttaactgctaaactagaagtagcaagtaactcttgtgttgaaaatattacaatttgcactaggtgtaaggattttgatgttaatgcctgtagtgaacacttagtttcaatttcaaaactaaatgatgaagtggctagtcttaatgctcaacttaagactagcaagagtgaagttgataaactaaaatttgcaagggatgcctacacgatcggtagacacccctcaattaaggatggacttggcttcaagagggaagccaagaacttaacaagccataagactcccattcccgctaaggagaaagggaaggcccctatggctactagtgttaaaaagaaccatgcctttttgtatcatgatagaaaaaattctagaaatgcttttagaagttatgatgcttatgattcacatgcttatgattcttatgctatgactgcttctagttctcatgttgtgcatgaaagaaatgttggtagaagaaatgttgttaatattcctaggaaagttaatgagccttctacaatatatcatgctttgaatgcttcctttgcaatttatagaaaggatagaaaggtttatgcatccgggggttcaagctggattattgatagcggatgcacaaaccatatgacgggggagaagaagatgttcacctcctacgtcaagaataatgattcccagattcaattatattcggtgatgggaatcaaggcaagaagaagtgatggttcactagcttttaagggtgtattagacgacaaactttatttagttgattttgcaaaagaggaagccggtctagatgcatgcttaatagctaagactagcatgggctggctgtggcatcgccgcttagcacatgtggggatgaagaaccttcacaagcttctaaagggagaacacgtgataggtttgactaacgtgcaattcgaaaaagatagaccttgtgcagcttgtcaagcaggtaaacaagtgggaggagcacatcacagcaagaatgtgatgaccacttcaagacccctggagctgctgcatatggacctcttcggacctgtcgcctatctgagcataggagggagtaagtatggtctagttattgttgatgacttttcccgcttcacttgggtgttctttttgcaggataagtctgaaacccaagggaccctcaagcgcttcctcaggagagctcaaaatgagtttgagctcaaggtgaagaagataagaagcgacaacgggtccgagttcaagaaccttcaagtggaggagttccttgaggaggaaggaatcaagcatgagttctccgctccctacacaccacagcaaaatggtgtggtagagaggaagaacaggacgctaattgatatggcgaggactatgcttggagagttcaagacccccgagcgattttggtcggaagccgtgaacacggcttgccacgccatcaacagggtctaccttcaccgcctcctcaagaagacgtcgtatgagctactaaccggtaacaaacccaatgtatcatactttcgtgtatttgggagcaagtgctacattctagtaaagaagggtagaaattctaaatttgctcccaaagcagtagaagggtttttgttaggttatgactcaaatacaaaggcgtatagagtcttcaacaaatcatcaggtttggttgaagtctctagcgacgttgtatttgttgagactaatggctctccaagagagcaagttgttgattgtgatgatgtagatgaagaagatgttccgacggccgctatacgaactatggcgattggagaagttcatcaacaggaggcgtgtgatcaagggggagcacaagatgatcatgtgatggaggaagatgcgcaaccggcacctccaacccaagttcgagcgatgattcaaagggatcatcccgttgaccaaattctgggtgacattagcaagggagtaactactcgatctagattagttaatttttgtgagcattactcctttgtctcttctattgagcccttcagggtagaggaggccttgctagatccggactgggtgttggccatgcaggaggagctcaacaacttcaagtgcaatgaagtttggacactggtgcctcgtcccaagcaaaatgttgtgggaaccaagtgggtgttccgcgacaaacaggacgagcacggggtggtgacgagaaacaaggctcgacttgtggcaaaaggttatgcccaagtcgcaggtttggatttcgaggagacttttgctcctgtggctaggctagaatcaattcgtatcttgctagcatatgccgctcaccattctttcaggttgtaccaaatggatgtgaagagcgctttcctcaacgggccaatcaaggaggaggtgtacgtggagcaaccccctggcttcgaggatgaacggtactccgaccatgtgtgtaagctctctaaggcgctctatggacttaagcaagccccaagagcatggtatgaatgccttagagactttctaattgttaatgctttcaaggttgggaaagccgatccaactctttttactaagacttgcaatggtgatttgtttgtgtgccaaatttatgtcgatgacataatatttggttctactaaccaaaagtcctgtgaagagtttagcagggtgatgacgcagaaattcgagatgtcgatgatgggcgagttgaactacttccttgggttccaagtgaagcaactcaaggacggcactttcatctcccaaacgaagtacacgcaagacttgctaaagaggtttgggatgaaggacgccaagcccgcaaagacgccaatgggaaccgacggacacacagacctcaacaaaggaggtaagtccgttgatcaaaaagcataccggtccatgataggttctttgctttattcatgtgctagtagaccggatattatgcttagcgtatgcatgtgtgctagatttcaatccaatcctaaagagtgtcacttagtggcggtgaagcgaattcttagatatttagttgctacgccttgcttcgggctctggtatccaaaggggtctacctttgacttagttggatactcagactccgactatgctggatgtaaggtcgataggaagagtacatcggggacgtgccaattcttaggaaggtccctggtgtcatggaattctaagaaacaaacttccgttgccctatccaccgctgaggccgagtatgttgccgcaggacagtgttgcgcgcaactactttggatgaggcaaaccctccgggactttggctacaatctgagcaaagtcccactcctatgtgataatgagagtgctatccgcatggcggaaaatcctgttgaacacagccgcacaaagcacatagacatccggcatcactttttgagagaccaccagcaaaagggagatatcgaagtgtttcatgttagcaccgagaaccagctagccgatatctttaccaagcctctagatgagaagaccttttgcaggctgcgtagtgagctaaatgtcttagattcgcggaacttggattga

SEQ ID NO: 4546 - DNA, 1635 bp, Zea mays
  Clone ID: TF_ZmC4916_385
atggatcctaagggtaaggggatggtgattaatgacaaggagaaggagtccctcctaaatgagccaagagatgacaagcctaccgactcaggctcaagtcacaagaagagggaagggaagaagaagaggcacatcaagaaaatcatctactacgacagcgatgcctcttcatcttcaccaagagacgacgatgacgatgactcttcatcgaaaaagaaaacggttaatcaaaattattcatttgattattcccgtattccattcaattctaatgcttatttgctatcaattccacttgggaaaccttcacactttgatggagaagactactctttttggagtcacaaaatggatgaatacaacaaggtgagcggcttggacaacgccaagcaaatctgggataccctcaagatatctcatgagggaaacgacgccaccatgatcaccaaaatagagttggtggaaggcgagctagggagatttgcgatgatcaggggagaggagccaacgcaaagctacaacaggctcaagaccctggtcaacaagattaggagctatggaagcacaagatggatggactacgacgtcgtccgactcatgctcaggtcctttactataattgacccccatcttgtaaaccttattcgtgaaaatcccaggtacaccaaaatgacgcccgaggagattcttggaaaatttgtgagcaggcgcatgatggtgaaagaagcacgatacgtagacaacatgcttaatggtccactactcgtctacgagccacaactcgttgctctcaaagcaacaagcagcagggaggcgctaccaagcaaggtggcacaagttgaggctgccgggctaaacgaagatgagatggccctaatcatcaagcgcttcaagaccgcactgaaaggacgcaaggagtaccccaacaagaataaagcaaggggaaagcgctcctgtttcaaatgtggtaagactggtcatttcatagctcaatgccccgataatgataatgaccaggaacaagaaaagtatgggaagaaagagaagaagaagagctacaggaaggcaaagggcgaggcgcaccatggaaaagaatgggactcggactgctcctctttcgactccgacgacgaaggactcgctgcctcggccttcaacaagtcttctctcttccccaacgaacgccatacatgtcttatggcaaaggaaaagaaggatagattgttagaaaaacaagaggatattttatatgaggagcatgataaatttgttagtgtgcaaaaatctcttgctttagagattaaaaggaatgaaagtctatcatctgagttatctacttgccatgaaactatatctagtttaaagagtttaaatgatgaattaactactaagctagaaggagttaataaatctagttcttgtgaagagcatgttgttgtttgtgatagatgtaaggattttgatgttgatgcttgtgatgaacaccttatttctattacaaaattaaatgatgaagtggcaagtcttaatgctcaacttaagacttgcaaaattaattttgatcaattaaaatttgctagggaagcctacaccgttggtagacacccctcaattaaggatgggcttggtttttga

SEQ ID NO: 4547 - DNA, 4800 bp, Zea mays
  Clone ID: TF_ZM4449.C5.o7.fg
atggatcctaagggtaaggggatgatgattaatgacaaggagaaggagtccctcctaaatgagccaagagacgacaagcctaccgactcaggctcaagtcacaagaagagggatgggaagaagaagaagaggcgcatcgagaaaatcatctactacgataatgatgcctcttcattttcaccaagagacgacgatgacgacgactctttattgaaaaagaaaacggttaatcaaaattattcatttgattattctcgtattccattcaattctaatgctcatttgctatcaattccacttgggaaacctccacactttgatggagaagactactctttttggagtcacaaaatgcgtagtcacttattttctctccatcctagtatttgggaggttgttgaaaacgggatgcattttgatagtactgacaatcctgttttcataaatgagcaaattcataaaaatgcacaagttaccactgttttgctagcatctttgtgctgggatgaatacaacaatgtgagcggcttggacaacgccaagcaaatttgggacaccctcaagatctcacatgagggaaacgatgctacaatgatcaccaaaatggagttggtggaaggcgagttgggaagatttgccatgatcaggggagaagagccaacacaaacctacaacaggctcaagaccctggtcaacaagattaggagctatggaagcacaagatggacggaccacgacgtcgtccgactcatgctcaggtcctttactgtaattgacccccatcttgtagaccttattcgtgaaaatcctaggtacaccaaaatgacgcctgaggagatactcggaaaattcatgagcgggcgtatgatggtaaaggaggcgcgatacgtggatgatgctcttaatgcccctctacccgtctacgagcctcaacccgttgctctcaaagcaacaagcagcagggaggcgctaccaagcaaggtggcacaagttgaggctgccgggctaaacgaagatgagatggccctaatcatcaagcgcttcaagaccacactgaaaggacaagcaaggggaaagcgctcctgtttcaaatgcggtaagactggtcatttcatagcacaatgccccgataatgataatgatcaggaacaagaaaagtatggaaagaaagagaagaagaagaattacaagaaggcgaaggacgaggcacatcttggaaaggaatggaattctgactgctcttcatctgactccgatgatgaaggattggctgcctcggccttcgacaaatcttcgctcttccccaatgaacgccatacgtgccttatggctaaggaaaagaaggtatgtattcagaacactcacaagtatacttcttctagtgatgaagagtcatctgatgatgaagtagagtataccgatttatttaagggtttagatagagctaaagtagataaaatcaatgagttaattgatgctctaaatgaaaaaaatagattgctagaaaggcaagaggacattttgtatgaggaacatgaaaaatttgttagtgttcaaaagtcgcttgccttagaacttaaaagaaatgaaattctgtcttttgaattgtctgcctgtcaggaatatgtctctagtttaaagaatttaaatgatgaattaaatgttaagctagaggaggcaaatgcaactagatcttgtgtagaacatgtagctatttgcaacagatgcaaggacgttgatgttaatgcttgtgatgaacatcttattgctattacaaaattaaatgatgaggtggcaagtcttaatgctcaacttaagacttgcaaaattgattttgataagttaaaatttgctagggatgcttacacaattggtagacacccctctattaaggatggacttggttttcgaaagaaaaccaataacttaacaagccaaaagactctcgttctcaacaaggagaaagggaaggctcctatggctagtagttctcaaaagtgtcatgcctacacttatgttagaaaattttctaggactgctcataggagttatgatcatgatgtttttaatccacatgctatgtttgcctctagatctacttttgttcatggtagaagtaggcctaggagaaatcatgttgtgcatcatgtgcctaggaaagtttatgcatccgggggctcaagctggattatcgacaacggatgcacaaaccacatgacgggggagaagaagatgttcacctcctacgtcaagaacaaggattcccaggatacgattatttttggagatgggaaccaaggcaaggtcaaaggtttgggaaagatagccatcacaagcgagcactctatttcaaatgtatttttagtagagtcattagggtacaacctcctgtctgtaagtcaattgtgccacatgggctacaattgtttgtttacaaatgttgatgtatctgtctttagaaggagtgatggttcattagcatttaagggtgcattagacgacaaactctacttagttgatttttcgaaagaggaggccgatctagatgcatgcttaatagctaagactagtatgggctggctgtggcatcgccgtctagcacatgttgggatgaagaaccttcataaacttctaaagggagaacatgtgttaggactaaccaatgataaatcagaaacccaagggaccctcaagcgctttctaaagagggctcaaaacgaatgtgagctcaaggtgaaaaagataagaagcgacaacgggtccgagttcaagaatctacaagtggaggagtatcttaaggaggaaggtgtcaagcacgagttctccgctccctacacaccacaacaaaacagtgtgatagagaggaagaacaggacgtttatcgacatggcgaggacgatgcttggagaattcaagacgcccgagcggttttggtcggaagctgtgaacatagcttgccatgccataaaccggctctatctgcatcgccttctcaagaagacctcctacgaagtccttaccggtaacaaacccaacgtttcttactttcgtgtatttgggagcaaatgttacattctggtgaagaaaggtagacattctaaatttactcccaaggcagtagaagggtttttactagggtatgactcaaatacaaaggcgtatagagtcttcaacaaatcatcgggtttggttgaagtctctagcgacgttgtatttgatgagactaatgactctccaagagagcaagttgatcttgatgacatagatgaagatgatgttccgacgaccgcaatgcgcatgatggcgatagatggtgaacaggtacctcaaaaagagggacaggatcaagggggagcacatgaagaacaagtgatggaggaagaagcaccaagtgtccctccaactcaaatccgagcaacgatccaacgacatcaccccgttgaccagattctgggtgacataagcaagggagtaacgactcgctcaagattagctaatttttgtgagcattactcgtttgtctcttctattgagccttttagggtagaagaggccttgcaggatccggattgggtgttggccatgcaggaagagctcaacaccttcaagagaaatgaagtatggagcctggtgccacgtccaaagcaaaacattgtgggaaccaagtgggtgttccgtgacaagcaagacgagcacggggtggtgacaagaaacaaggctcgacttgtggcaaaaggttatgcccaagtcgcaggtttggattttgaggagacttttgctcctgtggctaggctagagtctattcgaatattattagcctatgccgctcaccactctttcaggttgtttcaaatggatgtgaagagcgctttcctcaacgggccaatcaaggaggaggtatacgtggaacaaccccctagctttgagggtgacaggtaccccgaccatgtgtttaaactctctaaggcgctctatggacttaagcaagccccgagagcatggtatgaatgccttagagatttcttaattgctaatgctttcaaggttgggaaagtcgatcccactcttttcactaagacttgtgatggtgatctttttgtgtgccaaatttatgtcaatgacataatatttggttctactaaccaaaagtcttgtgaggagtttagcagggtgatgactcaaaagtttgagatgtcgatgatggtgaagcaactcaaggacaacaccttcatctcccaaacgaagtacactcaagatcttctcaagcggtttgggatgaaggacgccaagcccgcaaagacaccgatgggaaccgacgggcatgtcgacctcaacaaaggagactcttatgctggatgcaaggttgataggaagagtacatcagggacgtgtcaattcctaggaaggtccctgatttcttggagttcaaagaaacaaacatctgttgccctatccaccgttgtgcccgagtatgttgccgcaggacagtgttgcacgcaactactttggatgagtcaaaccctccgggactttggctacaatctgagcaaagtcccactcctatgtgacaatgggagtgcaatccgcatggcggataatcctgctgaacacgaccgcactaagcacatagacattcgacatcactttctgagggaccaccagcaaaagggagatattgaggtgttccaaattagcaccgagaaccaactagccgatatctttaccaaaccgttggatgagaaaaccttttgtaggttgcgtagtgagctaaatgtcttagattcatgtaacttggattga

SEQ ID NO: 4548 - DNA, 765 bp, Zea mays
  Clone ID: TF_ZM4544.C5.o1.fg
atggcgcttatcatcaagcgcttcaagaccgcattgaaaggacgcaaggagtaccccaacaagaacaaagcaaggggaaagcgctcctgtttcaaatgcggtaagactggtcatttcatagcacaatgccccgataatgatgatgaccaggaacaagaaaagcatgggaagagggagaagaagaaggtttacaagaaggcgaagggcgaggcgcaccttggcaaagaatgggattcagactgctcttcatccgactccaacgatgaaggactggcagcctcagccttcaacaagtctttgctcttcccaaacgaacgccacacttgcctcatggccaaggagaagaaggataaaccagaaacccaagggaccctcaagcgctttctaaggagggctcaaaacgaatttgagctcaaggtgaaaaagataagaagcgacaacgggtccgaattcaagaacctacaagttgaggagtatcttgaggaggaaggtgtcaagcaagagttctccgctccctacacaccacaacaaaacggtgtgatgtgcgaccacaagaacaacaagagcaagatcaaccttcttcctcaacgatggtgcatcccccaactcaagatgatggacacgttcctcaagaggaggcgcgttatcaagggtgagcacaagaagaaaaagtcatggagaaagaagcaccactggcccctccaactcaagtccgagcgacaattcaaagagatcatcccgtcgatcagattctgggtgacataa

SEQ ID NO: 4549 - DNA, 555 bp, Zea mays
  Clone ID: TF_ZM4647.C3.o3.fg
atgacacccgaagagatcctcagaaaattcgtgagtgggcgcatgatggtaaaggaggctcgatacgtggacgatgcactcaacagtccactacccgtctatgaaccacagtccgttgctctcaaagcaaccagcagcagggaggcactaccaagacaggtggcacaagtggaagctaccgggctaaatgaagatgaaatggtgcttatcatcaagcgcttcaagatcgcacttaaaggacgcaaggagtaccccaacaagaataaaacaaagggaaagcgttcatgcttcaaatgcggtaagactggtcactttattgcccaatgtcccgataatgatcatgaccagggacaagaaaaaggcaggaagagggagaaaaagaaaaactacaggaaggcaaagggcgaggcgcaccttggaaaggaatgggattcggactgctcctcttccgactccgatgatgaaggattagctgcctcggcttttgacaaatcttcactcttccccaaagaacgccatacgtgtctcatggccaaggagaagaagtttaaatga

SEQ ID NO: 4550 - DNA, 1443 bp, Zea mays
  Clone ID: TF_ZM4840.C5.o1.fg
atggatcctaagggaaaggggatggtggtcaacgacaaggagaaggagtccttcctcaatgagcctagagacgacaagcctactgactcaggctcaagtcacaagaagagggatgggaagaagaggcgcatcaagaaaatcgtctactacgacagcgatgcctcttcatcttcaccaagagacgacgatgacgacgactcttcatcgaaaaagaaaatgcaaattcataagaatgcacaagctaccactgttttgctagcatctttgtgcagggatgaatacaacaaggtgagcggcttggacaacaccaaacaaatttgggataccctcaagatatcacacgagggaaacgacgccaccatgatcaccaagatggagttggtggaaggcgagctgggaaggttcgcgatgatcagaggagaggagccaacacaaacatacaacaggctcaagaccctggtcaacaaaattagaagctatggaagcacaagatggacggaccacgacgtcgttcgactaatgctaaggtcatttacggtacaccaagatgacgcacgaggagattcttgggaagtttgtgagcaggcgcatgatggtgaagaggctcgatatgtggacgatgctctaaacggtccactacctgtccatgagcctcaaaccattgccctcaaagcaaccagcaacagggagacgctaccaagcaaggtggcacaagtggaggccacgggcctcaacgaagatgagatggcacttatcatcaagagcttcaagaccgcactaaaaggacgcaaggagtaccccaacaagaataagacaaagggaaagcgctcctgtttcaaatgcggtaagactggtcatttcatagcacaatgccccgataatgatgatgaccaggaacaagaaaagcatgggaagagggagaagaaggtgtacaagaaggcgaagggtgaggcacaccttggcaaagaatgggattcagactgctcttcatccgactccaacgatgaaggactggcagcctcggccttcaacaagtcttcgctcttccccaacgaacgccacacttgcctcatggccaaggagaagaaggtaagcgttcgagatacctctaagtatactacttctagtgatgatgattctagtgatgatgaagtagattactctagcttattcaaaggtttagatagagctaaggtagaaaagatcaatgaattaattgatgctctaaatgaaaaggatagattgttagaaaaacaagaggatattttatatgaagagcatgataaatttgttagtgtgcagaaatctcttgctttagagattaaaaggaatgaaatgctatcctctgaattttctgtttgtcatgaatctgtctctagtttaaagattctgaatgatgatttaaatgttaagctagaggaagctaataaatctagttcatga

SEQ ID NO: 4551 - DNA, 1497 bp, Zea mays
  Clone ID: TF_ZM5106.C2.o12.fg
atggatcctaagggtaaggggatggtggtcaacgataaggagaaggagtccctcttcaacgagccaagagacgacaagcccactgactcaggctcgagtcacaagaagagggacgagaagaagaagagacgcatcaagaagatcatctactacgacagtgatgcatcatcttcttcaccaagggacgacaacaacgacgacgactcttcatcaaagaaaaagatgcatatgggaattgtagaaaatgggatgcattttgataacactgataatcctgtgattattaatgagcaaatccataaaaatgcccaagctactactgtgttgttagcatctctttgcagggacgagtataataaacaactagctaccggactcaatgaagatgaaatgacgcttatcatcaagcgcttcaaaaccgcgcttggacgcaaagagtaccccaacaagaacaaaacaaggggaaagcgctcctgcttcaagtgcggtaagactggtcatttcattgcacaatgccctgataatgataatgaccagggagaagaaaagagcgggaagagggaaaagaagaagaactacaggaaggcgaagggcgaggcacaacttggaaaggggtgggattctgactgctcctcatctgactccgacgatgaaggattggctgcctcggccttcaacaagtcttcgctcttccccaacgaacaccacacttgcctcatggccaaggagaagaaggtacatattcgagattcccctaagtactcttcttctagtgatgaggaatcctccgatgatgaagtagattactctagtttatttaaaggtttagatagagtcaaagcagatgaaattaatgaattaattgatgctctaaatgaaaaagatagactgctagaaaagcaagaggacattttgtatgaggaacatgacaaatttgttagtgtacaaaaatatcttgctttagaaactaagaaaaatgaaatgctatcttctgagttatcttcttgccatgaatctatatctagtttaaagaatttaaatgatgaattaaatgctaagctagaggaagttagtaaaacaagttcatgtgtagagcatgttagtatttgtaatagatgtaaggactatgatgttgatgcctgtgatgaacatcttatttctattacaagattaaatgatgaggtgtcaagtcttaatgctcaacttaagacttgcaaaattgattttgataaattaaaatttgctagggatgcctacactattgctctacttttgtttatggtagaagtaggcctaggagaaatcatgttgtgcctcatgtgcctaggagaatgtgcaatgaacctactactgtttttcattcttgcaacacttcttttgtactttcatgtttatgcatccgtgggctctagctggataatcggcagcgtatgcacaaaccacatggcgggggagaagaagatgttcacctcctacgtcaagaacaaggattcctag

SEQ ID NO: 4552 - DNA, 4534 bp, Zea mays
  Clone ID: TF_ZmC24260_9
atgaagatgaagaggggtcaacctagaagaggccatacatcaagaagacatgctttcaatgatagaaaatgttttgagtgtggggaacccggtcacatcgccatgaattgccctaacaagaataagaatggcacagatggagatgataagaagaagaataaattctacaacaggaagaaagatggcagagcctacctagttgaatgggatttggataatagctcggatgatgatgatgatgacacctcatccaaacttaatgccggaatggccatcaatgaagccccttcacttttctcatcccctcattgtctcatggcaaagggagatgctaagaatgttgggtgaggccgatgactacatgcacaaagaaaaagaaaaatttaagaccttgaaggaattgtataaaaacctccaagtgtcttttgaggagctcaagacctctcacaatgacctaaaagaaaattgtgagaagcttgtggatgctcaaaaatcgtctattgtgcatgaagttatggtggtcactaaggatgttggagtcacttgtgacttacttgatagtcttacaagtgaaccactacctactaactctatttgtgataaatgcaaaatttctctcaatgataatattgctcttgatgaatcaaaaattgttgttgagaataaagtgttagtagatagagtaaatactctaactcatgacctagaaaaggcatatggtggaaaggctaaattggatttcatattgggaagtcaacggtgctcacttaaccgtgaaggtcttggatatgttcccaagaaaggaaataatgcttttataaagcaaaatacattgtttgtgaaagaatgtgacaaagtgtgtcacaagtgtcacaagaagggacatgttaagaaaaattgtcctaagctcaaaaatgtatcctccacttgttttgagcattgttatgttctttctcataatgcaaaaggtgttcatgctaaatttattggtacttcaattgttggaaacaaaaagaaagctatttgggtgccaaagaccttggtcactaacatccaaggacccaagcaagtttgggtgaactacaaggcgggagggaatcattgggtgttagatagtggatgcactcaacacatgaccagagatatgaaaatgttcacccaaatgagtgaggaagattgctcaaattatgatagtatcacgtttggagataatcgcaaaggaaaggttaaaggtttgggtaaaattgctatttcaaatgatcattccatatcaaatgtgctcttggttgagtctttaaattttaatttactttccgtagctcaattatgtgatttgggatttaattgcaatttcacggttgaagatgttattatctctagtgttgatggtagcaatcttaagtttaaaggttttagacatgaaaatctttatcttgttgatttctcatctaatgaggcaaagctcacaacttgcttattctcgaaagcttcactagacaaatctaatgtgtttgaaacattcaagtcatttgctatattggctcaaaatcaatttgatttcgacataaaaaatgttagaagtgataatgggtcggaattcaaaatgcaagaattgatgaatattgtgatgacaagggtattaaacatgaattctcttccaaatataccccagaacaaaatggtattgttgaaagaaagaatagaactctcattgatggctaggtctatgttagcggaatataatatatcggattcttattgggccgaggcaataaatactgcttgtcattcatcaaatagactatattatcacaagcttttgaagaaaactccatatgaattgctcattggtagaaagccaaatatctcatattttagggtattcggttgcaaatgttatattttgagaaagggaagccggctttctaaatttgagaagaaatgtgatgagggttttcttcttgaatattcatcaaatagtaaagcttatagagtcttcaacaaaactcatggtattattgaagaagcatatgatgttgaattcgataaaacaaatgggtctcaagatgagagtgataatcttgatgatgttggtggaactcaattgataaatgcaatgaaaacaatggccattggtgaaataaagccaaaggaagatgatgatgaaaatagtgtggttgtcattccttcatcttcaactctaaatgaggaagatcaccaaagccaacaacatgatgaaactatggatactcatgatcaaggtacttcaagacattcggttcctcctaatgcttcaactagcaattatcaaaccgtatcaagaattcatcattctattgtgaaggatcgcccggttgatcaaattgttggtgatattagtaagggtgttcaaactcgctctcgcatagcttcattttgtgaacatttctcttttgtatcttgtatggaacctaaccgtgtagatgaagctctacttgatgttgattgggtgaatgcaatgcatgaagaattaactaacttcgctcgaaatgaagtttgggagcttgttgagagaccaaagaaccacaatgttattggtacgaaatgggtgtttcacaacaagcacaatgaagatggtgtggtagtaagaaacaaggcaagattagttgcacaaggatatactcaaattgagggattggattttggggagacatttgctcccgtggcaagattagaagcaatccggattcttcttgcttatgcttctgcacataatatcaagctctaccaaatggatgtaaagagtgcttttctaaatggtaagattagtgaactagtgtatgttgaacaacctcccggttttgaggaccccaaaagacctaaccatgtgttcaagctttctaaagctctctatgggcttaagcaagctccacgcgcttggtatgaaaggcttagggatttcttgctttccaaagacttcaaaattgggaaggttgacactactctattcactaaaagaattgggaaacacttatttgtttgtcaaatctatgttgatgatattatttttggatctactaatgaattattttgtgaggaattcggaaaaatgatgtcaaaagaatttgaaatgtctatgataggagaatttagcttcttccttggccttcaaatcaaacaattgaaagatggaatttttataagtcaatcaaaatatttgaaggacatgctcaagaagtttggtttagaaaatgcaaagcctaccaagactccaatggaaacaaatggtcatctagacttagatgaaggaggtcgctttaaatcaaagcgccctcatggagatgatgctgattatacaccaaccactgattcagaggcccaatcctcagctgggggcactgaatctatggatactgaagactttcctcatatccatcccgactatcccattgacaccacaggatggacatatccaaagcggaggttttctatggctgagtactactcaaggcggactgtgaaccaatacactctgccatctgacaccaatgttcaatttttccacactcagctgcagtttgatgttttttggggcaccttggtggatacaaattttcataaacatcaagtgattgattggtctttcatgctaggacaatcagtcatggaggatctgatccctaagtttgagacgtgtggactgtatcagtttatgtggcaacgaacagacttcagtgaaatggctgtcaagcaattcctggccacctcagagattgatatagaagaagaatccatcacttggatgactggattcaagcgatattctgcatcttttgctgactttgccactgccaacagtctggattatggcaccatttcagctgagctggatctctatactgaggataattttgaggattttgtgcaattctatgagccagcaaggctaggaatacccaggaggtttggagagacagcaggactcaggcatcatcctgctgtaatcaataagattgtcagagtcactattcttcccaagagtggtgttaagagcaaaataagagacaaattctggaacattatccagcacatcatgaatggtgaggtcatgaatattgttcttttcatgatgagacagctcaatgatttgaaaatggataagattcagaatttagcatatgctccttatattatggctctcatcaaagccaagacaagatttgaggggccctgtgagattgttcacacaccgtttagaccctttaagaatgagatagggtttctcaccaggccactcactcccttcccagatgatgaggaagaccctggctataatgcaggagcagctcctgatgttgaggccgagcagatgcctcctcctccacctcctcctcagcctcagcagtattggcagcctggtccaggctactttgatccctattttcacaatatgcagcaggggcttcagacccatattgatactcgctttgagggcatgatgacacatgtggatcaccgcctcgatgacatgcaatctcgctttgacagtaactag

SEQ ID NO: 4553 - DNA, 2073 bp, Zea mays
  Clone ID: TF_ZmC4916_422
atggatcctaagggaaaggggatggtggtcaacgacaaagagaaggactccatcttcaacgagccaagagatgacaagcccactgactcaggctcgagtcacaagaagaaggacaggaagaagaagaggcgcatcaagaagatcatctactacgacagtgatgcctcctcttcttcaccaagagatgacgacgacgacaacgactcgtcgccgaaaaagaaaatggttaatcaaaattattcttttgattactcttgcattccctacaactcaaatgctcatttgctttctattcctcttggaaaacccccacactttgatggagaggattactcattttggagccataaaatgcgtagtcatctgttttctctccatcctagtatctgggaaattgtggaaaatgggatgcattttgatagtacagataatcttatattcattaatgaacaaattcataagaatgcccaagctactactgtcttgttagcttcgctttgcaggaacgaatacaataaagtaagtggcttggacaacaccaagcaaatctgggacaccctcaagatctcacatgagggaaatgatgctacaatgatcaccaaaatggaactggtggaaggcgagctctggagatttgccatgatcaggggagaagagccaacacaaacctacaacaggctcaagaccctggtcaacaagattagaagctatggaagcacaagatggacagaccgcgacgtcgtccgactcatgctcaggtcctttacagttattgacccccatcttgtgaatcttatccatgaaaaccccaggtacacaaagatgacgcctgaggagatactcagaaaatttgtaagcgggcgcatgatggttaaggaggcaaggtatgtagatgacgccttaaacggcccactgcccgtctacgagccacaacccattgcgctcaaggcaacaagcagcaaggaggcgctaccaagcaaggtagcacaattggaggctgccgggctcaacgagaatgaaatggcgcttatcatcaagcgcttcaagaccgcacttaaaggacgcaaggagtaccccaacaagaacaaaacaaggggaaagcgctcctgcttcaaatgcggtaagactggtcactttattgcaaattgtcccgataatgagagtgaccagggacaagaaaagagcgggaaggagaaaaagaagaactataggaaggctaagggcgaggcgcacttgggaaaggaatgggacttggactgctcctcttccgactccgacgacgaaggactcacttcctcggccttcaacaagtcttctctcttccccaacgaacgccatacatgtcttatggccaaggaaaagaaggtacatgttcgagatacccctaagtacactacttctagcgatgatgattcttccgatgatgacgtagattactctagtttatttaaaggtttagatagagctaaagtagagaaaattaatgaattaattgatgctctaaatgaaaaagatagattgctagaaaggcaagaagatattttatatgaggaacatgacaaatttgttagtgtgcaaaaatcccttgccttagaaactaagagaaatgaaatgttatcttctgaattgtctatttgccatgaatcggtctctagtttaaatagtttaaatgatgaactaaatgctaggctagaggaagtcaacaaaactagttcatgtgtagagcatgttgtgatttgtaatagatgtaaaaattttgatgttgatgcttgtgatgaacaccttgcttctattactaaattaaataatgaggtggcaagtctgaatgctcaacttaagacttgcaaggttgattacgacaaactaaaatttgctagggatgcctacactgttggtagacacccttcaattaaggatggacttggttttcgaaaggaaaccaagaacttaacaagccaaaggactcctgttctcaacaaggagaaagggaaggcccctatggcaagtagtcctcaaaggaaccatgcttttattatgataggaaaattgctagtcgttctcattacaataaga

SEQ ID NO: 4554 - DNA, 1821 bp, Zea mays
  Clone ID: TF_ZM4132.C6.o2.fg
atggatcctaagggaaaggggatggtggtcaacgacaagacaaaggagtccatcgtcaacgagccaagagatgataagccttcggactctggctcgagtcataagaaaagagacgggaataagaagaggcgcatcaagaagatcgtctactacgacagcgacgagtcctcttcttccccaagagacgacgacgacgagaaaaagaaaccggttaattcaaacttttcttttgattattctcgtattccggttaactccaatgctcatttactttcaattccacttgggaaacctccgaactttgatggagaagactactcattttggagtcacaaaatgcgaagtcacctattctctcttcatccaagtatttgggagattgttgaaaatggaatgctttttgatagtactgataaccccgttttaattaatgagcaaatccataaaaatgcacaagctaccactgttttgctagcatccttgtgcatggacgagtaccacaaggtgagcggcttggataacgccaagcaaatttgggataccctcaagatctctcatgaggggaacgacgccaccatgatcaccaagatggagttggtggaaggcgaactgggaaggttcgcaatgatcaggggggaggagccaacccaaacgtacaacaggctcaagaccctggtcaacaagatcaggagctatggaagcacgagatggatggaccacgacgtcatccgacttatgctcaggtccttcagcgtccttgatcctcatcttgtgaactcgattcgtgaaaatcctaagtacacgaagatgacgcctgaggaaatacttggaaagtttgtaagcgggcgtatgatgatcaaggaagcaagatacgttgatgaggcattgaatggcccaatgcccatctacgagcctcaaactgttgctctcaaagcaacaagcagccgggaggcactacctagcaaggtggcgcaagttgaagcggtcgggctaaatgaggacgaaatgaccctcattatcaagcgcttcaagacaacgctaaaaggacgaaaggagcatcccaacaagagcaaagcaaagggaaagcgctcctgttttaaatgtggtaagactggtcatttcatagcaaattgtcccgataatacaaatgaccaggaacaagaaaggaatgggaagagggagaaaaagaagacctacaagaagatgaagggcgaggcgcaccttggcaaagagtgggactcggattgttcttcgtccgactccgacgacgaaggactcgccgcctcggccttcaacaagtcgttgctcttccccaacgagcgccatacttgcctaatggcaaaggagaagaaggtaaacgctcgagaaactcctaagtactctacttctagtgatgaggactctagtgatgatgaagtagattacactagcttgttcaaaggattagatagagctaaagtggaaaagattaatgagttgattgatgcattgaatgaaaaagatagactgctagagaggcaagaggacattttgtatgaggaacataacaaatttattagtgttcaaaagtctcttgccttagagattaaaaggaatgaattactatcttctaagttatctatttgcaatgaatctatttctagcttgaagattttgagtgatgatttaaatgctaatctagaagtcgttaataaatctagtccttgtgtagagcacgttgtgatttgtaataggtgtaaggatttcaatatagatgcatgtgttgagcaccttactgaaagggaaatgtgcccttgggctatttctaatatattttggtga

SEQ ID NO: 4555 - DNA, 1224 bp, Zea mays
  Clone ID: TF_ZM4133.C5.o1.fg
atgacgcttataatcaagcgcttcaagaccgcgcttaaaggacacagggagtaccccaacaagaacaaaacaaggggaaagcgctcctgctttaaatgcggtaagactggtcactttattgcaaattgtcccgataatgatagtgaccagggacaagaaaagagcaggaagaaggagaaaaagaagaactacaggaaggcaaagggtgaggcgcaccttggaaaggaatgggactcagactgctcctcttccgactctgacgacgaaggacttgctgcctcagccttcaacaaatcctcactcttccccaacgagcgtcatacatgccttatggccaaggagaaaaaggtttatgcatccgggggctcaagctggattatcgacagcggatgcacaaaccacatgacggaggagaagaagatgttcacctcctatgtcaaaaacaaggattcccaggatacgatcatctttggagatgggaaccaaggaaaggtcaaaggcttgggcaagatagccatcaccaacgagcactccatatcgaatgtatttctagtagagtcgcttggttacaaccttctgtctgataaatcagaaacccaagggaccctaaagcgcttcctaaggagggctcaaaacgaatttgagctgaaggtgaaaaagataaggagcgacaatgggtccgagttcaagaatctgcaagttgaggagtatcttgaggaggaaggagtcaagcacgagttctccgctccctacacaccacagcaaaacggtgtggtagagaggaagaacaggatgcttatcgacatggcgagaacgatgcttggagagttcaacacgcccgagcggttttggtcggaagttgtgaacacagcttgccacgctataaaccggctctatctgcatcgccttctcaagaagacctcctacaaactcctgaccggtaacaaacccaacgtctcctactttcgtgtatttgggagcaaatattacattctggtgaagaaaggtagacattctaaatttgctcccaaggtagtagaagggtttttactaggggtagaagaggccttgcaggatctggactgggtgttggccatgcaggaagagctcaacaacttcaagagaaatgaagtttggagcctggtgccacgtccaaagcaaaatgttgtgggaaccaagtgggtgttccgcaacaagcaagacaagcacggggtggtgacatga

SEQ ID NO: 4556 - DNA, 4290 bp, Zea mays
  Clone ID: TF_ZM4325.C1.o25.fg
atggatcctaagggaatggggatggtggtcaacgacaagacaaaggagtccatcgtcaacgagccaagagatgataagccttcggactctggctcgagtcataagaagaaggacaggaagaagaagaggcgcatcaagaagatcgtctactacgacagcgacgagtcttcttcttccccaagagacgacaaatacgaagagaaaaagaaaacagtcaactcaaacttttcttttgattattctcgtattccattcaattctaatgctcatttactttcaattccactcgggaaacctctgcactttgatggagaagactacccattttggagtcacaaaatgcgtagtcacctattctctctccatccaagcattttggagattgttgaaaacggaatgctttttgatagtactgacaaccccgttttcattaatgagcaaatccataagaatgcacaagctacctctattttgttagcatccttgtgcagggacgagtacaataaggtgagcggcttggacaacgccaagcaaatctgggacaccctcaaaatctctcatgaggggaacgacgccaccatgatcaccaagatagagttggtggaaggtgaactagggaggttcgcaatgatcaggggagaggagccaacgcaaacgtacaattggctcaagaccctggtcaacaaaatcagaagctatggaagcacgagatggaccgatcacgacgtcgtccggcttatgctcaggttcttcactgttctcaatcctcatcttatgaattcaatttgtgagaatccctggtacacaaggattacgcccgaggaaatactcggaaagtttgtaagcgggcatatgatgatcaaggaggcaagatacgttgatgaggcattgaatggcccaatgcctatctatgagcctcaacccgttgctctcaaagcaacaagcagcagggaggcgctacctagcaaggtggcacaagtagaggcagccgggctaaacgaggatgaaatggccctcatcatcaagcgcttcaagacggcgctaaaaggtcgcaaggagcatcccaataagagcaagacgaagggaaagcgctcctgcttcaagtgtggtaagactggtcactttattgctaactgtcccgataatgatagtaaccagggacaagaaaagagcgggaagagggagaaaaagaaatcctacaagaaggcgaagggcgaggcgcaccttggcaaggagtgggattcggattgctcttcgtccaactccaacgacgaaggactcaccgcctcggccttcaacaagtcgtccctcttccccagcgagtgtcacacctgcctcatggcaaaggagaggaaggtaagcgctcgaaataactctatgtatgattcttctagcgatgaagagtctagtgatgatgaagtagactattctagcttgtttaaaggtctagatagagccaaggtagaaaagatcaatgaattgattgatgcattaaatgaaaagaataaactcctagaaaagcaagaggatttattgtatgaagaacatgataagtttattagagtacaaaaatctcttgttttggcaactaaaagaaatgagattctatcttctgaaatttctgcttgccatgaatctatttctagtttgaggagtgttaatgatgatttaattgctaagttagaggtagctaacaaatctagttcaagtgtagaacgtgttgtaatttgtaataggtgcaagaattttgatgttaatgcttgtaatgaacatcttgcatccattactaaactaaatggtgaagtggctagtcttaatgcccaacttaagactagcaaaaatgattttgacaaactaaaatttgcaagggatgcctacactgttggtagacacccctctattaaggatgggcttggctttcgaagggaagccaagaacttaacaagtcaaagggctcccatctccgctaaggagaaagggaaggcccctatgactagtaatgctcaaaggaatcatgcttttatctatagtgataggaaattttctagaaatgctcataggagttatgcttatgattcacatgctatgattgcttcaagttcttcttttgtgcatggtagaaataggcctaggaaaaatgttgttcatgtgcctaggaaagtttatgcatccgggggctcaagctggattatcgacagcggatgcacaaaccacatgacgggggagaagaagatgttcacctcctatgtcaagaataaggattcccaagatacaataatatttggagatgggaatcaaggcaaggtcaaaggcttaggcaagatagctatcactaatgagcactttatatctaatgtatttctagtagagtcgctaggatataatctgttgtctattagtcaattatgccacatgggttataattgtctatttacaaatgtagatgtgtctgtgtttagaaggagtgatggttcactagcttttaagggtgtactagatgacaaactctatttagtggatttttcgaaagaggaggccgatctagatgcatgcttaattgctaagactagcatgggctggctgtggcatcaccgtctagcacatgttgggatgaagaaccttcacagacttctaaagggagaacatgtgttaggtctaacaaatgtgtttttcgaaaaagatagaccttgtgcagcttgtcaagtaggcaaacaggtgggaagcgctcatcacagcaagaatgtgatgaccacatcaagacctttggagctacttcacatggacctcttcggacccgtcgcctacctcagcttagggggaagtaagtatgatcttgttgttgttgatgatttttcccacttcacttgggtattctttttgcaggataaatcagaaacccaagggaccctcaagcgctttctaaggcgagctcaaaacgaatttgagctcaaggtgaaaaagattagaagcgacaacaggtccgagttcaagaacctgcaagtggaggagttctttgaggaggaaggaattaagcacaagttctccgctccctacacaccacagcaaaatggtgtggtagagaggaagaacagaacacttatagacatggcaaggacgattcttggagaattcaagatgcccgagcgatttaggtcagaagctgtgaacacagcttgccacgccataaaccaggcctaccttcatcgcctcctcaagaagacgtcgtatgaactcctaaccggtaacaaacccaatgtttcatgttttcgtgtatttgggagtaaatgttacattctagtgaagaaaggtaggaattcaaaatttgctcccaaagctgtagaagggtttttgttaggttatgactcaaatacaaaggcgtatagagtcttcaacaaatcatcgggtttggttgaagtctctagcgacgttgtatttgatgaaactaatggctctccaagagagcaagttgatcttgataatatagatgaatacgatgttccaacggacgcaattcgcaccatggcgattggagatgtttctcaaaagaaggcgtgtgatcaagggggagcacaagaagatcaagttatggaggaagaagcaccacggccccctccaactcaagttcgagcgacgattcaaaggaatcatcccgtcgaccagatattgtgtgatataagcaagggagtaaccactcgctctagattagctaatttttgtgagcattactcttttgtctcttctattgagcctttcagggtagaagaggccttgctagatcccgactgggtgctggccatgcaggaagagctcaacaacttcaagcgaaacgaagtttggacactggtgccatgtcccaagcaaaacattgtgggaaccaagtgggtgttccgcaacaagcaagacgagcacggggtggtgacacgaaacaaggctcgacttgtggcaaaaggttatgcccaagtcacaggtttggatttcgaggagacttttgctcctgtggctaggctagagtcgattcgcattttgttagcctatgccgctcagcattctttcaggttgttccaaatggacgtgaagagcgcttttctcaacgggccaatcaaggaggaggtgtacgtggagcaacccctggctttgaggatgaacggtaccccgaccacgtgtgttgggaaagctgatccaactcttttcactaagacttgtgatggtgatctatttgtgtgccaaatttatgtcgatgacataatatttgcccttcctttcatcacatgcaaaagcatatggtcttga

SEQ ID NO: 4557 - DNA, 3693 bp, Zea mays
  Clone ID: TF_ZM4335.C2.o1.fg
atggtggtcaacgacaaggaggagtccctcttcaacgaggcaagagacggcaagcccaatgactcaggatcgagtcacaagaagagggacgggaagaagaagaggcgcatcaagaagatcatttactacgacagcgatgcctcctcttcttcaccaagagacgacaatgacgatgactcttcgtctaaaaagagaacggttaatcaaaactactcttttgactactctcgcatgccgtacaattcaaatgcacatctactttcaattccccttggaaaacctccacactttgatggagaggactattcgttttggagtcataaaatgcgtagtcatttattctctctccatcctagcatttgggaaattatagagaatgggatggatgaatataataaggtgagcggcttagacaacgccaagcaaatctgggacaccctcaagatatctcatgagggaaacgacgccaccatgatcaccaaaatggagctggtggaaggcgagatggggagattcacgatgattaggggagaggagccaactcagacttacaacaggctcaagactctgaatcctaggtacactaaaatgacgcccgaggagattcttggaaaatttgtgagcgggcgcatgatggtgaaggaggctcgatacgtggacaatgctctaaacggtccactacccgtctacgagcctaaacctgttgctcttaaggcaaccagtagcagggaggcgcttccaagcaaggatgagatgacgcttataatcaagcgcttcaagaccgcgcttaaaggacacagggagtaccccaacaagaacaaaacaaggggaaagcgctcctgctttaaatgcggtaagactggtcactttattgcaaattgtcccgataatgatagtgaccagggacaagaaaagagcaggaagaaggagaaaaagaagaactacaggaaggcaaagggtgaggcgcaccttggaaaggaatgggactcagactgctcctcttccgactctgacgacgaaggacttgctgcctcagccttcaacaaatcctcactcttccccaacgagcgtcatacatgccttatggccaaggagaaaaaggtacgtgttcgggacacacccaagtacacttcatctagtgatgaagaatcctccgataatgaagtagattactctagtttatttaaaggtttagatagagccaaagtagagaaaattaacgaattaattgatgctctaaatgaaaaagatacattgctagagaagcaagaagatattttgtatgaagagcatgacaaatttattagtgttcaaaaatctcttgctctagaaattaaaagaaatgaaatgctatcctctgagttgtctgcttgccatgaatctgtctctagtttaaggagtttaaatgatgatttaaatgctaagctagaggaagttaataaatctacttcatgtgtagagcatgttgttatttgtaatagatgtaaggattttgatgttgatgccagtaatgaacatattgtttctattacaaaattaagtaatgaggtttatgcatccgggggctcaagctggattatcgacagcggatgcacaaaccacatgacggaggagaagaagatgttcacctcctatgtcaaaaacaaggattcccaggatacgatcatctttggagatgggaaccaaggaaaggtcaaaggcttgggcaagatagccatcaccaacgagcactccatatcgaatgtatttctagtagagtcgcttggttacaaccttctgtctgtaagtcaattgtgtcacatgggttacaattgtctttttacaaacgttgatgtatctgtctttagaaggagtgatggttcattagcttttaagggtgtattagatggcaaactctacttagttgatttttcgaaagaggaggccgatctagatgcatgcttaatagctaagactagtatgggctggttgtggcatcgccgtctagcacatgttgggatgaagaaccttcataaacttctaaagggagaacatgtgttaggactaaccaatgtttgtttcgagaaagataggccttgtgcagcatgtcaggcagggaaacaggtgggaagcactcatcatagcaagaatgtgatgacaacatcaagaccactggagcttcttcacatggacctcttcggacccgttgcctaccttagcatcgggggaagtaagtatggtcttgtaattgttgatgatttttcctgcttcacttgggtgttctttttacaggataaatcagaaacccaagggaccctaaagcgcttcctaaggagggctcaaaacgaatttgagctgaaggtgaaaaagataaggagcgacaatgggtccgagttcaagaatctgcaagttgaggagtatcttgaggaggaaggagtcaagcacgagttctccgctccctacacaccacagcaaaacggtgtggtagagaggaagaacaggatgcttatcgacatggcgagaacgatgcttggagagttcaacacgcccgagcggttttggtcggaagttgtgaacacagcttgccacgctataaaccggctctatctgcatcgccttctcaagaagacctcctacaaactcctgaccggtaacaaacccaacgtctcctactttcgtgtatttgggagcaaatattacattctggtgaagaaaggtagacattctaaatttgctcccaaggtagtagaagggtttttactagggtatgacttaaatacaaaggcgtatagagtcttcaacaaatcatcgggtctggttgaagtttctagcgacgttgtatttgatgatactaatggctctccaagagagcaagttgatcttgatgacatagatgaagatgatgttccaacggctgcaatgcgcacaatggcgataggtgatgtgcgaccacaggaacaacaggagcaagatcaaccatcttcctctacaatggtgagtcccccaactcaagatgatggacaggttcctcaagaagaggctcgacttgtggcaaaaggttatgcccaagtcgcaggtttggatttcgaggagacctttgctcctgtggctaggctagagtctattcgaattctattggcctatgccgctcaccactctttcaggctatttcaaatggatgtgaagagcgctttcctcaatgggccaataaaggaggaggtatacgtggaacaaccccctggctttgaggatgtcagggtgatgacacaaaagttcgagatgtcgatgatgggcgagttgacctacttccttgggttccaatacacacaagatcttctcaagcggtttgggatgaaggacgccaagcccgcgaagactccaatgggaactgacgggcatgttgacctcaacaaaggagtttctacgccttgtttcgggatctggtatctaaaggggtctacctttgacttgattggatactcagactctgattatgccgggtgcatggttgataggaagagcacatcagggacgtgccaatttctaggaaggtccctggtgtcctggagttctaagaatcaaacatccgttgccctatccaccgctgaggccgagtatgttgccacaaggacagtgttgcgcgcaactactttggatgaggcaaaccctctaggactttggctacaatctgagcaaagtcccactcctatgtga

SEQ ID NO: 4558 - DNA, 1281 bp, Zea mays
  Clone ID: TF_ZM4509.C2.o1.fg
atggatattaagggaaatgggatggtggtcaacgataaggagaaggagtccatcttcaacgagccaagagataacaagcccactgactctggcttgagtcacaagaagaaggatgggaagaagaagaggcgcatcaagaagatcgtctactacgacagcgacgaatcttcctcttcaccaagagacaacgacgagaaaaggaaaccggagatagttgaaaatggaatgcaatttgatagtacggataaccctgtgtttattaacgagcaaattcataaaaatgcacaagctaccactgttttgctagcatccttgtgcagggacgagtacaacaaggtgagcggcttggacaatgccaagcaaatctgggacaccctcaaaatatcacatgagggaaacgacgccaccatgatcaccaaaatggagttggtggaaggtgagctgggaaggttcgctatgatcaggggagagaagccaacacagacgtacaacaggctcaagaccctggtcaacaagatcaggagctatgggagcacgagatggacggaccacaacgtcgtccgacttatgctcaggtcttttactgttattgaccctcatcttgtgaacctcatccatgaaaatcccaggtacacaaaaatgacgcccgaagagatactcggaaaatttgtgagcgggcgcatgatggtcaaggaggcgaggtatgttgatgatgcattaaacggccccatgcccatctacgagccgcaacccgttgcactcaaggcaacaagcagcaaggaggcgctaccaagcaaggtagcacaagtagaggctctcgggctcaatgagagtgaaatggtgcttatcatcaagtgtttcaagaccgctcttaaaggacgcaaggagtaccccaacaagaacaagacaaggggaaagcgctcctgcttcaaatgcggtaagactggtcactttattgcaaactgtcccgataatgatagtgaccagggacaagaaaatagcgggaagagggagaagaaggcctacaagaaggcaaagggcgaggcgcatcttgggaaagaatgggattcagactgctcttcctccgactccgatgacgaaggacttgctgcctcagccttcaacaagtcctctctcttccccaacgaacgccatacctgcctcatggcaaaggagaaaaaggatagacttttagaaaagcaagaggatattttgtatgaagaacatgataagtttgttagtgtgcaaaaatctcttgctttagagcttaaagagtattaa

SEQ ID NO: 4559 - DNA, 1770 bp, Zea mays
  Clone ID: TF_ZM4576.C1.o19.fg
atggatcctaagggaaaggggatggtggtcaatgataaggagaaggagtccatcttcaacgagccgagggatgacaagcccactgactctggctcaagtcataagaagaaggacgggaagaagaagaggcgtatcaagaagatcgtctactacgatagcgacgagtcttcttcttccccaagagacgacgactacgacgagaaaaagaaatcggttaactcaaatttttcatttgattattcttgtattccatataattccaatgcccatttgctttctattcctcttggtaaacctccacactttgatggagaggactacgctttttggagtcacaaaatgtgtagtcaccttttctctctccatcctagtatttgggagatagttgagaatggaatacaatttgatagtacggataaccctgtattcattaacgaacaaattcataagaatgcacaagctaccactattttgttagcatcattgtgcagggatgaatacaacaaggtgagcggcttggacaacaccaagcaaatatgggacaccctaaaaatatcgcatgaagggaacgacgccaccatgatcaccaaaatggagttggtggaaggagagctaggaaggtttgccatgatcaggggagaggagccgacacaaacgtacaacagactcaagaccctggtcaacaagatcaggagctatggaagcacgagatggacggaccacgacatcatccgacttatgctcaggtctttcactgttattgaccctcatcttgtgaacctcatacgtgaaaatcccaggtacacaaagatgacgcccgaggagatactcggaaagtttgttagcgggcgtatgatggtcaaggaagcacgatatgttgatgatgcattgaacggccccatgcccgtctacgagcctcaacccgttgctctcaaagcaacaagtagcagggaggcgctacctagcaaggtggcacaagttgaggctgccgggctaaatgaagatgaaatggccctcatcatcaagcgcttcaagacggcgctaaaaggacgcaaggagcatcccaacaagagcaaagcaaagggaaagcgatcctgttttaaatgtggtaagactggtcatttcatagcaaattgtcccgataatgctaatgaccaggaacaagaaaagaacgagaagagggaaaagaagaaggcctacaagaaggcgaagggcgaggcgcaccttggcaaagagtgggattcagattgctcttcgtccgactccgacgacgaaggactcaccgcctcggccttcaacaagtcatctctcttccccaacgagcgccacacctgcctcatggcaaaggagaaaaagaatagacttttagaaagcaagaggatattttatatgaagagcatgataaggttgtgtaaggattttgatgttgatgcatgtgttgagcaccttacttctattacaaaattaaatggtgaagtgacaagtcttaatgcccaacttaagacttgcaaaaatgactttgataagttaaaatttgctagggatgcctacaccgttggtagacatccctcaattaaggatggacatgggtttcgaaaggaagtcaagaacctaacaagccaaagggctcccattcccaacaaggagaaagggaaggcccctatggctagtagtaatcaaaagaatcatgctttcatgtataatgatagaaaatttctagaagttctcattataataggagttataatgcttttgattcacatgccatga

SEQ ID NO: 4560 - DNA, 1956 bp, Zea mays
  Clone ID: TF_ZM4582.C2.o1.fg
atggatattaagggaaatgggatggtggtcaacgataaggagaaggagtccatcttcaacgagccaagagataacaagcccactgactctggcttgagtcacaagaagaaggatgggaagaagaagaggcgcatcaagaagatcgtctactacgacagcgacgaatcttcctcttcaccaagagacaacgacgagaaaaggaaaccgcaaattcataaaaatgcacaagctaccactgttttgctagcatccttgtgcagggacgagtacaacaaggtgagcggcttggacaatgccaagcaaatctgggacaccctcaaaatatcacatgagggaaacgacgccaccatgatcaccaaaatggagttggtggaaggtgagctgggaaggttcgctatgatcaggggagagaagccaacacagacgtacaacaggctcaagaccctggtcaacaagatcaggagctatgggagcacgagatggacggaccacaacgtcgtccgacttatgctcaggtcttttactgttattgaccctcatcttgtgaacctcatccatgaaaatcccaggtacacaaaaatgacgcccgaagagatactcggaaaatttgtgagcgggcgcatgatggtcaaggaggcgaggtatgttgatgatgcattaaacggccccatgcccatctacgagccgcaacccgttgcactcaaggcaacaagcagcaaggaggcgctaccaagcaaggtagcacaagtagaggctctcgggctcaatgagagtgaaatggtgcttatcatcaagtgtttcaagaccgctcttaaaggacgcaaggagtaccccaacaagaacaagacaaggggaaagcgctcctgcttcaaatgcggtaagactggtcactttattgcaaactgtcccgataatgatagtgaccagggacaagaaaatagcgggaagagggagaagaaggcctacaagaaggcaaagggcgaggcgcatcttgggaaagaatgggattcagactgctcttcctccgactccgatgacgaaggacttgctgcctcagccttcaacaagtcctctctcttccccaacgaacgccatacctgcctcatggcaaaggagaaaaaggataaatcagaaacccaagggaccctaaagcgctttctaaggagggctcaaaacgagtttgagctcaaggtgaaaaagataagaagcgacaacgggtccgagttcaagaatctgcaagtggaggagtaccttgaggaggaaggcatcaagcacgagttctccgctccctacacaccacaacaaaatggtgtagtagagaggaagaacatgacacttatcgacatggcaaggacgatgcttggagagttcaagacgcctgagcggttttggtcggaagctgtgaacacaacctgccacgccataaaccggctctaccttcatcgcctcctcaagaagacctcggtagaagaggccttgcaagatccggactgggtgttggccatgcaggagaagctcaacaacttcaagcgaaatgaagtttggagcctggtgccacgtccaaagcaaaacgttgtgggaaccaagtgggtgttccacaacaagcaagacgagcacggggtggtgacaagaaacaaggctcgacttgtggcaaaaggttatgcccaagtcgcaggtttggattttgaggagacttttgctcctgtggctaggctagagtcaattcgcattttgttagcctatgccgctcaccattcttttagcttgtttcaaatggatgtgaagagcgttttcctcaacgggccaatcaaggaggaggtgtacgtggaacaaccccctggctttgaggatgacaggtatcccgaccacgtttttaagctctctaaggcgctccatggacttaagcaagccccaagagcatggtatgaatgccttagagattttgagagcacctag

SEQ ID NO: 4561 - DNA, 3840 bp, Zea mays
  Clone ID: TF_ZM4622.C5.o2.fg
atggatcctaagagaaaggggatggtggtcaacgacaaggagaaggagtccatcttcaacgagccaagagatgacaagcccacagactcaggctcgagtcacaagaagaaggacgggaagaagaagaggcgcatcaaaaagatcatctactacgacagcgatgcatcttcttcttcaccaagagacgatgacgattcctcgtcaaagaaaaagacgattaatcaaaactattcttttgattattctcgcatgtcatacaattcaaatgtacatctactttcaattccccttggaaaacccccacactttgatggagaggattgctcattttggagtcataaaatgtgtagtcatctattttcgctccatcctagcatttgggaaattgtggaaaatggaatgcatttcgatagtacggatacccctgtaatgataaatgaacaaattcataaaaatgcacaagctactgctgtcttgctagcttcactttgcagggatgagtacaacaaaatgacgcccgaggagatccttggaaaatttgtgagcgggcgcatgatggtgaagaaggcacgatacgtggatgacgctttgaacggtccactacccatctacgagttgcagctcgttgctctcaaagcaacaagtagcaaggaggcgctaccaagcagggatgaaaggagtacccccaacaagaacaaaacaaggggaaagcgctcctgctttaaatgcggtaagactggtcactttattgcaaattgtcccgataatgatagtgaccagggacaagaaaatagcgggaaggagaaaaagaagaactacaggaaggcaaagggcgaggcacaccttggaaaggaatgggactcggtctgctcctcttccgactctgacgacgaaggacttgctgcctcagccttcaacaaatcctcactcttccccaacgaacgccatacatgccttatggccaaggagaaaaaagatagagccaaagtagagaaaaataatgaattaattgatgctctaaatgaaaaagatagattgctagagaagcaagaagatattttgtatgaagagcatgacaaatttattagtatccaaaaatctcttgctctagaaattaagagaaacgaaatgttatcctctgagttgtctgcttgccatgaatctgtttctaatctaaagagtttaaatgatgatttaaatgctaagctagaggaagttaataaatctagttcatgtgtagagcatgttgttatttgtaatagatgtaaggattttgatgttgatgcttgtaatgaacatattgtttctattacaaaattaagtaatgaggtggcaagtcttaatgctcaacttaagacttgcaaggatgattttaataaattgaaatttgctagggatgcctacactattggtagacacccttcaattaaggatggacttggttttcgaaaggaaaccaagaacttaacaagccaaaaggctcctgttctcaacaaggagaaagggaaggcccctatggctagtagttctcaaaagtgtcatgcctacatttatgatagaaaattttctaggaatgcgtatagagactatgatcatgctatgattgcttccagttctacttatgattgtagtagaaataggcctaggcgcaatcatgccgtgtctcatgcacctagaagaaataatgttgtgtctcatgtgcctaggaaaatgtgcaatgaacccactactgtttttcatacttgcaacacttcttttattctttcatgtaagaatgcaaaagtagtggctaggaagttgggatccaaatgcaagggagacaaaacttgcatatgggttccaaaaactattgtgactaaccttgcaggacccaacaagagttgggtttatgcatccgggggctcaagctggattatcgacagcggatgcacaaaccacatgacgggggagaagaagatgttcacctcctatgtcaagaacaaggattcccaggatatgatcatctttggagatgggaaccaacgcaaggtcaaaggcttgggcaagatagccatcaccaacgagcactccatatcgaatgtatttctagtagagtcgcttggttacaaccttctgtctgcagggaaacaagtgggaagcactcatcatagcaagaatgtgatgacaacatcaagaccactggagcttcttcacatggacctcttcggacccgttgcctaccttagcatcgggggaaggaccctaaagcgcttcctaaggagggctcaaaacgaatttgagctaaaggtgaaaaagataaggagcgacaacgggtccgagttcaagaatctgcatgttgaggagtatcttgaggaggaaggcgtcaagcacgagttctccgctccctacacaccacagcaaaacggtgtggtagagaggaagaacaggacacttatcgacatggcgagaacgatgcttggagagttcaagacgcccgagcggttttggtcggaagctgtgaacacagcttgccacgccataaaccagctctatctgcatcgccttctcaaaaagacctcctacgaactccttaccggtaacaaacccaatgtctcctactttcgtgtatttgggagcaaatgttacattctggtgaagaaagtctctagcgacgttgtatttgatgagactaatggctctccaagagagcaagttgatcttgatgacatagatgaagatgatgttccaacggccccaatgcgcacgatggcgattggttatgtgcgaccacaggaacaacatgagcaagatcagccatcttgctcaacaatggtgcatcctccaactcaagacgatgaacatgtacctcaagaagagggaccggatcaagggggagcacaagaagaacaagtgatggaggaagaagcaccacaggtgcctccaactcaagtccgagcgacgatccaaagaaatcaccccatcgatcagattctgggtgatatcagcaagggagtaacgactcgctcacgtttagctattttttgtgagcattactcgtttgtatcttctattgagccgttcggggtagaagagaccttgcaggatccgtactgggtgttggccatgcaggaagagctcaacaacttcaagagaaacgaagtttggagcctggtgccacgtccaaagcaaaacgttgtggaaaccaagtgggtgttccacaacaagcaagacgagcacagagtggtgacaagaaacaaggctcgacttgtggcaaaagactatgctgctcaccattcttttaggctgtttcaaatggacgtgaagagcgctttcctcaacgggccgatcaaggaggaggtatacgtggaacaaccccctggctttgaggatgacaggtaccccgaccatgtgttcaagctctctaaggcgctctatggacttaagcaagctccaagagcatggtatgaatgccttagagatttcttaattgctaatgccttcaaggttgggaaagccgatcccactctttttacaaatacttgtgatggtgatctttttgtgtgccaaatttatgtcgatgacataatatttggttctactaaccaaaagtcttgtgaggagtttagcagggtgatgatacagaaatttgaaatgtcgatgatgggcgagttgacctacttccttggattccaagtgaagaaactcaaggacgacaccttcatctcccaaacgaagtacacacaagatcttatcaagcggtttgggatgaaggacgccaagcccacgaagacaccgatgggaaccgacgggcatgttgacctcaacaaaggaggtacgtccgttgatcaaaaggcatactga

SEQ ID NO: 4562 - DNA, 1806 bp, Zea mays
  Clone ID: TF_ZM4679.C2.o5.fg
atggagaaaattagggaagtgatggctggactattccaatataggttcagagttagtgtagctagagtgggacaatcatatcagaagccatatgatcacctgtttgaaactgtcccatatccacaaggggcaaggataccagagttttctaagttttctgatgtatatatcgctgagtttgtttggccagcaaaggccaaatcttctgcatgttcttccttacaaccggttcaaaagaatcggcaagaagagattaaatttacctttaatgttgccaaatgcgataggatatttgacgaactactaaaaaatgacaacattaaattaactcatactattcctcctatggacaaattaaagagatgtgcttattcagatcaagggggagcagtgtctccgaaccaccgctggcgttttgactacctgcatgggtgccgacgaatccggtttctagaagtgcttcgcgcacgttcgcttgggttcctctccaacactcgtggaaatcatttggttggtggcatcattgccaaattacctcctacttggaggatatttttcatggctctcaaacacaagaaggaggcaatgattgttaaaagtataatttctactcttgatgttgaggaggtgagatccaaggatgtacctcgttctggtccaatggatagtggcacctctaatgccaacgtggttgaaggtaaatctggtgggaaaaacaaaaacaagacaaaccggaaaccaaaggccaagcagaacagtgattttaagaagaaaaacattgtagacctgacttgctttgtgtgtggtgaatctggtcacatagctagaaaatgtcgtaatagaaagggcaagaaaggtgatggtcagaaaactgtaaatgtggctattgctgatgctgggaattctggtggtggtttgttccgcctttcagtggctgatgattgtaataatgtggcaaactcagtttcatattctgaattgaatctctatcttgttaagacgaaagatgaggcacttaattgtttcgaaatctataaggcaaaggtagaaaaccaactagcaaagaaaattaaacgggttaggtctgatagaggaggggagtatctttctaacaaattcggtgaatactgtgtggaacatggaatcatccatgagacaacagctccctactcgcctcaatcaaacggggtggctgaacggaaaaaccaaactttgatagacttggttaatgccatgttggatagttctggtttacctaagtcatggtgtggagaagctattttagccacatgctttgttctaaaccgagttccatcagctaagggtgataaaacaccctatgaaggatggaaaggtgataccctaaaaacccttgaagaggcatatgcatcaccagatgcagagcactggaaggaagcagtccacaatgaaatggagtccattctaacaaatgggacttgggaaatatgtgacttgccagttgggtgtaaacctatggaattaaatggatattcaagaaaaaactcaaaccagatggtattgtcgataaatacaaggataggcttgtggccaagggatttacccaaaataaaggcagctttccttaatggtgagcttgacgaggagatctatatgaagcagtcagatggatttgtgacacatggacaggagaacatggatttgggagaggcagatgttatattaaacataaaactgattaagggtgagaatgggattattctgaaacaatctcattatgtggagaacattccaaagcttctccaacaccttttgatcctagtctaa

SEQ ID NO: 4563 - DNA, 3687 bp, Zea mays
  Clone ID: TF_ZM4823.C5.o4.fg
atggatcctaagggaaagggaatggtggtcaacgacaaggaaaaggagtccatcttcaacgagccaagagatgacaagcccactgactcaggctcgagtcacaagaagagggacgggaagaaaaagaggcgcatcaagaagatcatatactatgacagcgatgcctcctcttcttcaccaagggaggacgatgacgatgacgactcgtccaaaagaaagacgcatctctgtgccagggatgaatataacaaggttagcggcttggacaacgccaaacaaatctgggacaccctcaagatctcgcatgagggaaatgatgctacaatgatcaccaagatagaactggtggaaggcgagctgaggagattcgccatgatcaggggagaagagccaacacaaacctacaacaggctcaagaccctggtcaacaagatccgaagctatggaagcacaagatggacggatcatgacgtcgtccgactcatgctcaggtcatttacggttattgacccccatcttgtgaatcttattcgtgaaaaccccaggtacaccaagatgacgtccgaggagatactcggaaaatttgtaagcgggcatatgatggtgaaagaagctcgatacgtagacgatgcactaaacggtccactacccgtctacgagccacaacccattgctctcaaagcaaccagcagcagggaggcgctaccaagcagggtggcacaagtggaggctactgggctcaacgaggacgaaatggcacttatcatcaagcgtttcaagaccgcgctcaaaggacgcaaagagtaccccaacaagaataaaataaggggaaagcgctcatgcttcaaatgcggtaagactggtcactttatttctcaatgtcccgataatgacaatgaccaggcacaagaaagacatgggaagaaggagaagaagaagaattataggaaggcgaagggcgaggcgcatcttggaaaagaatgggattctgactgctcttcatccgactccgacgatgaaggactggctgcctcgaccttcgacaagtcttcactcttccccaacgaacgtcatacatgtcttatggctaaggagaagaaggtacatattcgagatactcctaagtactcttcttctagtgatgaggaatcttctgatgatgaagtagattactctgaattgtttaagggtttagatagagctaaggtttatgcatccgggggctcaagctggattatcaacagcggatgcacgaaccacatgacggaggagaagaagatgttcacctcctacgtcaagaacaaggattcccaagatacgatcatctttagagatgggaaccaaggcaaggtgaaaggcttgggcaagatagccatcactaacgagcaatcaatatcaaatgtatttttagtagagtcgctcggaagaagtgatggttcattagcttttaagagtgtattagacggcaagctctgcttagttgatttttcgaaagagaatgccggtctagatgcatgcttaatagctaatacaaatatgggctggctttggcatcaccatctagcacatgttgggatgaagaaccttcataagcttctaaagggagatcgtgtgttaggactaactgatgtctgttttgagaaaaatagaccttgtgcaacatataagtcagaaacccaagggactctaaagcgcttcttaaggaaagctcaaaatgagtttgagcttaaggtgaaaaagataagaagcgacaatgggtccgagttcaagaatctacaagttgaagagtttcttgaggaggaaggcatcaagcacgagttctccgctccctacacatcacaacaaaatggtgtggtagagaggaagaacaggacgctaatcgacatggcgaggacgatgcttggagagttcaggacgcccgagcggttttggtcggaagttgtgaacacggcctgccacgctataaaccggctctatctgcatcgcctcctcaagaagacctcctacaaacttcttaccggtaacaaacctaatgtctcttactttcgtgtatttggaagcaaatgctacattctggtgaagaaaggtagacattctaaatttgctcctaaggctgtagaagggtttttactaggatatgacttaaatacaaaggcgtatagagtcttcaacaaatcatcgggattagttgaagtctctagcgacgttgtatttgatgagacgaatggctctcaaagagagcaagttgatcttgatgatatagatgaagatgaagttccgacggccgcaatgcgtatgatggcgataggtgatgtgcgaccacaggaactacaggaacaagatcagccttcttcctcgacactggtgcatcccccaactcaagatgatggacaggtacctcaagaacaggagcgtgatcaagggggagcgcaagaagaacatgttatggaggaagaagcaccacaggcccctccaactcaagtccgggcgtcaatccaaggacatcaccccgtcgaccagattttgggtgagatcagcaagggagtaaccactcgctcacgattagctactttttgtgagcattactcatttgtctcttctattgagcctttcagggtagaagaggtcttgcatgatccggactggatgttagccatgcaggaagagctcaacaacttcaaaagaaatgaagtctggagcctggtgccacgtccaaagcaaaacgttgtgggaaccaagtgggtgttccgcaacaaacaagacgagcacggagtggtgacaagaaacaaggctcgacttgtggcaaaagcctatgccggtcaccactcctttaggctgtttcaaatggacgtaaagagcgctttcctcaatgggccaatcaaggaagaggtatacgtggaacaaccccctggttttgaggatgactggtatcccgaccatgtatataagctctctaaggcgctctatggacttaagcaagccccaagaggatgctatccctctctcttacaaaagccttgtgatggtgacctttttgtttgccaaatttatgtcgatgacataatatttggttctactaaccaaaagtcttgtgaggagtttagcagggtgatgatgcaaaagttcgagatgtccatgatgggcgagttgacttactttcttggattccaagtgaagcaactcaaggatggcactttcatctcccaaacgaagtacactcaagatcttctcaagaggtttggaatgaaggacgccaagcccgcgaagacacttatgggaactgatgggcatcttgacctcaacaaaggaggtaagtccgttgatcaaaaggcataccggtcaatgataggttcattactttatctttgtgctagtagaccggacattatgcttagtgtatgcatgtgcgctagatttcaatccgaccccaaggaatgtcaccttgtggccgttaagcgaattcttaggtatttagtttctacgcattgcttcgggatctggtatccaaaggggtctacctttgacttaattggatacgcagactccgattatgccgggtgcaaggttgataagaagagcacatcagggacgtgccaatttctaggaaggtccctggtgtcccggagttccaagaaacaaacatcagttgccctatccaccattgaggccgagtacattgccgcatga

SEQ ID NO: 4564 - DNA, 1434 bp, Zea mays
  Clone ID: TF_ZM4904.C1.o13.fg
atggatcctatgggaaaggggatggtgatcaatgacaaggagaaggagtccttcctcaatgagccaaaagatgacaagcccactgactcaggctcaagtcataagaagaaggataggaagaagaagaggcacatcaagaaaatagtctactacgacatcgacgagtcctcttcttcccaaagagacgacgacgacaagaaaaagaaaacggtcaactcaaatttttcttttgattattctcgtattccgcaaaattccaatgctcatttgctttccattcctcttggtaaacctccacactttgatggagaggactacggattttggagtcacaaaatgcgtagccacttgttctctcttcatccaagtatatgggagatagtagaaaatggaatgcaatttgatagtacggataatcccatggaagagtatcataaggtgggaggcttggataatgccaagcaaatttgggacaccctcaagatctcacatgaggggaacgacgccaccatgatcaccaagatggagttggtggaaggcgaactaggaaggttcgcaatgatcaagggggaggagccaactcaaacgtacaacaggctcaagaccctggtcaacaaaatcaggagctatggaagcacgagatggacggaccacgatgccgtccggcttatgctaaggtccttcactgtccttgatcctcatcttgtaaactctatccgtgaaaatcctaggtacaccaagatgacgcccgaggaaatactcagaaagtttgtaagcggacgaatgatgatcaaggaggcaagatatgttgatgaggcgttgaatggcccaatgccgatccacgagcctcaaaccgttgctctcaaagcaacaagcagcaaggaggggctacctagcaagcgcttcaagacggcgctaaaaggacgcaaggaacatcccaacaaaagcaagacaaagggaaaacgctcctgcttcaagtgtggtaagactggtcactttattgctaactgtcccgataatgatagggaccagggacaagaaaagagtgggaagagagagaacaagaaggtttacaagaaggctaaagtcgaggcacaccttggtaaagagtgggactcggattgttcgtcgtccgactccgacgacgaaggactcgccgcctcagccttcaacaagtcgtcgctcttccccaacgagcatcatacttgtctaatggcaaaggaaaagaaggtttatgcatccgggggctcaagttggattatcgacagcggatgcacaaaccacatgacgggggagaagaagatgttcacctcctacgtcaagaacaaagattcccaggattcaatcatattcggtgacgggaatcaaggcaaggttaaaggactaggaaagatagctatttcatctgagcattcatatctaatgtgtttttag

SEQ ID NO: 4565 - DNA, 615 bp, Zea mays
  Clone ID: TF_ZM4909.C3.o1.fg
atggatcctaagggaaaggggatggtggtcaacgataaggagaaggagtccatcttcaacgagccaagagatgacaagcccactgactctggctcgagtcacaagaagaaggacgggaagaagaagaggcgcatcaagaagatcgtctactacgacagcgacgaatcttcttcttcgccaaaagacggcgacgacgactcgcacgaatacaacaaggtgagcagcttggacaacgccaagcaaatttgggataccctcaagatatcgcatgagggaaacgacgccaccatgatcaccaaaatggagttcgtggaaggcgagctgggaaggtacaccaaaatgacgcccgaggagatactcggaaagttagtgagcgggcgcatgatggtgaaagaggcacggcgcttcaagaccgcactgaaaggacgcaaggagtacccaaacaagaacaaagcaaagggaaagcgctcctgcttcaaatgcggtaagactggtcactttatagcaaattgtcccgataatgatagtgaccaaggacaagaaaagagcgggaagaaggagaagaaaaagagctacaggaaggcaaagggtgaggcacacctcggaaaggaatga

SEQ ID NO: 4566 - DNA, 2865 bp, Zea mays
  Clone ID: TF_ZM5004.C1.o6.fg
atggtaaaggaggcacgatatgtggatgacgccttgaacggtccactacctatctacgagccgcagcccgttgctctcaaagcaacgagcagcaaggagacactaccaagcagggtagctcaagtggaggctgccggacttaatgaagatgagatggcgcttatcatcaagcgcttcaagactgcactcaaaggatgcaaggagtaccccaacaggaataaaacaaagggaaaacgctcctgcttcaaatgcggtaagactggtcactttattgcaaactgtcccgataatgatagtgaccagggacaagaaaagagcgggaagaaggagaaaaagaagaactacaggaaggcaaagggcgaggcgcaccttgtaaaggaatgggactcagactgctcctcttccgactccgatggcgaaggactcgctgcttcggccttcaacaaatcctcactcttccccaacaaacaccatacatgtcttatggccaaggagagaaaatgtaaggattttgatgttgatgcttgtgatgatcaccttatttctattaccaaattaaatgatgaggtggcaagtctcaatgctcaacttaagacttgcaaaattaactttgataaattaaaatttgctagggatgcctacactgttggtaaacacccctcaattaaggatgggcttggttttcgaaaggaagccaagaacttaacaagccaaatggctcccattcccaacaaggagaaagtgagggctcctatggacccaacaagagttgggtacctaaaacccaagcttaaattccttgcaggtttatgcatccaggggctcaagctagattatcgacagcggatgcacaaaccacatgacgagggagaagaagatgttcacctcctacatcaagaacaaggattccaggatacgattatctttggagatgggaatcaaggcaaggtcaggggtttgggaaagatagccatcaccaatgagcactccatatcaaatgtatttctagtagagtcgcttggttacaaccttctgtctgtaagtcaattgtgtcacatgggttacaattgtctttttacaaatgttgatgtatctgtctttagaaggagtgatggttcattagcttttaagggtgtattagacgacaaactctacttagttgattttttgaaagaggaggccgttctagatgcttgcttaatagctaagactggtttgggctggctgtggcatcaccgactatcacatgttgggatgaagaaccttcataaacttctaaagggagaacatgtgttaggactaaccaatatttgttttgagaaagatagaccttgtgcagcttgtcaggcagggaaacaggtgggaaggactcatcacagcaagaatgtgatgacaacatcaagaccactggagcttcttcacatggacctcttcggacccgttgcctaccttagcatcgggggaagtaagtatggtcttgtaattattgatgattttttccgcttcacttgggtgttctttttgcaggataaatcagaaacccaagggaccctaaagcgctttctaaggagggctcaaaacgaatttgagctcaaggtgaaaaagataagaagcgacaacgggtctgagttcaagaatctgcaagtggaggagtatcttgaggaagaaggcgtcaagcacgagttctccgctccctacacaccacagcaaaacggtgtggtagagaggaagaacatgatgcttattgacatggagagaacgatgcttggagaattcaagacgctcgagcggttttggtcggaagctgtgaacacagcttgccacgccataaaccggccctacctacatcgccttctcaagaagacctcgtatgaactccttaccggtaacaaacccaacgtttcttacttccatgtatttgggagcaaatgttacattctagtgaagaaaggtagacattctaaatttgctcccaaggcagtagaagggtttttactagggtatgactcaaatacaaaggcgtatagagtcttcaacaaatcatcgggtttggttgaagtctctagcgatgttgtatttgatgagactaatggctctccaagagagcaagttgatcttgatgacatagatgaagatgatgttccaacggccgcaatgcacacgatggcgataggtgatgtgcgaccacaggaacaacaagagcaagatcagccatcttcctccacaatggtgcaacctccaactcaagacggtgaacagcctggtgccacatctaaagcaaaatgttgtgggaaccaagtgggtgttccgcaacaagcaagacgagcacgagtggtgacaagaaacaaggctcgacttgtggcaaaaggttatgcccaagtcgcaggtttggatttcgaggagacttttgctcctgtggctaggatagagtctattcgaatattattagcctatgccgctcaccactctttcaggttgtttcaaatggacgtaaagagcgctttcctcaacgggccaatcaaggaggaggtatacgtggaacaaccccctggctttgaggatgacaggtaccccgaccatgtgttcaagctctctaaagcgctctatggacttaagcaagccccaagagcatggtatgaatgccttagagatttcttaattgctaatgctttcaaggttgggaaagccgatcccactctttttattaagacttgtgatggtgatctttttgtgtgccaaatttatgtcgatgacataatatttggttctactaatcaaaagtcttgtgaggagtttagcagggtgatgacacaaaagttcaagatgtcgatgatgggcaagttgacctacttccttgggttctaa

SEQ ID NO: 4567 - DNA, 4383 bp, Zea mays
  Clone ID: TF_ZM5105.C4.o2.fg
atggatcctaagggaaaggggatggtggtcaacgacaaggagaaggagtccttcctcaacgagccgagggacgacaagcctactgactctggctcaagtcataagaagaaggacgggaagaagaagagggatgaatacaacaaggtgagcggcttggacaacgccaagcaaatatgggacaccctcaagatttcacatgaggggaacgatgccaccatgatcaccaaaatggagttggtggaaggcgagctaggaaggtttgccatgatcaggggagaggagccaacgcaaacatacaacaggctcaagaccctggtcaacaagatcaggagctatggaagcacgagatggacggaccacgacgttgtccgacttatgctcaggtcttttactgtcattgaccctcatcttgtgaacttcatctgtgaaaatcccaggtacacaaagatgacgcccgaggagatactcggaaagtttgtaagcggacgtatgatggtcaaggaagctagatatgttgatgatgcattgaacggcccaatggccatctatgagccccagcccgttgcactcaaggcaacaagcagcaacagggaggcgctacctagcaaggtggcacaagttgaggctgccgggctaaacgaagatgagatggccctcatcatcaagcgcttcaagatcgcactaaaaggacgcaaggagcatcccaacaagagcaaagcaaagggaaagcgctcctgttttaaatgcggtaagactggtcattttatagcgaattgtcccgataatgctaatgacaaggaacaagaaaatagcgggaagagggagaagaagaaggcctacaagaaggcgaagggcgagccgcaccttgacaaaaaatgggattcagattgctcttcttccgactccgacgatgaaggactcgccgcctcgaacttcaacaagtcgtatctcttccccaacgagtgtcatacttgcctcatggcaaaggagaaaaaggtaagcactcgagatacccctaagtatactacttcaagtgatgatgactctagtgatgatgaagtagattacacaagcttatttaaaggtttagaaagaactaaagtagataaaatcaatgaattgattgatgctttaaatgaaaacaatagactcttagaaaagcaagaggatattttgtatgaagagcatgataagtttgttagtgtacaaaaatctcttgctttagatattaaaaggaatgaaatgttgtcctctgaattatctgcttgtcatgaaactgtgtctagcttaaagagtattaatgacgatttaaatgctaagctagaagtagttaataaatctagttcttttacagagcatgttgtcatttgtaatagatgtaaagattttgatgttgatgcatgtgttgaacaccttacttctattacaaaattaaatggtgaagtggcaagtcttaatgcccaacttaagacttgcaaaaatgactttgataagttaaaatttgctagggatgcctacaccgttggtagacatccctcaattaaggatggacttggctttcgaaaggaagccaagaacttaacaagccaaagggctcccattcccaacaaggagaaagggaaggcccctatggctagtagtaatcaaaagaatcatgctttcatgtataatgatagaaatttttctagaagttctcattataataggagttataatgcttttgattcacatgctatgattgcttcaagttccaattttaatgtggttgctagaaagatggggtctaaatgcaaaggagacaagacttgcatttgggtcccaaagactattgtaactaaccttgtaggacccaacaagagttgggttcatgcatccgggggctcaagttggattatcgacagcggatgcacaaaccacatgacgggggagaagaagatgttcacctcctacgtcaagaacaaggattctcaggatacgattatctttggagatgggaaccaaggcaaggtcaaaggcttgggaaggatagccatcacaaatgagcactctatttctaatgtatttttagtagagtcgctaggctataatctcctgtctgttagtcaattgtgccacatgggctacaattgtttgtttacaaatgttgatgtatctgtctttagaaggagtgatggttcattagtgtttaagggtgtactagatggcaaactctacttagttgatttttcgaaagaggaggctgatctagatgcatgcttaatcgctaagactagtatgggctggctgtggcatcgccgtctagcacatgttgggatgaagaaccttcacaaacttctaaagggagagcatgtgttaggactaaccaatgataaatcagaaacccaagggacccttaagcgcttcctaaggcgggctcaaaatgaatttgagctcaaggtgaaaaggataagaagcgacaacgggtccgagttcaagaatctgcaagtggagtaccttgaggaggaaggcatcaagcacgagttctccgctccctacacaccacagcaaaatggtgtggtagagaggaagaacaggatgcttattaacatggcgaggacaatgcttggagagttcaagacgcctgagcggttttggtcggaagctgtgaacacagcttgccacgccataaaccggctctacctttatcgcctcctcaagaagacctcgtacgaacttcttatcagtaacaaacccaacgtatcatactttcgtgtatttgggagcaaatgttacattctagtgaagaaaggtttggttgaagtctctagcgacgttgtatttgatgagactaatgactctccaagagagcaagttgatcttgatgatatagatgaagatgatgttccgacggccgcaatacacaccatggcgattggagatgtgcgaccacaagaacaacaacagcaagatcaaccttcttcctcaacgatggtgcaccccccaactcaagatgatgaacaggttcatcaagaaggggcgtgtgatcaagggggagcacaagaagaacaagtgatagaggaagaagtaccactggcccctccaactcaagtccgagcgataattcaaaggaatcaccatgtcgatcagattctgggtgacataagcaagggagtaactactcgctcacgattagctaatttttgtgagcattactcgtttgtctcttctattgagcctttcagggtagaagaggccttgcaagatccggactgggtgttggccatgcaggaggagctcaacaacttcaagcgaaatgaagtttggagcctggtgccacgtccaaagcaaaacgttgtgggaaccaagtgggtgttccgcaacaagcaagacgagcacggggtgctcgacttgtggcaaaaggagacttttgctcctgtggctaggctagagtctattcgcattttgttagcctatgctgctcaccattctttcaggttgtttcaaatggacgtgaagagcgctttcctcaatgggccaatcaaggaggaggtgtacgtggaacaaccccctggctttgaggatgacaaatatcctgaccatgtttttaagctctctaaggcgctctatagacttaagcaagccccaagagcatggtatgaatgccttagagatttcttaattgctaatgctttcaaggttgggaaagtcgatcccactcttttcactaagacttgtgatggtgacctttttgtatgccaaatttatgtcgatgacataatatttggttctactaatcaaaagtcttgtgaggagtttagcatggtaatgacacagaaatttgagatgtcaatgatgggcgagttgaactacttccttaggttccaagtgaagcaactcaaggacggcaccttcatctcccaaacgaagtacactcaagatcttctcaagcggtttgggatgaaggacgccaagcccgcgaagacgccaatgggaaccaacggacatgtcgacctcaacaaaggaggtaggtcagttgatcaaaaggcataccggtctatgataggatccttgctttatttatgtgctagtagaccggatattatgctaagcgtatgcatgtgtgctagatttcaatccgatccaagggagtgtcactttgtggccgttaagcgaattctcagatatttagttgctactccttgcttcgggatctggtatccaaaggggtctacctttgacttggttggatactcagactccgattatgctggatgcaaggtcgataggaagagtacatcagggacatgccaattcctaggaaggtccctggtgtcttggagttctaagaaacaaacctccgttgccctatccaccgttgaggctgagtatgttgccgcaggatag

SEQ ID NO: 4568 - DNA, 1344 bp, Zea mays
  Clone ID: TF_ZmC4916_440
atggatcctaagggaaaggggatggtggtcaacgacaaggaaaaagagtccatcttcaatgagccaagagacgacaagcctaccgactcaggctcgagtcacaagaagagggacgggaagaagaaaaggcgcatcaagaagattatctactacgacagcgatgcctcatcttattcaccaagggacgacgacgacgactcctcgtcaaagaaaaagacggtcaatcaaaattattcgtttgattactctcgcattccctacaattcaaatgcgcatttactatcaattcccctcagaaaacctccacactttgatggagaggactattcattttggagtcataaaatgcgtagtcatttattttctctccatcccagcatatgggaaattgtagaaaatgggatgcatttcgatagcactgataatcctatgatcattaatgaacaaattcataagaatgcccaagccactactgtcttgctagcttcactttacaggaatgaatataataaagtgagtggcttggacaacgctaagcaaatctgggacaccctcaagatatctcatgagggaaacgacgccactatgatcacaaagatggaactagtggaaggcaagctggggaggttcacgatgatcaggggagaggagccaactcagacctacaacagactcaagaccctggtcaacaagatccgaagctatggaagcacaagatggacggatcatgatgtcgtccgactcatgctaaggtcatttactgtaattgacccccatcttttcaatcttattcgtgaaaaccctaggtacaccaagatgacgcccgaggagatcctcgaaaaatttgtgagcgggcgcatgatggtgaaggaggcgcgatacgtggatgatgcgctaaatggtccactgcccatctacgagccgcagcccgttgccctcaaagcaatgagcggcagggagacactaccaagcaaggtagcacaagtggaggctaccgggctcaatgagaatgaaatggcactcatcatcaagcgtttcaaaaccgccttaaaaggacgcaaggaataccccaacaagaataaaacaaggggaaagcgctcctgcttcaaatgcggtaagactggtcatttcatagcacagtgccccgttaatgataatgaccagggacaagaaaagcacggtaagagggagaagaagaaggtctacaagaaggtgaagggcgaggcacaccttggaaaggaatgggattctgactgctcttcatccgactccgacgatgaaggattgtctgccttggctttcgacaagtcttcgctcttattaggcttttctttgcccttctga

SEQ ID NO: 4569 - DNA, 2592 bp, Zea mays
  Clone ID: TF_ZM4989.C10.o1.fg
atggatcctaaaggcaaggggatggtgatcaacgacaaggaaaaggagtccttcgtcaacgagcccaatgatgacaagcccaccgactcaggctcgggccacaaaagaaaagacgggagaaagaagaaggcaaggcgcatcaaggaaattgtctactacgacagcgacgaatcttcctcctcccaaaaggacaacgacgactacgatagacgaaagacggttaactcaaacttttctttcgattattcgcgcatcccgcatagttcaaatgctcaattgcttcccattccacttggcaagccccctcactttgatggagaggattacggattttggagccacaaaatgtgtactcacctgttttctctccatccaagcatttgggagattgtggaaagtggaatgaaatttgatagctcggatagccctatgtttattaatgaacagattcatagaaatgcacaagctactactgtattgctagcctctttgtgcagggacgagtatcacaaggtgagcggcttggacaatgccaagcagatctgggacaccctcaagatctctcatgagggaaacgacgtcaccttgctcaccaaaatggagttggtggaaggcgaacttggacggttcgcgatgataaggggggaggagccgacgcaaacatacaaccggctcaagacccttatcaacaaaataaggagctacgggagcacgcgatggacggaccacgacgtcgtccgcctaatgctaaggtcatttaccgttcttgatcctcatttggtgaacaatatacgtgaaaatcccaggtacaccaagatgtcgcccgaagaagttcttgggaaattcgttagtgggcgaatgatgatcaaggaggcaaggtacgtggacgacgccttgaatggttcgatcaacgagccgcaaccccttgctctcaaagcaacacgaagcaaggaggcgctacctagcaaggtggcacagattgaggcggccggacttaatgatgaagagatggctctcatcatcaaaagattcaagacggtgcttaaaggtcgcaagggacagctaagcaagaccaaagccaaggggaagcgctcatgcttcaaatgcggtaagcttggtcattttattgctaactgtcccaacaatgatagtgatcaggatcaagggaacaagagggagaaaaagaagaactataagaaggcaaagggcgaggctcatctgggcaaggagtgggattcggactgctcttcatccgactccgacaatgaaggactcgccgccaccgccttcaacaagtcatccctcttccccaacgagcgtcacacttgcctcatggcaagggagaagaaagtaagcactcataatactagtacttatgcttcttcaagtgaggatgagtctagtgatgatgatgagatagattactcatgcttattcaagggattagatagaaccaaggtagacaaaattaatgaattgattgatgccttgaatgataggaatatacttttagaaaagcaagaggatttgttgtatgaagaacatgataaatttgtagaagctcagaaatctcttgctctagaaattaagaggaatgaaatgctctctagtgaattatcttcttgtcatgaaactattgccaagttaaagagttttaatgatgatttaaatgctaaactagaagtagcgactagtcttaatgcccaacttaagactagcaagaatgaatttgacaagctaaaatttgcaagggatgcctacacaattggtagacacccctcaattaaggatggacttggctacaaaagggaagccaagaacttgacaagccataaggctcccatctccgccaaggagaaagggaaggcccctatggctactagcactaaaaagaaccatgcttttttatatcatgatagaagacaatctagaagtgcttataggggttataatgcttatgatgattttgattctcatcacatgattgcttctagctcttcatatatgcatggtagaaatatgtctaggagaaatgctattcatcatgtgcctagaaagaatgttagtcatgcttctaggaaagtagtaaatgaaccttctacaatttattgtgctttaaatgcttcctttgctattcgtagaaaggataagaaaattgttgctaggaagttaggggcaaaatgcaagggtgacaaaacttgcatttgggtccctaaggatatttgcactaaccttgtaggacccaacatgagttgggtttatgcatccgggggttcaagctggattatcgacagcggatgcacaaaccatatgacgggggagaagaagatgttcacttcctacgtcaaaaataaggattcccaggattcaattattttcggtgatgggaatcaaggcaaggataagtctgaaacccaagggaccctcaagcgcttccttaggagagctcaaaatgagtttgagctcaaggtgaagaagataaggagcgacaacgggtccgaattcaagaaccttcaagtggaggaattccttgaggaggaagggatcaagcacgagttctccgctccctacacaccacagcaaaatggtgtg

SEQ ID NO: 4570 - DNA, 6385 bp, Zea mays
  Clone ID: TF_ZmC24260_2
atggctagtaacaacaatgtgcacattgggaagccaccgcactttgatggaaacaattatgattattggaaaataagaatgtcaatgcatcttagagcaatgggtggaaaaatttggccaattgttagagatggattcgttgtattgaaggaagatgaaccatccgttagtgataatgagaatatcctcacaaatgatcaagccatgaatgtcttttatgatgctcttgatataaatgagttcaatcgtatcaagaatctcacaaccgctcatgagatttgggtaaaactaatggaaattcatgaaggaactacaattgtgaagagtgccaaactatatgtgtgcaaagggaagtttgagcaatttattatgaaagaagatgagagtgtatccgatatgttcaatcgattgaatgagattgtaaatgaactcaaaggacttggttttaatgtaccagatgtggatttcacacacaagttccttagatcacttccggagaaatatgagactattgtgacaatgctagtaaggagtgatctatctacaacctctccaaccgaagtattgggagaaattctcactcaagatatatttaagaagtcacaagccgatgctttaagtttggcaaagaaggtgaaaaatgaatctattgctctcaaagccaaggcctcaaaggcaattgaaaaggaagatagcaatgatgaagaaaatgaaagcgagagtgatggtgacatggctttatttgtaaggaaattcaataaattcatgaagatgaaaagaggtcaacctagaagaggtcaaacatctagaagaaatgctttcaatgatagaaaatgttttgagtgtggggaacccggtcacattgccatgaattgtccaagcaagaagaagaagggcaaagatgaaagtgacaagaagaaaaagaaatactataacaagaagaaagatggcaaagcctacttagttgaatgggactcggatgatagctcggatgatgatgatgatgacacctcatccaagcttaatgccggaattgccatcaaggaagctccctcactcttctcgtccccccattgtctcatggcaaagggagatgctaaggccttgaaggaattgtataaaaacctccaagtgtcttttgaggagctcaagacctctcacaatgacctcaaagaaaattgtgagaagcttgcggatgctcaaaaatcatctattgtgcatgaagttgaggtggtcactaaggatgttggagtcacttgtgacttacttgatagtcttacaagtgaaccactacctactaactctatttgtgataaatgcaaaatttctctcaatgataatattgctcttgatgaatcaaaaattattgttgagaatgaagtgttagtggatagaataagtactctaactcatgacctagaaaaggcatatggtggtaagaagaatttggatttcatattgggaagtcaacgatgctctcttaaccgtgaaggtcttggatatgttcccaagaaaggaaagaatgcttttgtaaagcaaaagacattgtttgtgaaagaatgtgacaaagtaaactacaaggcgggagggaatcattgggtgttggatagtggatgtactcaacacatgaccggggatatgaagatgtttacccaaatgagtgatgaagattgctcaaattatgatagtatcacatttggagataatcgtaaaggaaaggttaaaggtttgggtaaaattgctatttcaaatgatcattctatatcaaatgtgctattggttgagtctttgaattttaatttactttccgtagctcaattatgtgatttaggattttgttgcaatttcacggttgaagatgttattatctctagtgttgatggtagcaatcttaaatttaaaggttttagacatgaaaatctttatcttgttgatttctcatctaatgaggcaaagctcacaacttgcttattttcaaaagcttcactaggttggttatggcatagaagacttggtcatgttgggatgaagcaactcaatcggttaaccaagcatgacttagttcgaggcttaaaagatgtgaagtttgaaaagaacaaattgtgtagctcttgtcaagccggtaagcaagtggcaaatactcatccaaataaaagtcaaatgtccactcatcgacctttggaattacttcacatggatttatttgggcccacatcttttgtaagtattggtggtaattcttattgtcttgtgattgtggatgactattcaagatttacttgggtttattttctacgagacaaatccaatgtgtttgaaacattcaagtcatttgctatattggctcaaaatcaatttgatttcgacatcaaaaaggttagaagtgataatgggtcggaattcaaaaatgcaagaattgatcaatattgtgatgacaagggtatcaagcatgaattctcttccaaatataccccagaaacaaaacggtattgttgaaagaaagaatagaactcttattgatatggcaaggtctatgttagcggaatataatatatcggattcttattgggccgaggcaataaataccgcttgtcattcatcaaatagactatattgtcacaagctcttgaagaaaactccatatgaattgctcattggtagaaagccaaatatctcatattttagggtattcggttgcaaatgttatattttaagaaagggaagccgactttctaaatttgagaagaaatgtgatgagggttttcttcttggatattcatcaaatagtaaggcttatagagtcttcaacaaaactcatggtattattgaggaagcatatgatgttgaattcgatgaaacaaatgggtctcaagatgagagtgaaaatctcgatgatgttgggggaactcaattgataaatgcaatgaaaacaatggccattggtgaaataaaaccaaaagaagatgatgatgaaaatagtgtggttgtcattccctcatcttcaactataaatgaggaagatcaccaaagccaacaactcaatgaaaccattgatactcatgatcaaggtacttcaagacctccaattcctcctaatgcttcaacaagcaattatcaaacggtatcaagaattcatcattccattgtgaaggatcacccggttgatcaaattgtgggtgatattagtaagggtgttcaaactcgctctcgcatagcttcgttttgtgaacatttctcttttgtatcttgtgtggaacctaaccgtgtagatgaagctctacttgatgttgattgggtgaatgcaatgcatgaagaattaaataacttcgctcgaaatgaagtttgggagcttgttgagagaccaaagaaccacaatgttattggtacaaaatgggtatttcgcaacaagcacaatgaagatggtgtggtagtaagaaacaaggcaagattagttgcacaaggatatactcaaattgaaggattggattttggggagacatttgctcccgtagcaagattagaagcaatccggattctacttgcttatgcttgtgcacacaatatcaagctctaccaaatggatgtaaagagcgccttcctaaatggtaagattagtgaactagtgtatgttgaacaacctcccggttttgaggaccccaaaagacctaaccatgtgttcaagctttctaaagctctctatgggcttaagcaagctcctcgcgcttggtatgaaaggcttagggatttcttgttttccaaagacttcaaaattgggaaggttgacactactctattcactaaaagaattggcaaagatttatttgtttgtcaaatctatgttgatgatattatttttggatctactaatgaattattttgtgaggagttcggaaaaatgatgtcaaaagaatttgaaatgtctatgataggagaattgagcttctttcttggccttcaaatcaaacaattgaaagatggaatttttataagtcaatcaaaatatttgaaggacatgctcaagaagtttggtttagaaaatgctaagcctatcaagactccaatggcaacaaatggtcatctagacttagatgaaggaggtactatggttgatcaaaaactttatcgttcaataattggtagtttgctttatattaccgcatctaggcccgatgttatgtttagtgtatgcatgtgtgctcgatttcaagcttctcctagagagattcacttgaaggccgctaaaagaattctaagatatttgaagtatactcccaatattggtctatggtatcccaaaggtgctcaatttgaattaattggatattcggattcggactatgcgggatgcaaagttgatagaaaaagcacctccgggtgttgtcaatttcttggtagatctattgtttcatggtcttctaagaaacaaaattcggttgctctatctaccgccgaggcggaatatatatcggccggaaattgttgcgctcaactattatggatgaaacaaaccttattggactatggaattattttcaagaatgtgcctcttatgtgtgataatgagagtgcgaaagtggacagaagttggaaaaatgagtgtcaggccgcggaccgtccgcccatggaccgcggaccgtccgcggaatcaggaaatggacagtccgagcagcctcgcagaccgtctgagatcctcagggcgcggaccgtccgccgccccagcgcggaccgtccgcgacagggcagaaaaagggacaaagacgcagacttgccagttgtgctccctcgctctatctctcttgctctccactcgccatatactctcttgtgtcgagttggttttggtggtctccgcaagaaacttgcaggtcgctttaaatccaagcgccctcgtggcaatgatgatgactatacaccgaccactgattcagaggcccaatcctcagctgggggcactgaatccatggatgctgaagattttcttcatgttcaccctgattatcccattgatatccaaggatggacttaccccaagcggagattttctatggctgagtactgctctagacggactgtgaaccagtatgctctgccatcagatacaaatattcagtttttccacactcagctgcagtttgatgtcttttggggcaccctggtggataccaattttcataagcatcaggtgattgattggtccttcttgctcagtcaatcagtcatggagggtctcattcccaaatttgaaacatgtgggttatatcagtttatggggcagcgcactgatttcaatgaaatggcagttaagcaattcttggctacctcagagattgatattgcagaagaatctatcacatggatgactggctttaagcggtattctgcttcttttgctgactttgccgctgccaacagtctgaactatggcaccatttctgctggggtggatctttatactgaagataattttgaggattttgtgcagttttatgagcccgccaggctcggtatacccaggaggtttggagaaacagcaggactcagacatcatcctgctgtcatcaacaagattgccagagtcaccattcttcccaagagtggtgataagagcaaaattcgcgataagttctggaacataatccagcacatcatgaatggtgaagtcatgaacattgttcttttcatgatgaggcagcttaatgatttaaagatggacaagaatcaaaacttggcttatgctccctacattatggctctcataaaatccaagacaagatttgagggcccatgtgagattgttcacactccattcaggccttttaagaatgagatagggttcctcaccaggccactcactccattcccagatgatgaggaagaccctggctatgcgggtggagcagctcctaatgttgaggaacagcagatgcctcctcctccacctcctcctcagcctcagcactattgggagcctgctccaggatattttgatccttattttcacaatatgcagcaagggctggagactcatattgatgctcgctttgatggcctgatgtcacatgtggatcaccgccttgatgacatgcagtctcgctttgacagcaactgggatgcgctcaactctgaattttctgactttcgtgatcaaattcacactaatgtcactgatcccatcatgtcaaggctcaataatatgcaacaaagctttcaagataacatgagtgctctctccagtcagtttgacaatctttctacaactgacaacatgcatgatataagtcagaggcagcagcagctccagcaggactttggccagttctcctccctgtttgacaccttcagcactcattattacaacatgcatcctccgccgagtgatcagtaa

SEQ ID NO: 4571 - DNA, 4683 bp, Zea mays
  Clone ID: TF_ZM4182.C3.o1.fg
atggctagtaacaacaatgtgcacattgggaagccaccgcactttgatggaaacaattatgattattggaaaataagaatgtcaatgcatcttagagcaatgggtggaaaaatttggccaattgttagagatggattcgttgtattgaaggaagatgaaccatccgttagtgataatgagaatatcctcacaaatgatcaagccatgaatgtcttttatgatgctcttgatataaatgagttcaatcgtatcaagaatctcacaaccgctcatgagatttgggtaaaactaatggaaattcatgaaggaactacaattgtgaagagtgccaaactatatgtgtgcaaagggaagtttgagcaatttattatgaaagaagatgagagtgtatccgatatgttcaatcgattgaatgagattgtaaatgaactcaaaggacttggttttaatgtaccagatgtggatttcacacacaagttccttagatcacttccggagaaatatgagactattgtgacaatgctagtaaggagtgatctatctacaacctctccaaccgaagtattgggagaaattctcactcaagatatatttaagaagtcacaagccgatgctttaagtttggcaaagaaggtgaaaaatgaatctattgctctcaaagccaaggcctcaaaggcaattgaaaaggaagatagcaatgatgaagaaaatgaaagcgagagtgatggtgacatggctttatttgtaaggaaattcaataaattcatgaagatgaaaagaggtcaacctagaagaggtcaaacatctagaagaaatgctttcaatgatagaaaatgttttgagtgtggggaacccggtcacattgccatgaattgtccaagcaagaagaagaagggcaaagatgaaagtgacaagaagaaaaagaaatactataacaagaagaaagatggcaaagcctacttagttgaatgggactcggatgatagctcggatgatgatgatgatgacacctcatccaagcttaatgccggaattgccatcaaggaagctccctcactcttctcgtccccccattgtctcatggcaaagggagatgctaaggccttgaaggaattgtataaaaacctccaagtgtcttttgaggagctcaagacctctcacaatgacctcaaagaaaattgtgagaagcttgcggatgctcaaaaatcatctattgtgcatgaagttgaggtggtcactaaggatgttggagtcacttgtgacttacttgatagtcttacaagtgaaccactacctactaactctatttgtgataaatgcaaaatttctctcaatgataatattgctcttgatgaatcaaaaattattgttgagaatgaagtgttagtggatagaataagtactctaactcatgacctagaaaaggcatatggtggtaagaagaatttggatttcatattgggaagtcaacgatgctctcttaaccgtgaaggtcttggatatgttcccaagaaaggaaagaatgcttttgtaaagcaaaagacattgtttgtgaaagaatgtgacaaagtaaactacaaggcgggagggaatcattgggtgttggatagtggatgtactcaatacatgaccggggatatgaagatgtttacccaaatgagtgatgaagattgctcaaattatgatagtatcacatttggagataatcgtaaaggaaaggttaaaggattttgttgcaatttcacggttgaagatgttattatctctagtgttgatggtagcaatcttaaatttaaaggttttagacatgaaaatctttatcttgttgatttctcatctaatgaggcaaagctcacaacttgcttattttcaaaagcttcactaggttggttatggcatagaagacttggtcatgttgggatgaagcaactcaatcggttaaccaagcatgacttagttcgaggcttaaaagatgtgaagtttgaaaagaacaaattgtgtagctcttgtcaagccggtaagcaagtggcaaatactcatccaaataaaagtcaaatgtccactcatcgacctttggaattacttcacatggatttatttgggcccacatcttttgtaagtattggtggtaattcttattgtcttgtgattgtggatgactattcaagatttacttgggtttattttctacgagacaaatccaatgtgtttgaaacattcaagtcatttgctatattggctcaaaatcaatttgatttcgacatcaaaaaggttagaagtgataatgggtcggaattcaaaaatgcaagaattgatcaatattgtgatgacaagggtatcaaacatgaattctcttccaaatataccccgaaacaaaacggtattgttgaaagaaagaatagaactcttattgatatgacaaggtctatgttagcggaatataatatatcggattcttattgggccgaggcaataaataccgcttgtcattcatcaaatagactatattgtcacaagctcttgaagaaaactccatatgaattgctcattggtagaaagccaaatatctcatattttagggtattcggttgcaaatgttatattttaagaaagggaagccgactttctaaatttgagaagaaatgtgatgagggttttcttcttggatattcatcaaatagtaaggcttatagagtcttcaacaaaactcatggtattattgaggaagcatatgatgttgaattcgatgaaacaaatgggtctcaagatgagagtgaaaatctcgatgatgttgggggaactcaattgataaatgcaatgaaaacaatggccattggtgaaataaaaccaaaagaagatgatgatgaaaatagtgtggttgtcattccctcatcttcaactataaatgaggaagatcaccaaagccaacaactcaatgaaaccattgatactcatgatcaaggtacttcaagacctccaattcctcctaatgcttcaacaagcaattatcaaacggtatcaagaattcatcattccattgtgaaggatcacccggttgatcaaattgtgggtgatattagtaagggtgttcaaactcgctctcgcatagcttcgttttgtgaacatttctcttttgtatcttgtgtggaacctaaccgtgtagatgaagctctacttgatgttgattgggtgaatgcaatgcatgaagaattaaataacttcgctcgaaatgaagtttgggagcttgttgagagaccaaagaaccacaatgttattggtacaaaatgggtatttcgcaacaagcacaatgaagatggtgtggtagtaagaaacaaggcaagattagttgcacaaggatatactcaaattgaaggattggattttggggagacatttgctcccgtagcaagattagaagcaatccggattctacttgcttatgcttgtgcacacaatatcaagctctaccaaatggatgtaaagagcgccttcctaaatggtaagattagtgaactagtgtatgttgaacaacctcccggttttgaggaccccaaaagacctaaccatgtgttcaagctttctaaagctctctatgggcttaagcaagctcctcgcgcttggtatgaaaggcttagggatttcttgttttccaaagacttcaaaattgggaaggttgacactactctattcactaaaagaattggcaaagatttatttgtttgtcaaatctatgttgatgatattatttttggatctactaatgaattattttgtgaggagttcggaaaaatgatgtcaaaagaatttgaaatgtctatgataggagaattgagcttctttcttggccttcaaatcaaacaattgaaagatggaatttttataagtcaatcaaaatatttgaaggacatgctcaagaagtttggtttagaaaatgctaagcctatcaagactccaatggcaacaaatggtcatctagacttagatgaaggaggtactatggttgatcaaaaactttatcgttcaataattggtagtttgctttatattaccgcatctaggcccgatgttatgtttagtgtatgcatgtgtgctcgatttcaagcttctcctagagagattcacttgaaggccgctaaaagaattctaagatatttgaagtatactcccaatattggtctatggtatcccaaaggtgctcaatttgaattaattggatattcggattcggactatgcgggatgcaaagttgatagaaaaagcacctccgggtgttgtcaatttcttggtagatctattgtttcatggtcttctaagaaacaaaattcggttgctctatctaccgccgaggcggaatatatatcggccggaaattgttgcgctcaactattatggatgaaacaaaccttattggactatggaattattttcaagaatgtgcctcttatgtgtgataatgagagtgcggtaaaattagctaccaatccggtccaacactcaagaaccaagcatattgatatacgacatcactttttaagggatcatgttggcaagggagacatctctatttattccattggcaccgatgatcaattagcagacatttttacaaaacctttggatgaaacaagattttgttctctaagaagtgaaatgaatgtgatcgatatctcaaatgtggcttga

SEQ ID NO: 4572 - DNA, 5280 bp, Zea mays
  Clone ID: TF_ZM5061.C1.o1.fg
atggctagtaacaacaatgtgcacattgggaagccaccgcactttgatggaaacaattatgattattggaaaataagaatgtcaatgcatcttagagcaatgggtggaaaaatttggccaattgttagagatggattcgttgtattgaaggaagatgaaccatccgttagtgataatgagaatatcctcacaaatgatcaagccatgaatgtcttttatgatgctcttgatataaatgagttcaatcgtatcaagaatctcacaaccgctcatgagatttgggtaaaactaatggaaattcatgaaggaactacaattgtgaagagtgccaaactatatgtgtgcaaagggaagtttgagcaatttattatgaaagaagatgagagtgtatccgatatgttcaatcgattgaatgagattgtaaatgaactcaaaggacttggttttaatgtaccggatgtggatttcacacacaagttccttagatcacttccggagaaatatgagactattgtgacaatgctagtaaggagtgatctatctacaacctctccaaccgaagtattgggagaaattctcactcaagatatatttaagaagtcacaagccgatgctttaagtttggcaaagaaggtgaaaaatgaatctattgctctcaaagccaaggcctcaaaggcaattgaaaaggaagatagcaatgatgaagaaaatggaagtgagagtgatggtgacatggctttatttgtaaggaaattcaataaattcatgaagatgaaaaggggtcaacctagaagaggtcaaacatctagaagaaatgccttcaatgatagaaaatgttttgagtgtggggaacccggtcacattgccatgaattgtccaagcaagaagaagaagggcaaagatgaaagtgacaagaagaaaaagaaatactataacaagaagaaagatggcaaagcctacttagttgaatgggactcggatgatagctcggatgatgatgatgatgacacctcatccaagcttaatgccggaattgccatcaaggaagctccctcactcttctcatctccccattgtctcatggcaaagggagatgctaaggtaaaaatcatcaccgatttaaatgatgtaaatgatgatgatgatatcgatgatgttgatgatgatggctattcatatgatgatcttgttagaatgttaggtgaggccgatgactacatgcacaaagaaaaagaaaaatttaaggccttgaaggaattgtataaaaacctccaagtgtcttttgaggagctcaagacctctcacaatgacctcaaagaaaattgtgagaagcttgggaatgctcaaaaatcatctattgtgcatgaagttgaggtggtcactaaggatgttggagtcacttgtgacttacttgatagtcttacaagtgaaccactacctactaactctatttgtgataaatgcaaaatctctctcaatgataatattgctcttgatgaatcaaaaattattgttgagaatgaagtgttagtggatagaataagtactctaactcatgacctagaaaaggcatatggtggtcttggatatgttcccaagaaaggaaagaatgcttttgtaaagcaaaagacattgtttgtgaaagaatgtgacaaagtaaactacaaggcgggagggaatcattgggtgttggatagtggatgtactcaacacatgaccggggatatgaagatgtttacccaaatgagtgatgaagattgctcaaattatgatagtatcacatttggagataatcgtaaaggaaaggttaaaggtttgggtaaaattgctatttcaaatgatcattctatatcaaatgtgctattggttgagtctttaaattttaatttactttccgtagctcaattatgtgatttaggattttgttgcaattttacggttgaagatgttattatctctagtgttgatggtagcaatcttaaatttaaaggttttagacatgaaaatctttatcttgttgatttctcatctaatgaggcaaagctcacaacttgcttattttcaaaagcttcactaggttggttatggcatagaagacttggtcatgttgggatgaagcaactcaatcggttaaccaagcatgacttagttcgaggtttaaaagatgtgaagtttgaaaagaacaaattgtgtagctcttgtcaagccggtaagcaagtggcaaatactcatccaaataaaagtcaaatgtccactcatcgacctttggaattacttcacatggatttatttgggcccacatcttttgtaagtattggtggtaattcttattgtcttgtgattgtggatgactattcaagatttacttgggtttattttctacgagacaaatccaatgtgtttgaaacattcaagtcatttgctatattggctcaaaatcaatttgatttcgacatcaaaaaggttagaagtgacaatgggtcggaattcaaaaacgcaagaattgatcaatattgtgatgacaagggtatcaaacatgaattctcttccaaatataccccggaacaaaacggtattgttgaaagaaagaatagaactcttatcgatatggcaaggtctatgttagcggaatataatatatcggattcttattgggccgaggcaataaataccgcttgtcattcatcaaatagactatattgtcacaagctcttgaagaaaactccatatgaattgctcattggtagaaagccaaatatctcatattttagggtattcggttgcaaatgttatattttaagaaagggaagccggctttctaaatttgagaagaaatgtgatgagggttttcttcttggatattcatcaaatagtaaggcttatagagtcttcaacaaaactcatggtattattgaggaagcatatgatgttgaattcgatgaaacaaatgggtctcaagatgagagtgaaaatctcgatgatgttgggggaactcaattgataaatgcaatgaaaacaatggccattggtgaaataaaaccaaaagaagatgatgatgaaaatagtgtggttgtcattccctcatcttcaactataaatgaggaagatcaccaaagccaacaactcaatgaaaccattgatactcatgatcaaggtacttcaagacctccaattcctcctaatgcttcaacaagcaattatcaaacggtatcaagaattcatcattccattgtgaaggatcacccggttgatcaaattgtgggtgatattagtaagggtgttcaaactcgctctcgcatagcttcgttttgtgaacatttctcttttgtatcttgtgtggagcctaaccgtgtagatgaagctctacttgatgttgattgggtgaatgcaatgcatgaagaattaaataacttcgctcgaaatgaagtttgggagcttgttgagagaccaaagaaccacaatgttattggtacaaaatgggtatttcgcaacaagcacaatgaagatggtgtggtagtaagaaacaaggcaagattagttgcacaaggatatactcaaattgaaggattggattttggggagacatttgctcccgtagcaagattagaagcaatccggattctacttgcttatgcttgtgcacacaatatcaagctctaccaaatggatgtaaagagcgccttcctaaatggtaagattagtgaactagtgtatgttgaacaacctcccggttttgaggaccccaaaagacctaaccatgtgttcaagctttctaaagctctctatgggcttaagcaagctcctcgcgcttggtatgaaaggcttagggatttcttgctttccaaagacttcaaaattgggaaggttgacactactctattcactaaaagaattggcaaagatttatttgtctgtcaaatctatgttgatgatattatttttggatctactaatgaattattttgtgaggagttcggaaaaatgatgtcaaaagaatttgagatgtctatgataggagaattgagcttctttcttggccttcaaatcaaacaattgaaagatggaatttttataagtcaatcaaaatatttgaaggacatgctcaagaagtttggtttagaaaatgctaagcctatcaagactccaatggcaacaaatggtcatctagacttagatgaaggaggtactatagttgatcaaaaactttatcgttcaataattggtagtttgctttatattaccgcatctaggcccgatgttatgtttagtgtatgcatgtgtgctcgatttcaagcttctcctagagagattcacttgaaggccgctaaaagaattctaagatatttgaagtatactcccaatattggtctatggtatcccaaaggtgctcaatttgaattaattggatattcggattcggactatgcggggtgcaaagttgatagaaaaagcacctccggttgttgtcaatttcttggtagatctcttgtttcatggtcttctaagaaacaaaattcggttgctctatctaccgccgaggcggaatatatatcggccggaaattgttgtgctcaactattatggatgaaacaaaccttattggactatggaattattttcaagaacgtgcctctcatgtgtgataatgagagtgcggtaaaattggctaccaatccggtccaacactcaagaaccaagcatattgatatacggcatcacttcttaagagatcatgttggcaagggagatatctctatttattccattggcaccgatgatcaattagcggacatttttacaaaaccattggatgaaacaagattttgttctctaagaagtgaaatgaatgtgattgatatctctaataaagtgggcagagattggcaaaatgagtatcaggccgcggaccgtccgcccatggaccgcggaccgtccgcagcatcaggcaatggacagtccgagcagcctcgcagactgtctgagtctcgctttgacagcaactgggatgcgctgaactctgaattttctgactttcgtgatcaaattcacactaatgtcactgatcccatcatgtcaaggctgaataatatgcaacaaagttttcaagataacatgggtgctctctccagtcagtttgacaatctttctacaactgacaacctgcatgatataagtcagaggcagcagcagctccagcaggactttggccagttctcctccttgtttgacaccttcagcactcattattacaacatgcatcccccgccaagtgatcagtaa

SEQ ID NO: 4573 - DNA, 1395 bp, Zea mays
  Clone ID: TF_ZmC5918_2
tgggaccctcgaggccggccggggctttttcgcccaaaacacttcccagccctccacgcaccccgctgccgcggctcgaacttaaaccctagagccgccggcccggtcgcgctagcgacacaaatctcaaatcacccggagagaactcgctcgcgaaggctgaactcatggctcgcgtcttcgttgggaacctggatccgcgtgtcacggcgcgggagattgaggacgagttccgcacgtttggggttctgaagagtgtatgggttgctaggaaaccaccagggtttgccttcattgacttcgatgaccgcagggatgcacaagatgccattcgcgatttggatggtaagaatggttggagggttgagctgtcaaccaaagatggtggtggccgtggccgagaccgtaatggttctgatatgaagtgctatgagtgtggtgaagttggccactttgcacgtgaatgtcgcttacggattggttcgggagggctgggtagtggaaggcgtcgcagccgaagtcctagatatcgcagccggagccgaagtcgcagccggagcccaagacatcgaaggagcccaagctatggcagaaggagctacagcccacgagatcgttctcctaggaggcgaagttacagcaggtcgccaccgagatctcgtgcacggagtctcagcaggtcgccgccactgccaccaccgcctcctagaaataacagcatgtcaccacggggagcccgagaaatgagcagatcgtcaccaccacctcccaaaaataacagcagttcaccacgggaagcccgagaaatgagcagatcgccaccaccacctgccaaaaataaccgcagttcaccacgggaagcccgagaaatgagcagatcgccgccgccaccacctcccagaaataacagcaggtcaccaccgggagctcgagatgtgagcaggtcgccgccaccacctcctgatgccagaagaagctatagcagatccccagaacagcagccccagcacgagtccccatatgccaatgacgcctgagaatatttagctgctcaaagatgctggaaaatgctaaggggcccagcatgttttgcccatgcgcgtcggtacaacttataggatccagtctgagattttgctcgtgttttgggtttcccttggacacaccgctgctgataccattgtagagggaggagcataacgtttccgtttcgagtattgactttgggcacttatagctgtcaagacatgacctggttcttgttagatttatatcactagattgcttttgaattcggacgaagtgttaatcgtgggctatgttgagatatttgtctaccttttcaggacgctttcgaagaaacattttcctactaaaaaaaaaaaaaaagcggcc

SEQ ID NO: 4574 - DNA, 909 bp, Zea mays
  Clone ID: TF_ZmC5918_5
ttgggtacctcgaggccggccggcctttccgtccaaacacttcccagccctccacgcaccccgctgccgcggctcgaacataaaccctagagccgccggcccggtcgcgctagcgacacaaatctcaaatcacccggagagaactcgctcgcgaaggctgaactcatggctcgcgtcttcgttgggaacctggatccgcgtgtcacggcgcgggagattgaggacgagttccgcacgtttggggttctgaagagtgtatgggttgctaggaaaccaccagggtttgccttcattgacttcgatgaccgcagggatgcacaagatgccattcgcgatttggatggtaagaatggttggagggttgagctgtcaaccaaagatggtggtggccgtggccgagaccgtaatggttctgatatgaagtgctatgagtgtggtgaagttggccactttgcacgtgaatgtcgcttacggattggttcgggagggctgggtagtggaaggcgtcgcagccgaagtcctagatatcgcagccggagccgaagtcgcagccggagcccaagacatcgaaggagcccaagctatggcagaaggagctacagcccacgagatcgttctcctaggaggcgaagttacagcaggtcgccgccactgccaccaccgcctcctagaaataacagcatgtcaccacggggagcccgagaaatgagcagatcgtcaccaccacctcccaaaaataacagcagttcaccacgggaagcccgagaaatgagcagatcgccaccaccacctgccaaaaataaccgcagttcaccacgggaagcccgagaaatgagcagatcgccgccgccaccacctcccagaaataacagcaggtcaccaccgggagctcgagatgtgagcaggtcg

SEQ ID NO: 4575 - DNA, 1830 bp, Zea mays
  Clone ID: TF_ZM4269.C1.o9.fg
atgagccataagccaccgacatttgctagttctcctgatccactggacacagatgattggctgaagtccgtagagaagatgttgaacattgctcagtgcactgaccgggagaaggttttatatgcttctggacgtctgacaggccctgctgctgattggtgggattcatatactgctgcccacgatgttgctgacactaccacacgggcggagttcacgacgcagtttaagaaccatcatataccagctggactgatgaaaattaagaagaaggaattcctatcgctgaagcagggaagcatgtcagttagcaagtaccgcgacaagttcatccagttatccagatatgtgcctgatgaagttgctgaagatgagaggaaacaggagcattttattgaaggacttaatggacccctgtacaccccgacgaaattctcaggacagagtgcaggcactacttgctacaagtgtgggaagattggacattatgcaaatgtttgcccacagaggattgctactactccagttcagaataagcagcagactccaggatctggcaagggatactctattgctagggttaatcaagtcagcgttgatgctactcctgatggtgctgacatcgtacttggtatgttttacgttaatgcaattcctgcaaccatattatttgattctggtgctacacattcatttatgtctgctcgatatgccaacacaaatgagataccactgctaaatatgagaaaaccaatgatagtaattacacctaaagggcctgttgaggcaaatcaaatgacacgtagattgacattaacaattatggcaagagaatttggagctactgctataatattagaggcaaccagtatagatctgatccttggtatgtcatggttaagaaaggcaaaggccattatagcatgtggtaggggtacggtagaacttaccagccctaaaggagaaatatttcaagttcaaattacagtaaccacctcatccaaacgtgcaatgttctttatacccgaggagtttgttggcgacaacatccgtgtggttagggattttctggatgtctttccagaggagttaccagggatgccaccagatagggaagttgagtttgtaagagatcttttacctggaactgcccctatttctaaacggccatacatgatgtctgtagaagagttaaaggaactgaagaagcagttaaccgagttacaagaggctgggtacattcgttcgagttcctcaccttggagagcgccagttttgtttgtacagaagaaggatggatcacaaagaatgtgtgtggattatagatcccttaatgatgtcactatgaagaacaagtatctgttaccccgcattgaggatttatttgatcagatgagaggtgcaagggtattctcgaagattgatctccgatcgggttaccatcagatgaggattagaccatcggatattcccaagacaacattctcgacccgatatggattatatgagttcattgttatgtcatttggattaaccaatgcacaaacttattttatggatttgatgaataagtttagcaaatgcgagttttggattggcgaggtgccctttcttggacatatcatttctaatggagggatatcagtggatcctgctaaagtcaaggaaataatggcgtggggcgtacccactatagttacggagattcggagtttcttggaactagcaggatattattggagatttattgaaggattttctaagattgctaagcctatgacctcgcttctggagaagggaagagagtttaagtgggacgagaagtgctag

SEQ ID NO: 4576 - DNA, 3705 bp, Zea mays
  Clone ID: TF_ZM4411.C1.o3.fg
atgtcgggagaacacgccaagaaggagatggtgatcggcgagaagcccgccataagccacgggaaagctccatcgggagagtcacgcaacaagaagaaggaggaatcacctcctcacaagtcgcatcggagtggcgacaagaagaaaaagatgaagaaggtggtctactacgagaccgattcttcatcgccatccacctccggctccgacgcgtcgtccgtaacttctaagtgccatgagcgcaagaagtttagtaagatccccctacgctatccttgcatttccaaacgtactccattactttccgttccattaggcaaaccaccggttttttacggtgaagattataacatgtggagtgataaaatgaggcatcacctaacctcactccacactagtatttgggacgttgttgagtttggagtgcaggtaccatccgtaggggatgaagattatgattcggacgaagttgcccaaatccggcacttcaactcccaagctaccaccatactcctcgcctctctaagtcgagaggagtataacaaggtgcaagggttgaagagcgccaaggagatttgggacgtgctcaaaaccgtgcacgaaggagacgaggtgaccaagatcaccaagagggagacgatcaagggggagctcggtcgtttcatgctcaaccaaggagaagacccgcaagccatgtacaaccggctaaaaaccttggtgaatcaagtgcgcaaccttgggagcactaaatgggatgaccatgaaatggtcaaggttattcttagatcacttgtttttcttaaccctactcaagttcaattaattcgtggtgatccaagatataaactaatgtctcccgaggaagtgataggaaaatttgtgagctttgaattgatgatcaaaggctccaagaaaatcatcgagcaaggcgccacctcaacatccaaggtgcaacccgtcgcattcaaggcgacggaagaagaaaagaaagactctacaccgagtagggtccccatcgatgcctccaagctcgacaatgaggaaatggcgctcatcatcaagagcttccaccaaatcctcaaacaaagaagggggaaagactacaagccccgctccaagaaggtttgctacaactgtggtaagcccggtcattttatcgctaaatgtcctttgtatagtgatagtgacagggataacgacaagagggggaagaaggagaagaagagatattacaagaagaagggcggcgatgcccatgtttgccaggagtgggactccgacgagagctccaccgactcctcctccgacgaggacgctgccaacatcgccatcaacaaaggcctcctcttccccaacgtcggccacaagtgcctcatggcaaaggacggcaaaaagaagaaggtaaaatcaagatcatccactaagtatgcaacttctagtgatgaggataattctagtgatgatgaggacaacttgcttactctttttgccaatcttaacatacaacaaaaagagaaattaaatgaattgattagtgctattcatgagaagtatgaactcttggatagccaagaggacttccttattaaggaaaacaaaaagcatgttaagactaaaaatgcttatgctcaggagattgacatgttgaatgaatctcttgctagccttaagtttgagaatgataaattaattgctaaggctaaggaattagatgtttgcaatgtttctatttccaatcttagaaatgagaatgctattctacatgctaagattgttgaattaaatgattgcaaaccctctacatctactgttgagcatgtttctatttgtactagatgtagagacattaacattgatgctattcatgatcaccttgctatgattaaacaacaaaatgatcatatagctaaactagatgctaaaattgccgagcatgaattagagaatgaaaaatttaaatttcctcgtggcatgctttatagtgggagacgtcctggcattaaggatggtattggcttccaacagggagacaatgtcaagcttaatgcccctcctaaaagattgtctaattttgttaagggcaaagctcccatgcctcaggataacgagggttatattttgtatcctgctggcaaagtagttgccaaatatgttgggggcaaatacaagggctccaagacttgtatttgggtacccaaggccactggagctactccacatggatctattcggctcgatcgcttacataagcatcggcatgaagtttttggtagcaaatgctttattcttgttaaaagaggtagaaaatctaaatttgctcctaaggctgtagaaggctttttacttggttgtgattcaaacacaagggtatatagagtctttaacaagtccactggactagttgaagtttcttgtgacattgtgtttgatgagtctaacggctctcaagtagagcaagttgatcttgatgagctagatgatgaagaggctccgtgcatcgcgctaaggaacatgtccattggggatgtgtgtcctaaggaatccgaagagcctccacaagcacaagatcatcaaccatcttcctccatgaaagcatctccaccaacccaagatgaggatcaagctcaagaggatgaaaatgaagatcaagaagatgagccacctcaagaggaggacattgatcaagggggagatgccaatgatcaagacaaggaagatgatgaggatccaagaccgccacacccaagagtccaccaagcaatccaacgaaatcaccccatgaacaccatccttggcgacattcataaggggccacacagggtagaggaagcacttcaagattcggattgggtgctggcgatgcaagaggagcttaataacttcacgaggaatgaggtatggcatttagttccatgtcctaaccaaaatgttgtagcaaccaaatgggtcttccgcaacaagcaagatgagcatggtgtggtgacaaggaacaaggcacgacttgtgcccaaggggtattcacaagtcgaaggtttggattttggtgaaacctatgcacctgtagctaggcttgagtcaattcgtatattgcttgcctatgctacttaccatggttttaagctctatcaaatggacgtgaagattgccttcctcaatggaccaattaaagaagaggtctatgttgagcaacctccaggctttgaagatagtgagtatcctaaccatgtctacaaactctctaaggcgctttatgggctcaagcaagccccaagagcatggtatgaatgcctaagagattttcttatcactaatggcttcaaagtcggcaaggccgatcctacactctttactaaaacaaatgaaaatgatttgttttttagtaggatcatgattcaaaaattcgagatgtctatgatgggggagttgaagtattttctaggatttcaagtcaagcaactccaacagggcaccttcattagtcaaacgaagtacattcaagacatactcaccaagtttggaatgaaggatgccaagcccatcaagacacccatgagaaccaatgggcatctcgacctcgacatgggaggtaaatccgtagatcaaaaggaagagcacatcagggacttgtcagtttctggggagatccctggtgtcttgggcttcaaagaaacaaaactcagtagctctttctaccgccgaagctga

SEQ ID NO: 4577 - DNA, 2973 bp, Zea mays
  Clone ID: TF_ZmC4916_354
atggatcctaagggcaaggggattgtgatcaatgacaaggagaaggagtcattcgtcaacgagcccaaggatgacaagactaccgacttgggctcgggccacaaacgcaaagatgggaagaagaagaagacaagacgcatcaaggatatcgtctactacgacgacagcgatgagtccacttcttcccaaaaggacaacgacgacaacgactacgagagaaggaaaccggttaattcaaacttttcttttgactactctcgtattccgcaaagtacaaatgctcattcgctctccattccacttggcaaacctcctcactttgatggagaggactacggattttggagccacaaaatgcgtagtcacctattctctctccatccgagcatatgggagattgtggaaagtggaatgaaatttgatagctcggatagtcctatgtttatcaatgaacagattcatagaaatgcacaagctactactgtgttgttagcctccttgtgcagggacgagtatcataaggtgagcggcttggacaatgccaagcagatctgggacaccctcaggatctcacatgaggggaacgacgtcaccttactcaccaaaatggagttggtggagggcgagcttggaagattcacaatgatcaggggagaggagccaacccaaacatacaacaggctcaagacccttatcaacaagataaggagctacagaagcacacaatggacggaccacgacgtcgttcgtctaatgctaaggtcctttactgtacttgatccacatttggtgaacaatatctgtgaaaatcctaggtacaccaagatgtcgcccgaagaagttcttgggaaatttgtaagcgggcgaatgatgatcaaggaggcaagatatgtcgacgacgcgttgaacggtccaatccatgagcctcaacccattgctctcaaggcaacgaggagcaaggaggcgctacctagcaaggtggcgcaagttgaggcggccgggctcaatgatgaagagatggccctcatcatcaagcgcttcaagacggcgctaaagggtcgcaagggacagccaagcaagaccaagacaaaggggaagcgctcatgcttcaaatgtggtaaggttggtcattttattgctaactgtcctgacaatgatagtgaccaggaagaagggaacaagagggagaagaagaagaattataagaaggcaaaaggcgaggaacatcttggcaaggagtgggactcggattgttcgtcgtccgactccgacaacgaaggactcgccgccactgccttcaacaagtcatccctcttccccaacgagcatcacacttgcctcatggcaagggaaaagaagggtctagatagagccaaggtggataaaataaatgaattgattgatgctttgaatgataagaatagattgctagaaaagcaagaggatctcttatatgatgaacatgacaagtttgtagaagctaaaaaatcccttgctttagaaataaagaggaatgaaatgctttcttgtgaattgtctacatgccatgactctatttctagtttaaaaagcataaacgatgacttgactgctaagttagaaatagctaataaatcaacatcttgtgtagaacatgttgtggtttgcactaggtgtaaagattttaatattgatgcttgtagtgaacacctagtttcaatttctaaattgaatgatgaagtagctagtcttaatgcccaacttaagactagcaaaagcgaatttgataagttaaaatttgcaagggatgcctacacgattggtagacacccctcaattaaggatggacttggtttcaagagggaagccaagaacttaacaagccataaggctcccatccccgccaaggagaaagggaaggcccctatggctagtagtactaaaaggaaccatgcttttatgtaccatgatagaagacagtctaataagagttgtaatgcttatgatgcttttgactctcatgccatgtttgcttctagttcttcctatatgcatggtaaagatatgtctaggagacattttgttcatatgcctaggagaaatgttgttaatgttcctaggaatgttaatgaaccttctacaatatatcatgctttaaatgcttcctttgctatttgtagaaaggataggaagatagttgctagaaatataggggcaaaatgcaagggagacaaaacttgcatttgggtccctaagacaattgtgactaaccttgtaggacccaacaagagttgggtttatgcatctgggggttcaagctggattatcgacagcggatgcacaaaccatatgacgggggagaagaagatgttcacctcctatgtcaaaaacaaggattcccaagattcaataatattcggtgatgggaatcaaggcaaggataagtctgaaacccaagggaccctcaagcgcttcctaaggagagctcaaaatgagtttgagctcaaagtgaaaaagataaggagcgacaacgggtccgagttcaagaaccttcaagtggaggaatttcttgaggaggaggggatcaagcacgagttctccgctccctacacacctcagcaaaatggtgtggtagagaggaagaacaggacgctcatagatatggcgaggactatgcttggagaatttaagacccccgagtgcttttggtcggaagccgtgaacacagcttgccacgccatcaacagggtctaccttcaccgcctcctcaagaagacttcgtatgagctactaaccggtaacaaacccaatatgaagaagatgttccgacggccgctatacgaaccatggcgattggagaagtgcggccacaggaacaagatgaacgagatcaaccttcttcctcaacaacggtgcatcccccacctcaagatgatgaataggttcatcaaaaggagacgtgtgatcaagggggagcacaagatgttcacgtga

SEQ ID NO: 4578 - DNA, 4934 bp, Zea mays
  Clone ID: TF_ZmC4916_357
aaagagactaatcgcccgaagatatggatcctaagggaaaggggatggtggtcaacgacaatgagaaggagtccatcttcaacgagccaagggacgacaaagtcaatgactccggctcgagtcaaaagaagaaagacggaaagaagaagaggcacatcaggaaggttgtctactacgacagcgacgaatcttcctcttctcaaaaggacgacgaatacgaggaaaaaaagaaaacggttaactcgaacttttcttttgattgttctcgtattccgcataattccaatgctcatttgctttccattccacttggtaaacccccacactttgatggagaggactacggattttggagtcacaaaatgcgtagccacttgttctctcttcatccaagtatatgggagatagtagaaaatggaatgcaatttgatagttcggataactccatgtttatcaatgaacaaatccataaaaatgcacaagctactactattcttttagcatccttgtgtagggaagaatacaataaggtgagcggcttggacaacgccaagcagatttgggacaccctcaagatctcgcatgaggggaacgacgtcaccatgctcaccaagatggagttggtggaaggcgaactaggaaggttcgcaatgatcaggggagaagagccaactcaaacgtacaataggctcaagaccctggtcaacaagataagaagctatggaagcacgagatggacggaccacgacgttgtccggcatatgctaaggtccttcactgtccttgatcctcatcttgtaaactctattcgtgagaatcctaggtacatcaagatgacgcccgaggaaatactcgagaagtttgtaagcgggcgaatgatgatcaaggaggcgagatacgttgatgagtcgttaaatggcccaatccacgagcctcaaaccattgctctaaaagcaacaagtagtagggaggcactacctagcaaggtggcgcaagttgaggcggccggactaaatgaagatgaaatggccctcatcatcaagcgcttcaagacggcgctcaaaggtcacaaggagcatcccaacaagagcaagacgaaggggaagcgctcctgcttcaaatgtggtaaggttggtcactttattgctaactgtcctgataatgatggtgaccaggataaagaaaagaagagggaaaagaagaagacttacaagaaagcgaagggcgaggcacatcttggcaaagagtgggactcggattgctcttcatccgacgacaaaggacttgccgcctcggccttcaacaaatcatccctcttccccaacgagcatcacacctgcctgatggcaaaggaaaagaaggtatacactagggatactattacatatgcttcttcaagtgatgatgaatctagcgatgatgaaatagactatgctagtttattcaaaggtttagatagaactaaaattgataaaatcaatgagttaattgatgctttgaatgacaagaatagattattagaaaagcaagaggatcttttgtatgaagagcatgataaatttgtagatgtccaaaaatctcttgctttagaagttaaaaggaatgaaatgctttcttgtgaattatctacttgccatgagactatttctagtttaaaaagtgttaatgatgatttaaatgctaagctagaagtagcaaatagatccaattcttgtgaagaacatgtagtgatttgcaataggttcttaatgcccaacttaagactagcaaaaattattgacaaactaaaatttgcaagtgatgcctacactgttggtagacacccctcaattaaggatgggcttggctttaagagggaagccaagaacttaactagttataaggctcccatctccgccaaggataaagggaaggcccctatggctaatagtgttcaaaagaatcatgctttcatttatagtgatagaaaattctctagaaatgcttataggaattattcttatgattcatatgctatgcctgcttctagttcttctattgtgcatgatatgcctaggaaaaatattattcatcatatgcctaggagaaatgttgctcatgtacctaggaaaccaagtaatgaaccttctacaatttatcatgcttgcaatgcttcctttgcaatttgtagaaaggataagaaagtggttgctaggaaattaggggcaaaatgcaagggagataaagcttgcatttgggtccctaaggctattgtcactaaccttgtaggacccaacaagagttgggtttatgcatccgggggctcaagctggtttatcgacagcggatgcacaaaccacatgtcgggggagaagaagatgttcacctcctacgtcaagaacaaagattcccaagattcaatcatattcggtgacgagaatcaaggcaagatagaccttgtgcagcttgtcaagcaggataaaatagaaacccaagggaccgtcaagcgcttcctaaggagagctcaaaatgagtttgagctcaaggtgaagaagataaggagcgacaacggatccgagttcaagaaccttcaagtggaggagtaccttgaggaggaaggaatcaagcacgagttctccgctccctacacaccacagcaaaatggtgtggtagagaggaggaacaagacgctcattgacatgtcaaggacgatgcttggagagttcaagatccccgagcggttttggtcggaagccgtgaacacggcttgccacaccataaatcgggtctaccttcatcgcctcctcaagaagacgtcgtacgaacttctaaccggtaacaaacccaatgtttcatactttcgtgtatttgggagtaaatgctacattctagtgaagaaaggtaggaattctaaatttgcccccaaagctgtagaagggtttttgttaggttatgactcaaatacaaaggcgtatagggtcttcaacaaatcatcgggtttggttgaagtctctagcgacgttgtatttgatgagactaatggctctccaagagagaaagttgttaatcctaatgatgtagatgaatatgatgttccaacggacgcaattcgcaccatggcgattggagatgtgcgaccacaggaacaccaagagcaagatcaaccttcttcctcaacattggtgcaccccccaactcaagacgatgaacaggttcatcaagaagaggcgtgtgatcaaggaggagcacaagatgatcatgttatggatgaagaagcacctcaagcccctccaacccaagtccgagcgacgattcaaaggaatcatcccgtcgaccagatattgggtgatattagcaagggagtaactactcgctctagattagttaatttctgtgagcattgctcttttgtctcttctattgagcctttcagggtagaagatgccttgctagatccggattgggtgttggccatgcaggaggagctcaacaatttcaagagaaatgaattttggacactggtgccacgtcccaagcaaaacgttgtgggaaccaagtgggtgttccgcaacaaacaagatgagcacggggtggtgacaaggaacaaggcacgacttgtggcaaaaggttatgcccaagtcacaggtttggactttgaggagacttttgatcctgtggctaggctagagtcaattcgcatattgttagcctatgccgctcaccattctttcaggttgttccaaatggatgtgaagagcgctttcctcaacgggccaatcaaggaggaggtgtacgtagagcaaccccctagctttaaggatgaacggtaccccaaccacgtgtgcaagctctctaaggcgctctatggacttaagcaagccctaagagcatggtacgaatgccttagagactttttaatcgctaatgctttcaaggttgggaaagccgatccaactttattcactaagacttgtgatggtgacttatttgtgtgccaaatttatgtggatgacataatatttggttctactaaccaaaagtcttgtgaagagtttagcagggtgatgactcaaaagtttgaaatgtcgatgatgggcgagttgaactactttcttgggttccaagtgaagcaactcaaggacggcactttcatctcccaaacgaagtacacgcaagacttgatcaagcggtttgggatgaaggacgccaagcccgcaaagactccaatgggaactgacggacacgtcgccctcaacaaaggaggtaagtccgttgatcaaaaagcataccggtctatgataggttccttgctttacttatgtgctagtagaccggatattatgcttagtgtatgcatgtgtgctagatttcaatccgatccaagggagtgtcacttagtggtcgtgaagcgaattcttagatatttagtcgctacgccttgcttcgggatctggtatccaaaggggtctacctttgacttgattggatattcagactccgattatgctggatgtaaggttgataggaagagtacatcagggacgtgccaattcttaggaaggtccctggtgtcttggagttctaagaaacaaacttctgttgctctatccaccgctgaggccgagtatgttgccgcaggacagtgttgcgcgcaactactttggatgaggcaaaccctccgggactttggctacaatctaagcaaagtcctactcctatgtgataatgagagtgctatccgtatggcggataatcctgttgaacacagccgcacaaagcacatagacatctggcatcactttttgagagaccaccagcaaaagggagatatcgaagtgttttatgttagcaccgagaaccagctagccgatatctttacgaagcctctagatgagtcaaccttttgcaggctgcgtagtgagctaaatgtcttagattcgcggaactctgattga

SEQ ID NO: 4579 - DNA, 1275 bp, Zea mays
  Clone ID: TF_ZmC4916_412
atggatcctaaagggaaggggatggtgatcgacgacaaggagaaggaatccttcatcaatgagccaaaagacgacaagcccactgactcgggctcaagtcaaaagaagaaggatggaaagaagaagaggcgcatcaagaagattgtctactacgacagcgacgaatcttcctcttctcaaaaggacgacggatacaaggagaaaaagaaaacggttaactcgaacttttctttcgattattctcgtattccgcataattccaatgctcatttgctctccattccacatggtaaacctccacactttgatggagaggactatggattttggagtcacaaaatgcgtagccacttgttttctcttcatccaagtatatgggagatagtagaaaatgggatgcgatttgatagttcggataactccatgtttatcaatgaacaaatccataaaaatgcacaagctactactgttcttttagcatccttgtgcagggaagagtacaataaggtgagcggcttggacaacgccaagcagatttgggacaccctcaagatctcgcatgaggggaatgacgtcaccatgctcaccaagatggagttggtggaaggcgaactaggaaggttcgcaatgatcaggggagaggagccaactcaaacgtacaataggctcaagaccctggtcaacaagataagaagctatggaagcacgagatggacggaccacgacgtcgtccgacttatgctaaggtccttcactgtccttgatcctcatcttgtaaactctattcgtgagaatcctaggtacatcaagatgacgcccaaggaaatactcagaaaatttgtaagcgggcgaatgatgatcaaggaggcgagatacgttgatgaggcgttgaatggcccaatctacgagcctcaaactgttgctctcaaagcaacaagtaacagggagacgctacctagcaagcgcttcaagacggcgctcaaaggtcgcaaggagcaccccaacaagagcaagacgaaggggaagcgctcttgcttcaagtgtggtaaggttggtcactttattgctaactgtcctgataatgatagtgaccaagatcaagaaaagaagagggaaaagaagaagacttacaagaaagcgaaaggcgaggcacaccttggcaaagagtgggactcggattgctcttcaaacgacaatgaaggacttgccacctcggccttcaacaaatcatccctcttccccaacgagcatcacacctgcctcatggcaaagtaa

SEQ ID NO: 4580 - DNA, 3648 bp, Zea mays
  Clone ID: TF_ZM3638.C2.o1.fg
atggccctaggctcgggccacaaacgcaaagatgggaagaagaagaagacaagacgcatcaagaagatcgtctactacgacgatagcgatgagtccacttcttcccaaaaggacaacgacgacaacgactacgagagaaggaaaccggttaattcgaacttttcttttgactactctcgcattccgcaaagtacaaatgctcatttgctctccattccacttggcaaacctcctcactttgatggagaggactacggattttggagccacaaaatgcgtagtcacctattctctctccatccgagcatatgggagattgtggaaagtggaatgaaatttgatagctcggatagtcctatgtttatcaatgaacagattcatggaaatgcacaagctactactgtgttgttagcctccttgtgcagggacgagtatcataaggtgagcggcttggacaatgccaagcagatctgggacaccctcagaatctcacatgaggggaacgacgtcaccttactcacgaaaatggagttggtggagggcgagcttggaagattcgcaatgatcaggggagaggagccaacccaaacatacaaccggctcaagacccttatcaacaagataaggagctacggaagcacacgatggacggaccacgacgtcgttcgtctaatgctaaggtcttttactgtacttgatccacatttggtgaacaatatccgtgaaaatcctaggtacaccaagatgtcgcccgaagaagttcttgggaaatttgtaagcgggcgaatgatgatcaaggaggcaagatatgtcgacgacgcgttgaacggtccaatccatgagcctcaacccattgctctcaaggcaacgaggagcaaggaggcgctacctagcaagcgcttcaagacggcgctaaagggtcgcaaggggcagccaagcaagaccaagacaaaggggaagcgctcatgcttcaaatgtggtaaggttggtcattttattgctaattgtcccgacaatgatagtgaccaggaagaagggaacaagagggagaagaagaagaagaactataagaaggcaaaaggcgaggcacatcttggcaaggagtgggactcgaattgttcgtcgtccgactccgacaacgaaggactcgccgtcactgccttcaacaagtcatccctcttccgcaacgagcatcacacttgcctcatggcaagggaaaagaagggtctagatagaaccaaggtggataaaataaatgaattgattgatgctttgaatgataagaatagattgctagaaaagcaagaggatctcttatatgatgaacatgacaagtttgtagaagctcaaaaatcccttgctttagaaataaagaggaatgaaatgctttcttgtgaattgtctacatgtcatgactctatttctagtttaaaaagcataaacgatgaattgaatgctaagttagaaatagctaataaatcaacatcttgtgtagaacatgttgtggtttgcactaggtgtaaagattttaatgttgaagcttgtagtgaacacctagtttcaatttctaaattgaatgatgaagtggctagtcttcatgcccaacttaagactagcaaaagtgaatttgataagttaaaatttgcaagggatgcctacacgattggtagacacccctcaattaaggatggacttggtttcaagagggaagtcaaggacttaacaagccataaggctcccatctccgccaaggagaaaggaaaggcccctatggctagtagtgctagaaagaatcatgcttttatgtaccatgatagaagacagtctaataagagttgtaatgcttatgatgcttttgactctcatgccatgtttgcttctagttcttcctatatgcatggtaaagatatgtctaggagatattttgttcatatgcctaggagaaatgttgttaatgttcctaggaaagttaatgaaccttctacaatatatcatactttaaatgcttcctttgctatttgtagaaaggataggaagatagttgctagaaaattaggggcaaaatgcaagggagacaaaacttgcatttgggtccctaagacaattgtgactaaccttgtaggacccaacaagagttgggtttatgcatccgggggttcaagctggattatcgacagcggatgcacaaaccatatgacgggggagaagaagatgttcacctcctacgtcaaaaacaaggattcccaagattcaataatattcggtgatgggaatcaaggcaaggtaaaagggttagatgtgtctgtctttagaagaagtgatggttcattagcttttaagggtgtattagacgacaaactttacttagttgattttgcaaaagaggaagccggtctagatgcatgcttaattgctaagactagcatgggctggctgtggcatcgccgcttagcacatgtggggatgaagaaccttcacaagcttctaaagggagaacacgtgataggtttaactaatgtgcaattcgaaaaagatagaccttgtgcagcttgtcaagcaggcaaacaggtgggaagctctcatcacaccaaaaatgtgatgaccacatcaagacctttggagatgcttcacatggacctcttcggacccgtcgcctatctaagtataggaggaagtaagtatggtcttgttatagttgatgacttttcccgcttcacttgggtattctttttgcaggataaatctgaaacccaagggaccctcaagcgcttcctaaggagagctcaaaacgagtttgagctcaaggtgaaaaagataaggagcgacaatgggtccgagttcaagaaccttcaagtggaggagtaccttgaggaggaagggatcaagcacgagttctccgctccctacacaccacaacaaaatggtgtggtagagaggaagaacaggacgcttatagacatggcgaggacgatgcttggagagttcaagacccccgagcgcttttggtcggaagccgtgaacacggcttgccacgccatcaacagggtctaccttcatcgcctcctcaagaagacgtcgtatgagctactaaccggtaacaaacccaatgttttgtattttcgagtttttgggagtaaatgctacattctagtgaagaagggtaggaattcaaagtttgctcccaaagccgtagaagcgtttttgttaggttatgactcaaatacaaaggcgtatagagtcttcaacaaatcattgggtttggttgaagtctctagcgacgttgtatttgatgagactaatggctctccaagagagcaagttgttgattttgatgatgtagatgaagaagaagttccaacggccgcaatacgcaccatggcgattggagatgtgcggccacacgaacaaaatgagcgagatcaaccttcttcctcaacaatggtgcaacccccaactcaagatgatgaacaggaggcgtgtgatcaagggggagcacaagatgatcatgtaatggaggaagaagcgcaaccggcacctctaacccaagttcgagcgatgattcaaagggatcatcccgtcgaccaaattttgggtgatattagcaagggagtaactactcgatctcgattagttaacttttgtgagtga

SEQ ID NO: 4581 - DNA, 1164 bp, Zea mays
  Clone ID: TF_ZM4321.C3.o5.fg
atggatcctaagggaaaggggatggtggtcaacgacaatgagaaggagtccatcttcaacgagccaagggacgacaaagtcaatgactccggctcgagtcaaaagaagaaagatggaaagaagaagaggcgcatcaggaaggttgtctactacgacagcgacgaatcttcctcttctcaaaaggacgacgaatacgaggagaaaaagaaaacggttaattcgaacttttcttttgattactctcgttttccgcataattccaatgctcatttgctttctattccacttgggaagaatacaataaggtgggcatccttgtgcagggaagaatacaatgccaagcagatctgggacaccctcaagatctcaaatgaggggaacgacgtcaccatgctcactaagatggaattggtggaaggcgaactaggaaggttcacaatgattaggggagaggagccaacccaaacgtacaacaggctaaagaccctcgtcaacaaaataaggcgctatggaagcacgcgatggacggaccacgacgtcgtccgacttatgctaaggtctttcaccgtcattgatcctcatcttgttaactctattcgtgagaatcctaggtacaccaagatgacgcccgaggaaatacttggaaagtttgtaagcgggcggatgatgatcaaggaagcaagaatcgttgatgatgcgttgaatggcccaatccacgagcctcaacccattgctctcaaagcaacgaggagcagggagatgctacctagcaaggtggcgcaagttgagacggccgggcttaacgaggaagaaatggccctcatcattaagcgtttcaagacggcactcaaaggtcgcaaggagcatcccaacaagagcaagacgaagggaaagcgctcctgcttcaagtgtggtaaggttggtcactttattgctaattgtcccgataatgatagtgaccaggatcaagaaaagaagagggaaaagaagaagacctacaagaaggctaagggcgaggcacaccttggcaaggagtggaactcaaattgttcatcgtctgactctgacgacgaaggattcgccgcctcggccttcaacaaatcgtccctcttccccaacgagcatcacacatgccttatggcaaaggagaagaagaacatgtag

SEQ ID NO: 4582 - DNA, 1395 bp, Zea mays
  Clone ID: TF_ZM4355.C1.o9.fg
atggatcctaaggggaagggaatcgtgatcaatgataaggaggagtccttcgtcaacgagccgaaggatgacaagcctaccgactcgggctcgggtcacaaacgaaaggatgggaagaagaagaagacaaggcgcatcaaggagatcgtctactacgactacagcgacgagtccacttcttcccaaaaggacaacgacgacaacgactacaggaaaccgatctgggacaccctcaggatctcacatgaggggaacgacgtcaccttactcaccaaaatggagttggtggagggcgagcttggaagattcgcaatgatcaggggagaggagccaacccaaacatacaaccggctcaagaccctcatcaacaagataaggagctacggaagcacacgatggacgaaccacgacgtcgttcgtctaatgctaaggtcctttactgtacttgatccacatttggtgaacaatatccgtgaaaatcctaggtacaccaagatgtcgcccgaagaagttcttgggaaatttgtaagcgggcgaatgatgatcaaggaggcgagatatgtcgacgacgcgttgaacggtccaatccatgagcctcaacccattgctctcaaggcaacgaggagcaaggaggcgctacctagcaaggtggcgcaagttgaggcggccgggctcaatgatgaagagatgactctcatcatcaagcgcttcaagacggcgctaaagggtcgcaaggggcagccaagcaagaccaagacaaaggggaagcgctcatgcttcaaatgtggtaaggttggtcattttattgctaattgtcccgacaatgatagtgaccaggaacaagggaacaagagggagaagaagaactataagaaggcaaaaggcgaggcacatcttggcaaggagtgggactcggattgttcattgtctgactccgacaacgaaggactcgccgccactgccttcaacaagtcatccctcttccccaacgagcatcacacttgcctcatggcaagggaaaagaagggtctagatagaaccaaggtggataaaataaatgaattaattgatgctttgaatgataagaatagattgctagaaaagcaagaggatctcttatatgatgaacatgataagtttgtagaagctcaaaaatcccttgctttagaaataaagagaaatgaaatgctttcttgtgaattgtctacatgccatgactctatttctagtttaaaaagcataaacgatgacttgaatgctaagttagaaatagctaataaatcaacatcttgtgtagaacatgttgtggtttgcactaggtgtaaagattttaatgttgatgcttgtagtgaacacctagtttcaatttctaaattgaatgataaagtggtgtaa

SEQ ID NO: 4583 - DNA, 4398 bp, Zea mays
  Clone ID: TF_ZM4543.C1.o1.fg
atgacgcccgaggagatacttggaaagttcgtaagcgggcgaatgatgatcaaggaggcgagatatgttgatgaggcgttaaatggcccaatccatgagcctcaaaccattgctctaaaagcaacaagtagcagggaggcactacctagcaaggtggcgcaagttgaggcagccgggctaaatgaagatgaaatgaccctcatcatcaagcgcttcaagacggcgctcaaaggtcgcaaggagcatcccaacaggagcaagacaaaggggaagcgctcctgcttcaagtgtggtaaggttggtcactttattgctaactgtcctgataatgatagtgaccaggatcaagaaaagaagagggaaaataagaagacttacaagaaagcgaagggcgaggcacaccttggcaaagagtgggactcggattgctcttcatccgacgacgaaggacttgccgcctcggccttcaacaaatcatccctcttccccaacgagcatcacacctgcctcatagcaacggaaaagaagaatagattattagaaaagcaagaggatcttttgtacgaagagcatgataaatttgtagatgtccaaaaatctcttgctttagaagttaaaatgaatgaaatgctttcttgtgaattatctacttgccatgagactatttctagtttaaaaagtgttaatgatgatttaaatgctaagctagaagtagcaaataaatctagttcttgtgtagaacatgtagtgatttgcaataagtgtaaggactttaatgttgatgcctgtgttgagcaccttacttctattgcaaaactaaatggtgaagtggctagtcttaatgcccaacttaagactagcaaaaatgaatttgataaactaaaatttgcaagggatgcctacactgttggcagacacccctcaattaaggatgggcttggctttaagagggaagccaagaacttaacaagtcataaggctcccatctccgccaaggagaaagggaaggcccctatggctaatagtgttcaaaagaatcatgctttcatttatagtgatagaaaattctctagaaatgcttatagaaattattcttatgattcatatgctatgcctgcttctagtttctctattgtgcatgatatgcctaggaaaaatgttattcatcatatgcctagaaaaaatgttgttcatgtacctaggaaagcaagtaatgaaccttctacaatttatcatgcttgcaatgcttcctttgcaatttgtagaaaggataagaaagtgattgctaggaaattaggggcaaaatgcaagggagataaaacttgcatttgggtccctaaggctattgtcactaaccttgcaggacccaacaagagttgggtttatgcatccgggggctcaagctggattatcgacagcggatgcacaaaccacatgacaggggagaagaagatgttcacctcctacgtcaagaacaaggattcccaagattcaatcatattcggtgatgggaaccaaggcaaggttaaaggactaggaaaaatagcaatttcatccgagcattccatttctaatgtgtttttagtggaatcgctcggatataacttgttgtttgttagtcaattatgtaatatggggtataattgcttatttacaaatgtagatgtgtctgtctttagaaggagtgatggttcattagcttttaagggtgtactagacgataaactctatttagttgattttgcaaaggaggaggccggtctagatgcatgtttgattgctaagactagcatgggctggttgtggcatcgccgtctagcacatgtggggatgaagaaccttcacaaacttctaaagggagaacatgtgttaggactaacaaatgtgactttcgaaaaagatagaccttgtgcagcttgtcaagcaggtaagcaggtgggaagtgctcatcacagcaagaatgtaatgaccacatcaagacctctggagttacttcatatggacctcttcggacccgtcgcctacctaagcataggaggaaaaacccaagggaccctcaagcgcttcctaaggagagctcaaaatgagtttgagctcaagcaaaacggtgtggtagagaggaagaacaggacactcatcgacatggcgaggacgatgcttggagagttcaagacggccgagtggttttggtcggaagccgtgaacatggcttgccacgccataaaccgggtctaccttcatcgcctcctcaagaagacttcgtacaaactcctaaccagtaaaaaacccaatgtatcatactttcgtgtttttgggagcaactgttatattctagtgaagaaaggtagaaattctaagttcgctcccaaagctgtagaagggtttttgttaggttatgactcaaatacaaaggcatatagggtcttcaacaaatcatcgggtttggttgaagtctctagcgacgtcgtatttgatgagactaatggctctccaagagagcaagttgttgatcttgatgatgtagatgaagaagacgctccaacgaccgcaatacgcaccatggcaattggtgatgtgcggccacaggaacaaaaggagcaagatcaaccttcttcctcaacaatggtgcaacccccaactcaagacgatgaacaggttcatcaagaagaggcgtgtgatcaagggggagcacaagatgatcatgttatggaggaagaagcacaacatgcccctccaactcaagttcgagcgacgattcaaaggaatcatcccgtcgatcagatattgggtgatattagcaagggagtaactactcgctctagattagttaatttttgtgagcattactcttttgtctcttctattgagcctttcagggtagaagaggccttgctagatccggactgggtgttggccatgcaggaggagctcaacaatttcaagagaaatgaagtttggacattggtgccacgtcccaagcaaaacgttgtgggaaccaagtgggtgtttcgcaacaaacaagacgagcacggggtggtgacaaggaacaaggcacgacttgtggcaaaaggttatgcccaagtcgcaggtttggactttgaggagacttttgctcctgtggctaggctagagtcaattcgcatattgttagcctatgccgctcaccattctttcaggttgttccaaatggatgtgaagagtgctgtcctcaacgggccaatcaaggaggaggtatacgtagagcaaccccctggctttgaggatgaacggtaccccgaccacgtgtgtaagctctctaaggcgctctatggacttaagcaagccccaagagcatggtatgaatgccttagagactttttaattgataatgctttcaaggttgggaaagccgatccaactttattcactaagacgtgtaatggtgatttatttgtgtgccaaatttatgtcgatgacataatatttggttctaccaaccaaaagtcttgtaaagagtttagcagggtgatgactcaaaagtttgaaatgtcgatgatgggcgagttgaactacttccttggtttccaagtgaagcaactcaaggacatcactttcatctcccaaacgaagtacacgcaagacttgatcaagcggtttgggatgaaggacgccaagcccgcaaagactccaatgggaactgacggacacatcgacctcaacaaaggaggtaagtccgttgatcaaaaagcataccggtctatgataggttccttgctttacttatgtgctagtagaccggatattatgcttagtgtatacatgtgtgctagatttcaatccgatccaagggagtgtcacttagtggccgtgaagcgaagtcttagatatttagtcgctacgccttgcttcaggatctggtatccaaaggggtctacctttgacttaattggatattcagactccgattatgctggatgtaaggttgataggaagagtacatcagggacgtgccaattcttaggaaggtccctagtgtcttggagttctaagaaacaaactttcgttgccctatccaccgttgaggccgagtatgttgccgcaggtcagtgttgcacgcaactactttggatgaggcaaatcctccgggactttggctacaatctgagcaaagtctcactcctatgtgataatgagagtgcaatccgcatggcggataatcctattgaacccagccgcacaaagcacatagacatccgacatcactttttgagagaccaccagcaaaagggagatatcgaagtgttttatgttagcaccgagaaccagctagccgatatctttaccaagcctttagatgagaagaccttttgcaagctgcgtagtgagctaaatgtcttagattcgcggaacttggattga

SEQ ID NO: 4584 - DNA, 1533 bp, Zea mays
  Clone ID: TF_ZM4626.C1.o6.fg
atggcgcgctcgtcaaatattctatcgcatttggtaacattaaaggaattaatggaattaggaggcaaggtggcgtaccttgcaaaaccggctggctctggtaaaaaggctgctctcgggaactcaacggcggcgtacggctataattcaccggactgtccggtactctcaattggtatcggagccgttctcttcacaaaagggactaatcgcccgaagagatggatcctaagggaaaggggggtggtcaacgacaatgagaaggagtccatcttcaacgagccaagggacgacaaagtcaatgactccggcttgagtcaaaagcagaaagacggaaagaagaagaggcgcatcaggaaggttgtctactacgacagcgacgaatcttcctcttctcaaaaggacgacgaatacgaggagaaaaagaaaacggttaactcgaacttttcttttgattactctcgtattccgcataattctaatgctcatttgctttctattctacttggaaaacctcctcactttgatggagaggactacggattttggagtcacaaaatgcgtagtcatttgttctctcttcatccaagtatatgggagatagtagaaaacggaatgcaatttgatagttcagataattctatgtttatcaatgaacaaatccataagaatgcacaagctactactgttcttttagcatccttgtgcagggaagaatacaataaggtgagcggcctggacaatgccaagcagatctgggacaccctcaagatctcacatgagggaaacgacgtcaccatgctcaccaagatggagttggtggaaggcgaactaggaaggctcaagaccctcgtcaacaaaataaggagctatggaagcacgcgatggacggaccacgacgtcgtccgacttatgctaaggtccttcaccgtccttgatcctcatcttgttaactctattcgtgagaatccttggtacatcaagatgacgcccgaacaaatacttgggaagtttgtgagcgggcgaatgatgatcaaggaggcaagatacgttgatgaggcgctaaatggcccaatccatgagcctcaagccattgctctcaaggcaacaagtagcagggagacgctacctagcaaggtggcgcaaattgaggcggccgggctaaacgaggatgaaatggccctcatcatcaagcgcttcaagacggcgctcaaaggtcgcaaggagcatcccaacaaaagcaagatgaagggaaagcgctcctgcttcaagtgtggtaaggttggtcattttattgctaattgtcccgataatgacagtgaccaggatcaagaaaagaggagggaaaagaagaagacctacaagaaggctaagggcgaggcacaccttagcaaggagtgggactcggattgttcatcgtccgactccgacgacgaaggactcgccgcctcagccttcaacaagtcggctctcttccccaacgagcatcacacatgcctcatggcaaaggagaagaagcttaaagagtattaa

SEQ ID NO: 4585 - DNA, 1567 bp, Zea mays
  Clone ID: TF_ZM4884.C12.o1.fg
ggggctcaggctatttcctgagtacctctccttcgcattcggtttgccttctaaaaccgggtgtgacacgggctcgggccacaaacgcaaagatgggaagaagaagaagaagacaagacgcatcaaggagatcgtctactacgacgacagcgatgagtccacttcttcccaaaaagacaacgacgacaacgactacgagagaaggaaaccggttaattcgaacttttcttttgactactctcgtattccgcaaagtacaaatgctcatttgctctccattccacttggcaaacctcctcactttgatggagaggactacagattttggagccacaaaatgcgtagtcacctgttctctctccatccgagcatatgggagattgtggaaagtggaatgaaatttgatagcttggatagtcctatgtttatcaatgaacagattcatagaaatgcacaagctactattgtgttgttagcctctttgtgtagggacgagtatcataaggtgagcggcttggacaatgccaagcagatctgggacaccctcaggatctcacatgagggaaacgacgtcaccttactcaccaaaatggagttggtggagggcgagcttggaagattcgcaatgatcaggggagacgagccaacccaaacatacaaccggctcaagaccctcatcaataagataaggagctacggaagcacacgatggacggaccacaacgtcgttcgtctaatgctaagatcctttactgtacttgatccacatttggtgaacaatatccgtgaaaatcctaggtacaccaagatgtcacccgaagaagttcttggaaaatttgtaagcgggcgaatgatgatcaaggaggcaagatatgtcaacgacgcgttgaacggtccaatccatgagcctcaacccattgctctcaaggcaacgaggagcaaggaggcgctacctagcaagcgcttcaagacggcgctaaagggtcgcaaggggcagccaagcaagaccaagacaaaggggaagcgctcatgcttcaaatgtggtaaggttggtcattttattgctaattgccccgacaatgatagtgaccaggaacaagggaacaagagggagaagaagaagaactataagaaggcaaaaggcgaggcacatcttggcaaggagtgggactcgaattgttcgtcgttcgactccgacaacgaaggactcgccgccactgccttcaacaagtcatccctcttcccaaacgagcatcacacttgcctcatggcaagggaaaagaagggtctagatagaaccaaggtggataaaataaatgaattgattgatgctttgaatgataagaatagattgctagaaaagcaagaggatctcttatatgatgaacatgataagtttgtagaagctcaaaaatcccttgctttagaaataaagaggaatgaaatgctttcttgtgaattgtccacatgccatgactctatttctagtttaaaaagcataaacgatgacttgaatgctaagttagaaatagctaataaatcaacatcttgtgtagaacatgttgtg

SEQ ID NO: 4586 - DNA, 2058 bp, Zea mays
  Clone ID: TF_ZM4322.C3.o2.fg
atggatacccataggccaccacacttcgacggcactaacttcccatattatagtgctagaatggcttgttacctagaggccgttgatctaggtgtttggagagtcactcgtgacgggatgaaacccctcaagaatcccgagaaacccaccacgagtgaagaaaaagaaattcatttaaatgctagagccaaaaattgcttgtatgaatctcttagcatggatattttcaatcaagtatttaccctgaaaactgctaatgagatttggctaaaattgcatgagctccatgacggcacatccaatgtccgtgagcaaaaacattgcctagtcttaaatgagtataattcttttgctatgaaagatgatgagcttgttagagacatgtattctcgcttgaatctaattatcaatgagctcaattctattggcattaataagctaggtgatgcggacattgtgaggaagattatctccctgctaccacaacaaagatatgggagcatcatcaccatccttcacaacatggaggacttaagcaacatgaccccgaccattgtgattgggaaaatcgcggcctttgagatgtcgcgaaaaatgagtcggggagaggagccaacttcctcaagaccatatgcttttgcatgtgatgaaaggaagggcaaaaagaaggctcccactccaagttcctcaagtgaagaagaggaagaagaagaaagtgatgatgatgaagataatcaaccatgcacatcatcctccgaggacgaagaaacgatccgacgcgtcggaaaggtcgaggatcttctctttaacattgacaggaaaaagcaaaggaagagaggatgcttcgcatgtggggagaagggtcacttcagggacaactgtccaaatatggccaaacccaaaaaggagaggagcaaaggcaaggcgctaacaagtgttagaacttgggatgattcttcaagtgaagatgaacctccaaggacacgcagccaccggtcctcgtcacgatcatcacggtcatcacacaaatgccttatggcaagaggtaacaaaagcattccatcctctagtgatgaaagtagtagtaatgatgaaggtgagggaaagccctctctagatgagcttgcggaagccgtagaatttttccaggatgtttgcactaagcaaaaagctcaacttaaaactttgaaaaataagttggttagctctcaaaatgattacaaaggtttgctagaaaaatttgaaacttttgcaaacttaaatagtgagctatcaactaaaattgagctattagaatctagtgctccatccactgctaccgatgatagccttattaaaaagaatgaaaaacttaaggctaagttagctagctcccaagaagctattgaaaatttgctagagaaaatggaaattcttagcatacacaataatgagctaactactaagctagaaaacattggtagcaccccagcagcatctttagttgaaatacctgaaataattaagaaagatgcttctacttcctgctttgatttaattgatgattctaacccctgcaaccaagtcgttgttgagaatattgttgtaaagacatgttcggatgaggttgcaaaggaaaatgaacaattaaagcaagaagtggctcgccttggcaaggctttgtatgacaagaaaggcaaagccaaacaaatccgaccttcacaggataacaccactgcgggagtgaacaagcctatggagggagaaactgtgatttgtagactatgccacatggaaggccacaagtctttccaatgcaaggcgatgatcggggataaacaaaggcgaaagctcaagcaaaagccatcaagcaaaatctccaacacctacatcaaaaaggtgaacaaaaaggatgctacaccatatttgatcaagaagaaaaagaacggaaaggtgatagcaatcaaggccaacaagcaagccaacaaaggaaagggggccaaacgcatctgggtgccaaaggagataatttcaaccatgaaaagcaccaagaaggtttggatcccgaaagggaagtga

SEQ ID NO: 4587 - DNA, 4950 bp, Zea mays
  Clone ID: TF_ZmC951_403
tcatttctccccctttttggcatgaatcgccaaaaacggaaccgttagagccctagaagtagtttcttcccctcccgtgtcgaggtcgagatgcccattggttcccatgggtgtcttgatgggtttggcatccttcatcccaaacttggttagaatgtcttgagtgtactttgtttggctgatgaaggtgccctcttggagttgcttcacttggaatcctaagaaatacttcaactcccccatcatagacatctcgaatttctgtgtcatgatcctactaaactcttcacatgtagactcgttagtagacccaaatataatatcatcaacataaatttggcatacaaacaagtcattttcaagagttttagtaaagagtgtaggatcagcctttccaactttgaagccattagcaataaggaaatctctaaggcattcataccatgctcttggggcttgcttgagcccataaagcgccttagagagcttatagacatggttaggatacttactgtcttcaaagccgggaggttgctcaacatagacctcttccttgattggtccattgaggaaggcacttttcacgtccatttgataaagcttaaagccatggtaagtagcataggccaataatatgcgaattgactcaagcctagctacgggtgcataggtttcaccgaaatccaaaccttcaacttgggagtatcccttggccacaagtcgagctttgttccttgtcaccacaccatgctcatcttgcttgttgcggaagacccacttggttcctacaacattttggttaggacgtggaactaaatgccataccttattcctagtgaagttgttgagctcctcttgcatcgccaccacccaatccgaatcttggagtgcttcctctaccctgtgtggctcaatagaggaaacaaacgagtaatgttcacaaaaatgggcaacacgagatcgagtagttacccccttatgaatgtcaccgaggatggtgtcgacggggtgatctcgttgtattgcttggtggactcttgggtgtagcggcctttgttcctcatcctccttgttttcctcatttgcatctcccccttgatcaataccatcatcttgaggtggctcatttgcttgatcttctaccttatcaacttgagcttgatcctcaatttgagtcggtggagatgcttgcattgaggaggatggttgatcttgtgcaattggaggctcttcggattccttaggacacacatccccaatggacatgttccttagcgcgatgcatggagcctcttcttcacctatctcatcaagatcaacttgctctatttgagagccattagtctcatcaaacacaacgtcacatgagacttcaactagtccagtggacttgttaaagaccctatatgcccttgtgtttgagtcataaccaagtaaaaaaccttctacagtcttaggagcaaatttagattttctacctcttttaacaagtataaagcatttgctaccaaagactctaaaatatgaaatgttgggctttttaccggttaggagttcgtatgatgtcttcttgaggattcggtgtagatataaccggttgatggcgtagcaagcggtgttgaccgcctcggcccaaaaccgatccgaagtcttgtattcatcaagcatggttcttgccatgtccaatagagttctattcttcctctccactacaccattttgttgaggtgtgtagggagaagagaactcatgcttgatgccctcctcctcaaggaagccttcgatttgagagttcttgaactccgttccgttgtcgcttcttattttcttgatccttaaggcgaactcattttgagcccgtctcaagaatctctttaaggtctcttgggtttgagatttttccctgtctttctcaaaatgaacatttgttaatcctaaaatgtgttctccctttagaagcttgtgaagattcttcatcccaacatgggctagtcggcggtgccagagccaacccatgttagtcttagcaattaagcaagtgtcgagttcagctctatcaaaatctaccaagtatagctgaccctctaacactcccttaaatgctattgaatcatcacttcttctaaagacagtgacaccttgatttccatccccgaatgtgacagctcgttggggatcttggtttttctcatatgaggagaacatcttcttctcccctgtcatgtggtttgtgcacccgctgtcgagtatccaacttgagcccccggatgcataaacccaaactgttttgggtcctttggcattagaaacaagaactttgggtacccaaacacaagtctttgaccccttgtgtttgcccccaacaaacttggcaacgaccttgccggatttgttagtcaaaacataggatgcatcaaaagttttaaatgaaatgctatgttcatttgatgcattaggaattttcttcttaggcaacttggcatgggttggttgcctagagctagatgtctcacccttatacatgaaagcatgattagggccagagtgagacctcctagaatgaattctcctaatcttgctctcaggataaccggcaggatataaaatgtaaccctcgttatcctgaggcatgggagccttgcccttaacaaaattagacaatctcttaggaggggcactaagtttgacattgtctcccctttggaagccaatgccatccttgatgccagggcgtctcccactatagagcatacttctagcaaatttaaatttttcattttctaagttatgctcggcaatttttgcatctaatattgctatatgatcattttgttgtttaattaaggtcatgtgatcatgaatagcattaatatcaacatctctacatctagtacaaatggaaacatgctcaatactagatgtagagggtttgcatgaattaagttcaacgatcttagcacgcaagatatcattgttatctctaagatcggaaattgtaacattgcaagcatctatttctttagccttagcaattaaattttcattttctactctaaggctagcaagagacatattcaattcttcaatcctagcaagcaaatcattattatttttaggattgaaagttgagacaatgcaaacatgagaatcaaccttagtatttaaactagcattttcattcctaaggttgtcaatcatctcacggcaagtgcttagctcactagataatttttcacatttttctacttctagagcataagcctttttaaccttaacatgtttcttgttttctttaattagacaatcctcttgggagtccaaaaggtcatctttttcatgaatagcactaatcaattcatttaatttttctttttgctccatgttaagattggcaaagagaacacgcaaattatcctcctcatcactagcattatcgtcactagaagattcatatttagtggaggagttagatttaaccttcttccgtttgccgtcctttgccatgagacacttgtggccgacgttggggaagagaagtcccttggtgacggcgatgttggcggcgtcctcgtcgtcggaggagtcgcttgagctttcgtcggaatcccactcccgacaaacatgggcatcgccgcccttcttcttgtagtatctcttcttctcctttcttctccccttcttgtcgtcgcctcggtcaccgtcactagatacgggacatttagcaataaaatgaccgggcttaccacatttgtagcaaaccttcttggagcgggacttgtagtctttccccctcctttgtttgaggatttggcggaagctcttgatgacgagcgacatctcctcattgtcaagcttggaggcgtcgattggttgtctacttggtgtagactcctccttcttgtcctccgtcgccttgaatgcgacgggttgagcctcggatgtagatggatcatcaagctcgttgatcttcctcgagccttcgatcatgcactcaaaacttacaaaattcccgataacttcctcgggggtcattttagtatatctaggattaccacgaattaattgaacttgagtggggttaaggaaaatgagagatcttagaataaccttaaccatttcgtggtcgtcccacttgatgctcccgaggttgcgcacttggttcaccaaagtcttgagccggttgtacatgtgttgtggctcttcccctttgcgaagccggaaccgaccgagctccccctcgatcgtttcccgcttggtgatcttggtgagctcatctccttcgtgtgcggttttgagcacatcccaaacctccttggcgctcttcaacccttgaactttgttatactcctctctacttaaagaggcgaggagtattgttgtcgcttgagagttgaagtgctcgatttgggccacctcatcctcatcataatccttgtcccctacggatggtacctgtgcaccaaactcaacaacatcccatatacttttgtggagtgaggttagatgaaatcgcattaaatcactccacctagcataatcttcaccatcgaaagttggtggtttgcctaatgggacggaaagtaaaggtgcatttttagaaatgcgagggtaatgtagggggatcttactaaacttcttacgctcttggtgtttagaagttacggagggcgcatcggagtcggaggtcgatgttgatgaagtgtcggtctcgtagtagaccactttcctcatccttttgtgcttgtcccctctccgatgtggtttgtgggaggaagatctctccttcttctctttgtggtgcgaagaagatttcttctcctttcctttgtgggaggagctcttcttcttctccttcctcttggtgcgggactcttccgatgaagtgctcccgtggcttgtagtgggcttttcgccggtctccatctccttcttggcgggatctcccgacat

SEQ ID NO: 4588 - DNA, 1173 bp, Zea mays
  Clone ID: TF_ZM4325.C1.o21.fg
atggaggacttgagcaacatgaccctgaccattgtgattgggaaaaatgtggcttttgagatgtcgcaaaaaatgtgtcggggagtggagccaacttcctcaagaccatatgcttttacatgtgatgaaaggaagggcaaaaagaaggctcccactccaagttcctcaagtgaagaggaggaggaagaagaaagtgatgatgatgaagataatcaaccatgcacatcatcctccgaggacgtaaaaacaatccgacacgtcggaaaggtaatgaggatgatccgcaagattaatctaatgggtgtgcccctgcaggtcgaagatcttctctttaacattgataggaaaaagcaaaggaagagaggatgcttcgcatgtggggagaaggcccacttcagggacaactgtccaaatatggccaaacccaaaaaggagaggagcaaaggcaagacgctaacaagtgttagaacttgggatgattcttcaagtgaagatgaacctccaagtacacgcagccaccggtcctcatcacgctcatcacggtcatcacacaaatgccttatggcaagaggtaacaaaagcattccatcctcgagtgatgaaagtagtagtgatgatgaaggtgagggaaagccctctgtagatgagcttgcggaagccgtagaatttttccaggatgtctgcaccaagcaaaaagctcaacttaaaactttgaaaaataagttgattagctcccaaaatgattataaagaagtggctcgccttggcaaggctttgtatgacaagaaaggcaaagccaaacaaatccgacctccacaggataacaccactgcgggagtgaacaagcctatggagggagaaactgtgatttgtaggctatgccacaaggaaggccataagtctttccaatgcaaggcgatgaccggggataaacaaaggcaaaagctcaagcaaaagccatcaagcaaaatctccaacacctacatcaaaaaggtggacaaaaagactgctacaccatatttgatcaagaagaaaaaggatggaaaggtgatagcaagcaaggccaacaagcaagccaacaaaggaaagggggccaaacgtatctgggtgccaaaggaaataatttcaaccatgaaaagcaccaagaaggtttggatcccgaaagggaagtga

SEQ ID NO: 4589 - DNA, 3264 bp, Zea mays
  Clone ID: TF_ZM4409.C1.o5.fg
atgtcgcccaaagaaatacttggaaagttcgtaagcgggcggatgatgatcaaggaggcaagatacattgatgaggcgttgaatggtccaattcatgagcctcaagccatcgctctcaaggcaacaagtagcagggaggcgctacctagcaaggtggcgcaaattgaggccgttgggctaaatgaggatgaaatggccctcatcatcaagcgcttcaagacggcgctaaagggccgcaaggagcatcccaaaaagaacaagacgaagggaaagcgctcctgcttcaagtgcggtaaggttggtcactttgttgctaactgtcccgataatgatagtgaccaggaacaaggaaagaatgggaaaagagagaacaagaaggtttacaagaaggctaaaggcgaggcacaccttggaaaggagtgggattcggattgctcttcgtccgactccgacgacgaaggactcgctgccaccgccttcaacaaatatgaacacctagtttccatttctagattaaaggatgaagtggctagtcttaatgctcaacttaagactagcaaaagtgaatttgataaactaaaatttgcaagggatgcctacacgattggtagacacccctcaattaaggatggacttggctttaagagggaagccaagaacttaacaagtcataaggctcccatctctgccaagaagaaagggaaggcccctatggctaatagtgctaaaaagaaccatgctttcatgtaccatgataggagatattctaggaatgttcatagaagttatgatacttttgattctcatgccatgattgcttcaagttcttatattatgcatgatagaaatttggctagaaaaatgttgttaatgtacctaggaaaaaaggataagaaagtggttgctaggaaattaggggcaaaatgcaagggagacaaaacttgcatttgggttcctaagactattgtcactaaccttgtaggacccaacaagagttgggtttatgtatccgggggatcaagctggattatcgacagcggatgcacaaatcacatgacgggggagaagaagatgttcacctcctacgtcaagaataaagattcccaagattcattcatattcggtgacgagaatcaaggcaaggttaaaggattaggcaagattgccatctcaaatgagcactctatctccaatgtatttttagtagagtcgctaggttataatcttttgtcggttagtcaattatgtaatatgggatataattgcgtattcacaaatgtagatgtatctgtctttagaaggagtgatggttcattagcttttaagggtgtactagacgacaaactctatttagttgattttgcaaaggaggagctgtggcatcaccgtctagcacatgtggggatgaagaaccttcacaaacttctaaagggagaacatgtgttaggtctaacaaatgtgcatttcgaaaaagatagaccttgtgcagcttgtcaagcaggtaaacaagtgggaagtgctcatcacatcaagaacgtgatgactacttcaagacccctagagctgctgcatatggacctcttcggaccagtcgcctacctcagcatcgggggaaggaccctcaagcgcttcctaaggagagctcaaaatgagtttgagctcaaggtgaagaagataaggagcgacaacgggtctgagttcaagaaccttcaagtggaggaataccttgaggaggaaggaatcaagcacgagttctccgctctctacacaccacagcaaaatggtgtggaagagaggaagaacaggacgcttatagacatggcgaggacgatgcttggagaattcaagacgcccgagcagttttggtcggaagctgtgaacacggcttgccatgccataaactgggtctaccttcatcgcctcctcaagaagacgtcatacgagcttctaaccggtaacaaacccaacgtttcatattttcgagtttttgggagtaaatgctacattctggtgaagaaaggtagaaattcaaaatttgctcccaaatttgtagaagggtttttgttaggttatgactcaaatacaaaggcgtatagagtcttcaacaaatcatcgggtttggttgaagtctctagtgacgttgtatttgatgagactaatggctctccaagagagcaagttgagcttgatgatgtagatgaggaagatgttccaacggacgcgattcgtaccatggcgattggagacgtgcgaccgcaggaacacaaggaacaagagcagccttcttcctcaacgacggtgcacccccaacctaagatgatgaacagggtagaagaggccttgctagatccggactgggtgttggccatgcaggaagagctcaacaacttcaagcgtaatgaagtttggacagtggtgccgcgtcccaagcaaaatgttgtgggaaccaagtgggtattccgcaacaaacaggacgagcatggggtggtgacgaggaacaaggctcgacttgtggcaaaaggttatgcccaagtcgcaggtttggactttgaggagacttttgctcctgtagctaggctagagtcgattcgtattttgttagcctatgccgctcaccattctttcaggctgtaccaaatggatgttaagagcgctttcctcaacgggccaatcaaggaggaggtgtacgtggagcaaccccctggctttgaggatgaacggtaccccgaccatgtgtgtaagctctctaaggcgctctatggacttaagcaagccccaagagcatggtatgaatgccttagagactttttaattgctaatgctttcaaggttgggaaagccgatccaactcttttcactaagacatgtgatggtgacttatttgtgtgccaaatttatgtcgatgacataatatttggttctactaaccaaaagtcttatgaagagtttagcagggtgatgactcaaaaatttgaaatgtcgatgatgggcgagttgaactacttccttgggttccaagtgaagcaactcaaggactgtaccgacacgcgtacgaatgcgacgtggagtgcgtggagtacgccgaggccctcgccaaatccgaggccctcatcgccgacctggagagcctccaagggggcgccagatgcgaagcgccacaccggcaacttcgagccagctgagacggttaagtacgtccctctcgaccccagcaacgacgcctccaagcagatccggatcggctccaagctcgaccccaaatag

SEQ ID NO: 4590 - DNA, 466 bp, Zea mays
  Clone ID: TF_LIB4767-015-R1-K1-C4
cccgtccccctcgttctctctctcgttgcgacgactgtgtggagtaccgcccccgccccctcaccctcaccccccgacgccgacgccctaggcggctacgccaggtcccgagggacgggcccttcatcttcgtcagtctattcgccgggcgacgagcacccgccaggtttcgtaatgatttgtgcaacaattgtaagcgtcctgggcattttgctagagagtgtcctagcgtggctgtctgccatacctgcgggcttcctgggtaataactttgtattattctgcttgcacatattcatgctcacatgttattagttttaagattttgatcattcgttcaactgcactttgcttgtaatgcttaccatacttgtaatcattgtggcacaaccattctagcgaaaccttagagcgtctcccagagttttcaaaacccactcccaatctagattttttgggcatgctt

SEQ ID NO: 4591 - DNA, 622 bp, Zea mays
  Clone ID: TF_LIB3991-009-Q6-K6-E11
aattaattcgtgggaatcctagatatccactaatgacccccgaggaagttatcgggaattttgtgagttttgaatgcatgattaagggctccaagaagatcaacgagcttgacgagccttccacctccgaggcgcaaccggtggccttcaaggcaacggaggagaagaaggaggagtctacaccaagtagacaaccaattgacgcctccaagctcgacaacgaggagatggccctaatcatcaaaagctttcggcaaattctcaagcaacggaaggggaaggactacaaaccccgttccaagaaggtttgctacaagtgtggtaagcccggtcactttattgcaaaatgtcctatgtctagtgacagtgacaggggcgacgacaagaagggaagaagaaaggagaagaagaagtattacaagaagaagggcggcgatgcccatgtttgtcgggagtgggactccgacgaaagctcaagcgactcctcctccgacgaggacgccgccaacatcgccgtcaccgagggccttctcttccccaacgtcggccacaagtgtctcatggccaaggacggcaaaaagaagtaaaatcaaggtcctccactaaatatgaaacatctagt

SEQ ID NO: 4592 - DNA, 5001 bp, Zea mays
  Clone ID: TF_ZmC951_288
ttagagccctctttggtatttttctttctctttggtcataaatgaatgagttaagattataccaaagacgaagtcaggtccttttgcttttgagcttttactctctcccccaaggatgaagtccttttctttgatgctcatttctcccccaaagaatagagagttgctcggagtgatggtgaagtatgagttacggagtggaagcctttgtcttcgccgaagactccaatttcctttcaatatacctatgacttggtttgaaatagacttttgatcgacggatttacctcccgtgtcgaggtcgagatgcccattggttcccatgggtgtcttgatgggcttggcatccttcattccaaacttggttagaatgtcttgagtgtactttgtttggcaaatgaaggtgccctcttggagttgcttgacttggaatcctagaaaatacttcaactcccccatcatcgacatctcgaatttctgtgtcatgatcctactaaactcttcacatgtagactcgttagtagacccaaatataatatcatcaacataaatttggcatacaaacaagtcattttcaagagttttagtaaagagtgtaggatcggccttgccgactttgaagccattagaaataaggaaatctcttaggcattcataccatgctcttggggcttgcttgagcccataaagcgccttagagagcctatagacatggttagggtactcactgtcttcaaagccgggaggttgctcaacatagacctcttccttgattggtccgttgaggaaggcacttttcacgtccatttgatagagcttaaagccatggtaagtagcataggccaataatatgcgaattgactcaagcctagctacgggtgcataggtttcaccgaaatccaaaccttcgacttgggagtatcctttggccacaagtcgagctttgttccttgtcaccacaccatgctcgttttgcttgttgcggaagacccatttggttcctacaacattttggttaggacgtggaactaaatgccatacctcgttccttgtgaaattgttgagctcctcttgcattgccaccacccaatccaaatcttgaagtgcttcctctatcctgtgtggctcaatagaggaaacaaaagagtaatgttcacaaaaatgtgcaacacgagatcgagtggttacccccttatgaatgtcgccgaggatggtgtcgacggggtgatctcgttggattgcttggtggactcttgggtgtggcggccttggttcttcctcatcctccttttcttgatcaattgcatctcccccttgatcattgccatcatcttgaggtggctcatcttctttattttgcccttcatcaacttgagcttcatcctcattttgagttggtggagatgcttgcatggaggaggacggttggtcttgtgcatttggaggctctttggattccctaggacacacatccccaatggacatgttccttagcgctatgcatggagcctgttcttcacctatctcatcaagatcaacttgctctacttgagagccgttagtttcatcaaacacaacgtcacatgagacttcaactagtccagtggacttgttaaagacccgatatgcccttgtgtttgagtcataaccaagtaaaaagccttctacagttttaggagcaaatttagattttctacctcttttaacaagaataaagcatttgctaccaaaaactctaaaatatgaaatgttgggctttttaccggttaggagttcatatgatgtcttcttgaggattcggtgaagatataaccggttgatggcgtagcaggcggtgttgactgcttcggcccaaaaccggtccggtgtcttgtactcatcaagtatggttcttgccatgtccaatagagttcgattcttcctctccactacaccgttttgttgtggtgtgtagggagaagagaactcatgcttgatgccctcctcctcaaggaagctttcaatttgagagttcttgaactccgtcccgttgtcgcttcttattttcttgatccttaagccgaactcattttgagcccgtctcaagaacccctttaaagtctcttgggtttgagatttttccaagtatagctgaccctctaacactcccttaaaagctattgaatcatcacttcttctaaagacagtgacaccttgatttccatccccgaatgtgatagctcgttggggatcttggtttttctcatatgaggagaacatccttttctcccctgtcatgtggtttgtgcacccgctgtcgagtatccaacttgagcccccggatgcataaacccaaatggttttgggtcctttggcattagacacaagaactttgggtacccaaacacaagtccttgaccccttgtgcttgctcccaacatatttggcaactactttgccggatttgttagtcaacacataagaagcatcaaaagttttaaatgaaatggcatgatcatttgatgcattaggagttttctttctaggcaacttggcacgggttggttgcctagagctagatgtctcacccctatacataaaagcatgattagagccagagtgagacttcctagagtgaattctcctaattttgctctcgggataaccgacagggtacaaaatgtaaccctcgttatcctgaggcatgggagccttgcccttaacaaagttagataagttctttggaggggcattaagtttgacattgtctcccctttggaagccaatgccatccttgatgccagggcgtctcccattataaagcatgctacgagcaaatttaaatttctcattctctaggttgtgctcggcaattttagcatctaattttgctatatgatcattttgttgtttaattaaagccatatgatcaagaatagcattaacatcaacatctctacatctagtgcaaatagaaacatgctcaacattagatgtagagggtttgcaagatttaagttctacaaccttagcatgcaacatttcattcttagttctaaggtcggaaatagtagtgttgcaaacatcaaaatctctagccttagcaattaaattttcattctctaatctaaggctagcaagagatacattcaattcatcaatcttagcaagcaagtcaatattatcatctctaagattgggaattgaaacattacaaacatgtgaatcaaccttagcatttaaaatagcattttcatttctaaggttgtcaatcatctcacggcatgtgcttagctcactagacaatttttcacatttttctacttctagagcataagcctttttaaccttaacatgtttcttgttttctttaattagacaatcctcttgggagtccaaaaggtcatccttttcatgaatagcactaatcaattcatttagtttttctttttgctccatgttaagattggcaaagagaatacgcaaattatcctcctcatcactagcattatcatcactagacgattcatatttagtggaggagttggatttaaccttcttcttcttgccgtcctttgccatgaggcacttgtggccgacgtttgggaagagaagtcccttggtgacggcgatgttggcggcgtcctcgtcgtcggaggagtcgcttgagctctcgtcggagtcccactcgcgacaaacatgggcatcgccgcccttcttcctgtagtacctcttcttctcctttcttctccccttcttgtcgtcgcctcggtcactgtcactagacataggacatttagcaataaaatgaccgggcttaccacatttgtagcaaaccttcttggagcgggacttgtagtctttccccctcctttgtttgaggatttggcggaagctcttgatgacgagcgccatctcctcattgtcaagcttggaggcgtctattggttgtcgacttggtgtagactcctccttcttttcttccgtcgccttgaatgcaacgggttgagcttcggatgggtcgccaagctcgttgattttcctcgagccttctatcatgcactcaaaacttacaaaatgcccgataacttcctcgggggtcattttagtatatctaggattaccacgaatcaattgaacttgagtgggatttagaaaaatgagagatcttaaaataacatttaccacttcatggtcgtcccacttcttgctcctgaggttgcgcacttggtttaccaaagtcttgagccggttgtacatgtgttgtggctcctcccctttgtgaagccggaaccgaccgagctccccctcgatcgtttcctgcttggtgatcttggtgagctcatctccctcgtgcgcggttttgagtacatcccaaacctccttggcgttcttcaacccttgtactttgttatattcctctttacttagtgaggcgaggagaattgttgtggcttgtgagttgaagtgctcgatttgggctacctcatcctcatcatagttctcatcccctacggatggtacctgcgcaccaaactcaacaacatcccatatgcttttgtggagcgagattagatgaaatcgcattaaatcgctccacctagcgtaatcttcaccatcaaaagttggtggtttgcctagtgggacggaaagtaaaggtgtatgtttggaaatgcgagggtagcgtagggggatcttactatacttcttgcgctcttggcgcttagaagtgacggagggcgcatcggagtcggaggtcgatgttgatgaagtgtcggtctcgtagtagaccaccttcctcatccttttgtgcttgtcgcctttccgatgcggcttgtgggaagaagatttttccttcttctctttgtggtgagaagaagatttcttctccttccctttgttggaggagctcttcttcttctccctccttttggtgcgggactcttccgatgaagtgcttttgtggcttgtagtgggcttttcgccggtctccatctccttcttggcgtgatctcccgacat

SEQ ID NO: 4593 - DNA, 4578 bp, Zea mays
  Clone ID: TF_ZM3612.C9.o1.fg
atgaggaaggtggtctactacgagaccgacacttcatcaacatccatctccgactccgatgcgccgtccgtaacttctaagcgccaagagcgcaagaagtttagtaagatccccttacactattctcgtacacctagacatactccattactttccgttccattaggcaaaccgccaacttttgatggcgaagattatgctaggtggagtgatttaatgaaatttcatctaacctcactccacaaaagtatatggaatgttgttgagtttggagcacaggtaccatccataggggatgaggattatgacacggacgaagtggcccaaatcgagcacttcaactcccaagccacaaccatactcctcgcctctttaagcaaggaggaatacaacaaagtgcaagggttgaagaatgcaaaggagatttgggacctactcaagactgcgcacgagggtgatgaactcaccaagatcaccaagcgggaaacgatcgagggggagctcggtcgcttccgtcttcgccaaggggaggagccacaagatatgtacaaccggctcaaaaccttggtgaaccaagtgcgcaacctcgagagcaaaaagtgggacgaccacgaggtggttaaggttattctaagagctctcattttccttaaccccactcaagttcaattaattcgtggtaatcctagatacccactaatgacccccgaggaagttatcgggaattttgtgagctttgaatgtatgattaaaggatcaaagaagatcaacgagcttgacgaaccctccacgtccgaggcgcaaccggtggccttcaaggcgacggaggagaagaaggaggagtctacaccaagtagacaaccaattgacgcctccaagctcgacaatgaggagatggctttaatcatcaaaagctttcgccaaatcctcaagcaacggagggggaaggactacaaaccccgctccaagaaagtgtgctacaaatgtggtaagcccggtcattttattgcaaaatgtcctatgtctagtgacagtgacaggggcgacgacaagaagggaaagaggaaagaaaagaagaagtactacaagaagaagggcggcgatgcccatgtttgccgggagtgggactccgacgagagctccaccgactcctcctccgacgacgaggacgccgccaacatcgccatcaccaagggactcctcttccccaatgtcggccacaagtgcctcatggcaaaggacggcaaaaagaagaaggttaaatctaactcctccactaaatatgaatcttctagtgatgataatgctagtggtgaggaagataatttgcgtaccctttttgccgaacttaacatggaacaaaaggaaaaattaaatgagctaattagtgccatccatgaaaaggatgatctcttggactcccaagaggacttcctaatcaaggaaaataagaaacatgttaaggttaaaaatgcttatgctcttgaggtagaaaaatgtgaaaaattgtctagtgagctaagcacttgccatgagaccattaacaaccttaggaatgaaaatgctaaattaattgctaagattgattctcatgtttgtattgattctcatcctagaaatgataatgttgaattacttgctaggattgatgaattaaatgattctcttactagccttagaatagaaaatgaaaatttgattgctaaggctaaagattttgatatttgcaatactactatttccgaccttagaactaagaatgatatgttgcatgctaaggttgtagaactaaaatcttgcaaaccctctacatctaatgttgagcatgtttctatttgtactagatgtagagatattgatgttaatgctattcatgatcacatgtccttaattaaacaacaaaatgatcatatagcaaaactagatgctaaaattgccgagcataacttgaaaaatgaaaagtttaaatttgctagaagtatgctctataatgggagacgcccgggcatcaaggatggcattggcttccaaaggagagacaatgtcaaacttaatgccccttcaaagaatttatccaactttgttaagggcaaggctcccatgcctcaggataacgagggttacattttgtaccctgccagctatcctgagaacaaaattaggaggactcattctaggaagtctcactctggccctaaccatgcttttatgtataagggtgagacatctagctctaggcaaccaacccgtgccaagttgcctagaaagaaaactcctaatgcatcaaatgatcatgctatttcattcaaaacttttgatgcatcatatgtgcttactaacaaatccggtaaggtttatgcatccgggggctcaagttggatactcgacagcgggtgcacaaaccacatgacaggggagaaaaagatgttctcctcatatgagaaaaaccaagatccccaacgagctatcacattcggggatggaaatcaaggtgttactgtctttagaagaagtgacgattcaatagcatttaggggagtgttagagggtcagctatacttggacaaatctcatacccaagagaccttaaagggattcttgagacgggctcaaaatgagtttggcttaaggatcaagaaaattagaagcgacaatgggacggagttcaagaactctcaaattgaaggcttccttgaggaggagggcatcaagcatgagttctcttctccctacactccccaacaaaatggtgtagtggagaggaagaatcgaactctattggacatggcaagaaccatgcttgatgagtacaagacaccggatcagttttgggccgaggcggtcaacaccgcctgctacgccatcaaccagttatatcttcaccgaatcctcaagaagacatcctatgaactcctaaccggtaaaaagcccaatatttcatattttagagtttttggtagcaaatgctttattcttgttaagagaggtagaaaatcaaaatttgctcctaaatctgtagaaggctttttactaggatatgactcaaacacaagggcatatagagtctttaacaagtcctcaggactagttgaagtttcttgtgacgttgtgtttgatgaaactaatggctctcaagtagagcaagttgatcttgatgagataggtgaagaacaggctccgtgcatcgcgctaaggaacatgtccattagggatgtgtgtcctaaggaactcgaagagcctccacatacacaagatcaaccatcctcctccatgcaagcgtctccgccaacccaaaatgaggacgaggctcaagttgatgaaggagaagaccaaagagatgagccccctcaagatgacggcaacgatcaagggggagatgcaaatgatcaagacaaggaggatgaacaaccaaggccgccacacccaagagtccaccaagcaatccaacgagatcaccccatcgacaccatcctcggcgacattcataaggggggtagaggaagcactacaagattcggattgggtgatggcgatgcaagaggagctcaacaatttcacaaggaacgaggaaccaagtgggtcttccgcaacaaacaagacgagcatggtgtggtgacaaggaacaaagctcgactcgtggccatggggtattcacaagtcgaaggtttggattttggtgaaacctatgcacccgtagctaggcttgagtctattcgcatattattagcctatgctacttaccatggcttcaagctttatcaaatggacgtgaagagtgccttcctcaatggaccaatcaaggaggaggtctatgttgagcaacctcccggctttgaagatagtgagtaccctaaccatgtctataggctctctaaggcgctttatgggctcaagcaagccccaagagcatggtatgaatgccttagagattttcttattgctaatggcttcaaagtcggcaaagccgatcctactttattcactaagactcttgacaatgatttgtttgtatgccaaatttatgttgatgatatcatatttgggtctactaacgaatctacatgtgaagaatttagtaggatcatgacacaaaaattcgagatgtcgatgatgggggagttgaagtatttcctaggatttcaagtcaagcaactccaagagggcaccttcatttgtcaaacgaagtacactcaagacattctaaccaagtttggaatgaagaatgccaagcccatcatgacacccatgggaaccaatgggcatctcgacctcgacacgggaggtgcaaaaggttcacacttagccaataaaagaccgagtattgagttcaacaaaagggcaaaggagcaaccaaaggctcctctggtctggcgcaccggactgtccggtgtgccaccggacagtgtccggtgcaccagaggacttcagctcaaactcttcgccctcgggaatatccagagtcagcgcgccagtgtacaccggacagtgtccggtgctccgaagaaagacgcggctcaggaactcgccagtctcgggttttcactccagccgctccgctataattcaccgaactatccg

SEQ ID NO: 4594 - DNA, 5409 bp, Zea mays
  Clone ID: TF_ZM3649.C7.o1.fg
atgtcgggagatcacgccaagaaggagatggagaccggcgaaaagcccactacaagccacgagagcacttcatcggaagagtcccgcaccaaacggagggagaagaagaagagctcctccaacaaagggaaggagaagaaatcttcttctcaccacaaagagaagaaggaaaaatcttcttcccacaagccgcatcggaaaggcgacaagcacaagaggatgaggaaggtggtctactacgagaccgacacttcatcaacatcgacctccgactccgatgcgccctccgtcacttctaagcgccaagagcgcaagaagtatagtaagatccccctacgctaccctcgcatttccaaacatacacctttactttccgtcccgttaggcaaaccaccaacttttgatggtgaagattacgctaggtggagcgatttaatgcagtttcatctaatctcgctccacaaaggtatatgggatgttgttgagtttggtgtacaggtaccgtcgataggggatgagaactatgatgaggatgaggtagcccaaatcgagcacttcaactcacaagccacaacaattctcctcgcctcactaagtaaagaggaatataacaaagtacaagggttgaagaacgccaaggagatttgggatgtactcaaaaccgcgcacgagggagacgagctcaccaagatcaccaagcgggaaacgatcgagggggagctcggtcgattccggcttcacaaaggggaggagccacaacacatgtacaaccggctcaagactttggtaaaccaagtgcgcaacctcgggagcaagaagtgggacgaccacgaagtggtaaatgtaattttaagatctctcatttttcttaatcccactcaagttcaattgattcgtggcaatcctagatatactaaaatgacccccgaggaagttatcgggcattttgtaagttttgagtgcatgatagaaggctcgaggaaaatcaacgagcttggcgaaccatccgaagctcaaccagttgcattcaaggcgacggaagaaaagaaggaggagtctacaccaagtcgacaaccaatagacgcctccaagcttgacaatgaggagatggcgctcgtcatcaagagcttccgccaaatcctcaaacaaaggagggggaaagactacaaatcccgctccaagaaggtttgctacaaatgtggtaagcccggtcattttattgctaaatgtcctatgtctagtgacagtgaccgaggcgacgacaagaaggggagaagaaaggagaagaagaggtactacaggaagaagggcggcgatgcccatgtttgtcgggagtgggactccgacgagagctcaagcgactcctccgacgacgaggacgccgccaacatcgccgtcaccaagggacttctcttccccaacgtcggccacaagtgcctcatggcaaaggacggcaaaaagaagaaggttaaatccatctcctccactaaatatgaatcgtctagtgatgataatgctagtgatgaggaggataatttgcgtattctctttgccaatcttaacatggagcaaaaagaaaaactaaatgaattgattagtgctattcatgaaaaggatgaccttttggactcccaagaggattgtctaattaaagaaaacaagaaacatgttaaggttaaaaaggcttatgctctagaagtagaaaaatgtgaaaaattatctagtgagctaagcacatgccgtgagatgatagacaaccttagaaatgaaaatgctattttaaatgctaaggttgattcacatgtttgtaatgtttcaattcccaatcttagagatgataatattgacttgcttgctaagattgatgaattgaatgtatctcttgctagccttagattagaaaatgaaaatttgattgctaaggctaaggattttgatgtttgcaaagttacaattgccgatcttagagataaaaatgacatacttcatgctaagatcgttgaacttaattcttgcaaaccctctacatctaccattgagcatgtcactatttgtgctagatgtagagatattgatattaatgctattcatgatcacatgtcgttaattaaacaacaaaatgatcacatagctaaattagatgctaaaattgccgagcataatttagaaaatgaaaaatttaaatttgctagaagtatgctctataatgggagacgccctggcatcaaggatggcattggcttccaaaggggagacaatgtcaaacttaatgctcctcctaagaacttgtctaactttgttaagggcaaagctcccatgcctcaggataacgagggctacattttgtaccctgccggttatcccgagagcaaaattaggaaaattcattctaggaagtctcactctggccctaattatgcttatatgtataagggtgagacatctagttctaggcaaccaacccatgccaagttgcctaagaagaaaattcctaatgcatcaaatgaacatagcatttcatttaaaacttttgatgcttcttatgtgcttactaacaaatccggcaaggtcgttgccaagtttgttgggaacaaacacaagggctccaagacttgtgtttgggtacccaaagttcttgtatctaatgccaaaggacccaaaacagtttgggtttatgcatccgggggctcaagttggatactcgacagcgggtgcacaaaccacatgaccggggagaaaaggatgttctcctcatatgagaaaaaccaagatccccaacgagctatcacattcggggatggaaatcaaggtgtcactgtctttagaagaagtgatgattcaatagcatttaagggagtgttagagggtcagctatacttggaaaaatctcaaacccaagagaccttaaagggattcttgagatgggctcaaaatgagttcggcttgaggatcaagaaaattagaagcgataacgggacagagttcaagaactcacaaattgaaggctttcttgaggaggagggcatcaagcatgagttctcctctccctacacgccacaacaaaatggtgtagtggaaaggaagaatcgaactctattggacatggcaagaaccatgcttgatgagtacaagacaccggaccggttttgggccgaagcggtcaacaccgcctgctacgccatcaaccggttatatcttcatcgaatcctcaagaagacatcatatgaactcctaattggtaaaaagcccaacatttcatactttagagtttttggtagcaaatgctttattcttgttaaaagaggtagaaaatctaaatttgctcctaaaactgtagaaggctttttacttggttatgactcaaacacaagggcatatagggtctttaacaagtccactggactagttgaagtctcatgtgacgttgtgtttgatgaaactaacggctctcaagtagagcaagttgatcttgatgagataggtaatgaagaggctccacgcatcgcgctaaggaacatgtccattggggatgtgtgtcctaaggaatccgaagagcctccaaatgcacaagatcaaccatcctcctccatgcaagcatctccaccaactcaaaatgaggatgaagctcaagttgatgaagggcaaaatcaagaagatgagccacctcaagatgatagcaatgatcaagggggagatgaaattgatcaagaaaaggaggatgaggaagaaccaagaccgccacacccaagagtccaccaagcaatccaacgagatcaccccgtcgacaccatcctcggcgacattcataagggggtaaccactcgatctcgtgttgctcatttttgtgaacattactcttttgtttcctctattgagccacacaggatagaggaagcacttaaagattcggattgggtggtggcgatgcaagaggagctcaacaatttcacgaggaatgaggtatggcatttagttccacgtcctaaccaaaatgttgtaggaaccaaatgggtcttccgcaacaagcaagatgagcatggtgtggtgacaaggaacaaagcacgacttgtggccaagggatattcccaagtcgaaggtttggatttcggtgaaacctatgcacccgtagctaggcttgagtcaattcgcatattattagcctatgctacttaccatggctttaagctttatcaaatggacgtgaaaagtgctttcctcaacggaccaatcaaggaagaggtctatgttgagcaacctcccggctttgaagacagtgagtatcctaaccatgtttataggctctctaaggcgctttatgggctcaagcaagccccaagagcatggtatgaatgccttagagatttccttattgctaatggcttcaaagtcggaaaagccgatcctacattctttactaaaactcttgaaaatgacttgtttgtatgccaaatttatgttgatgatattatatttgggtctactaacgagtctacatgtgaagagtttagtaggatcatgacacagaaattcgagatgtcaatgatgggggagttgaagtattttctaggattccaagtcaagcaactccaagagggcaccttcattagccaaacgaagtacactcaagacattcttgctaagtttgggatgaaggatgccaaacccatcaagacacccatgggaactaatgggcatctcgacctcgacacgggaggtaagtccgtggatcaaaaggtataccggtcgatgattggttcactgctttatttatgtgcatctcgaccggacattatgctttccgtttgcatgtgtgcaagattccaatccgaccctaaggaatcacaccttacagccgtaaaacgaatcttgagatatttggcttatacacctaagtttgggctttggtaccctcggggatccacatttgatttgattggttattcggatgccgattgggcggggtgtaaaatcaataggaagagcacatcggggacttgccagttcttgggaagatccttggtgtcttgggcttcaaagaagcaaaattcggtcgctctttccaccgccgaagccgagtacattgccgcaggtcattgttgcgcgcaattgctttggatgaggcaaaccctgcgggactacggttacaaattaaccaaagtccctttgctatgtgataatgagagtgcaatcaaaatggccgacaatcccgtcgagcatagccgcactaagcacatagccattcggtatcattttcttagggatcaccaacaaaagggggatatcgagatttcttacattaatactaaagatcaattagccgatatctttaccaagccacttgatgaacaatcttttaccagacttaggcatgagctcaatattcttgattctagaaatttcttttgctag

SEQ ID NO: 4595 - DNA, 5772 bp, Zea mays
  Clone ID: TF_ZM4633.C8.o1.fg
atgtcgggagatcacgccaagaaggagatggagaccggcgaaaagcccactacaagccacgggagcacttcatcggaagagtcccgcaccaaaaggagggagaagaagaagagctcctccaacaaagggaaggagaagaaatcttcttctcatcacaaagagaagaaggaaaaatcttcttcccacaagccgcatcggaaaggcgacaagcacaagaggatgaggaaggtggtctactacgagaccgacacttcatcaacatcgacctccgactccgatgcgccctccgtcacttctaagcgccaagagcgcaagaagtatagtaagatccccctacgttaccctcgcatttccaaacatacacctttactttccgtcccattaggcaaaccaccaacatttgatggtgaagattacgctaggtggagcgatttaatgcgatttcatctaacctcgctccacaaaagcatatgggatgttgttgagtttggcgcgcaggtaccatccgtaggggatgaggactatgatgaggatgaagtggcccaaatcgagcacttcaactctcaagcaacaacaatactcctcgcctctctaagtagagaggagtataacaaagtacaagggttaaagagcgccaaggagatttgggatgtactcaaaaccgcgcacgagggagacgagctcaccaagatcaccaagcgggaaacgatcgagggggagctcgatcggttccggcttaacaaaggggaggagccacaacacatgtacaaccggctcaagactttggtaaaccaagtgcgcaacctcgggagcaagaagtgggacgaccacgaagtggtaaatgttattttaagatctctcatttttctaaatcccactcaagttcaattgattcgtggtaatcctagatatactaaaatgacccccgaggaagttatcgggcattttgtaagttttgagtgcatgatagaaggctcgaggaaaatcaacgagcttggcgagccatccgaagctcaacccgttgcattcaaggcgacggaagaaaagaaggaggagtctacaccaagccgacaaccaatagacgcctccaagcttgacaatgaggagatggcgctcgtcatcaagagcttccgccaaatcctcaaacaaaggagggggaaagactacaagtcccgctccaagaaggtttgctacaaatgtggtaagcccggtcattttattgctaaatgtcccatgtctagtgacagtgaccgaggcgacgacaagaaggggagaagaaaggagaagaaaaggtactacaagaggaagggcggcgatgcccatgtttgtcgggaatgggattccgacgaaagctcaagcgactcctccgacgacgaggacgccgccaacatcgccgtcaccaagggactcctcttccccaacgtcggccacaagtgcctcatggcaaaggacggcaaacggaaaaaggttaaatctaactcctccactaaatatgaatcttctagtgatgaaaatgctagtgatgaggaggataatttgcgtattctctttgccaatcttaacatggagcaaaaagaaaaactaaatgaattgattagtgctattcatgaaaaggatgaccttttggactcccaagaggattgtctaattaaagaaaacaagaaacatgttaaggttaaaaaggcttatgctctagaagtagaaaaatgtgaaaaattatctagtgagctaagcacttgccgtgaaataattgacaaccttaggaatgaaaatgctattttaaatgctaaggttgattctcatgtttgtgatgtttcaatttccactcctagagataataatgatgatttgcttgctaggattgaagaattgaacatttctcttgctagccttagagtagaaaatgaaaagttgattactaaggctaaagaactagatgtttgcaatgttacaatttctgaccttagaactaaaaatgatatgttgcatactaaggttgtagaattaaaatcttgcaaaccctctacatctattgttgagcatgtatctatttgtactagatgtagaaatgttgatattgatgctattcatgatcacatgattttaattaagcaacaaaatgatcatatagctaaactagatgctaaaattgccgagcacaacttagaaaatgagaaatttaaatttgctcgtagcatgctttataatgggagacgccctggcatcaaggatggcattggcttccaaaggggagacaatgtcaaacttaatgcccctcctaagaacttgtctaactttgttaagggcaaggctcccatgcctcaggataacgagggttacattttgtaccctgccggttatcccgagagtaaaattaggagaattcactctaggaagtctcactctggccctaaccatgcttttatgtataagggtgagacatctagctctaggcaaccaacccatgccaagttgcctagaaagaaaactcctagtgcatcaaatgatcatactatttcatttaaaacttttgatgcttcttatgttttgacaaacaaatccggcaaggtcgttgccaagtttgttgggggcaagcacaagggatcaaagacttgtgtttgggtacccaaagttcttgtttctaatgccaaaggacccaaaacagtttgggtttatgcatccgggggctcaagttggatactcgacagcgggtgcacaaaccacatgaccggggagaaaaggatgttctcctcatatgagaaaaaccaagatccccaacgagctatcacattcggggatggaaatcaaggtgtcactgtctttagaagaagtgatgattcaatagcatttaagggtgtgttagagggtcagctatacttagtggattttgatagagctgaactcgacacatgcttaattgctaagactaacatgggttggctctggcaccgccgactagcccatgttggaatgaagaatcttcacaagcttctaaagggagagcacattttaggattaacaaatgttcattttgagaaagacaggatttgtagcgcatgccaggcggggaagcaagttggagtccatcacccacacaagaacatcatgacgaccgacaggccgcttgagctactccacatggatctattcggcccgattgcttacataagcatcggcgggagtaagtattgtcttgttattgtggatgattattctcgcttcacttgggtattctttttacaggaaaaatctcaaacccaagagaccttaaagggattcttgagacgagctcaaaatgagttcggcttaaggatcaagaaaataagaagcgacaacgggacggagttcaagaactctcaaattgaaggcttccttgaggaggagggcatcaagcatgagttctcctctccctacacgccacaacaaaatggtgtagtggagaggaagaatcgaactctattggacatggcaagaaccatgcttgatgagtacaagacaccggaccggttttgggccgaagcggtcaacaccgcctgctacgccatcaaccggttatatcttcaccgaatcctcaagaagacatcctatgaactcctaaccggtaaaaagcccaacatttcatattttagagtttttggtagcaaatgttttattcttgttaaaagaggaagaaaatctaaatttgctcctaaaactgtagaaggctttttacttggttataactcaaacacaagggcatatagggtctttaacaagtccactggactagttgaggtctcatgtgacgttgtgtttgatgaaactaacggctctcaagtagagcaagttgatcttaatgagataggtgaagaacaggctccatgcatcgcgctaaggaacatgtccatcggggatgtgtgtcctaaggaatccgaagagcctccaagtacacaagatcaaccatcctcctccatgcaagcatctccaccaactcaaaatgaggatgaggctcaaaatgatgaagagcaaaatcaagaagacgagccacctcaagatgatagcaatgatcaagggggagatacaaatgatcaagaaaaggaggatgaggaagaaccaagaccgccacacccaagagtccaccaagcaatccaacgagatcaccccgtcgacaccatcctcggcgacattcataagggggtaactactcgatctcgggttgctcatttttgtgaacattactcttttgtttcctctattgagccacacagggtagaggaagctctccaagattcggattgggtggtggcgatgcaagaggagctcaacaatttcacgaggaatgaggtctggcatttagttccacgtcctaaccaaaatgttgtaggaaccaaatgggtcttccgcaacaagcaagatgagcatggtgtggtgacaaggaacaaagctcgactcgtggccaaagggtattcacaagtcgaaggtttggattttggtgaaacctatgcacccgtagctaggcttgagtcaattcgcatattactggcctatgctacttaccatggctttaagctctatcaaatggacgtgaaaagtgccttcctcaacggaccaatcaaggaagaggtctatgttgagcaacctcccggctttgaagacagtgagtaccctaaccatgtctataggctctctaaggcgctttatgggctcaagcaagccccaagagcatggtatgaatgcctaagagatttccttattgctaatggcttcaaagttggcaaggtcgatcctacactctttactaaaactcttgagaatgacttgtttgtatgccaaatttatgttgatgatattatatttgggtctactaacgagtctacatgtgaagagtttagtaggatcatgacacagaaattcgagatgtcgatgatgggggagttgaagtattttctaggattccaagtcaagcaactccaagagggcaccttcatttgccaaacgaagtacactcaagacattctaaccaagtttgggatgaaggatgccaaacccatcaagacacccatgggaactaatgggcatctcgacctcgacacgggaggtaagtccgtggatcaaaaggtataccggtcgatgattggttcattgctttatttatgtgcatctcgaccggacattatgctttccgtttgcatgtgtgcaagattccaatccgaccctaaggaatcacaccttacggccgtaaaacgaattttgagatatttggcttatacacctaagtttgggctttggtaccctcggggatccacatttgatttgattggttattcggatgccgattgggcggggtgcaaaattaataggaagagcacatcagggacttgccagttcttgggaagatccttggtgtcttgggcttcaaagaagcaaaattcggtcgctctttccaccgccgaagccgagtacattgccgcaggacattgttgcgcgcaattgctttggatgaggcaaaccctgcgggactacggttacaaattaaccaaagtccctttgctatgtgataatgagagtgcaatcaaaatggccgacaatcccgtcgagcatagccgcactaagcacatagccattcggtatcattttcttagggatcaccaacaaaagggggatatcgagatttcttacattaatactaaagatcaattagccgatatctttaccaagccacttgatgaacaatcttttaccagacttaggcatgagctcaatattcttgattctagaaatttcttttgctag

SEQ ID NO: 4596 - DNA, 1041 bp, Zea mays
  Clone ID: TF_ZM4643.C4.o1.fg
atggatcctaagggaaaggggatggtggtcaacgacaaggagaaggagtccttcttcaacgagcctagagatgacaagcccactaactctggctcaagtcacaagaagaaggacgggaagaagaaaaggcgcatcaagaagatcgtctactacgacagcgacgaatcttcctcttcaccaagagacgacgacgacgagaaaaagaaaccgcaaattcataagaatgcacaagctaccactgttttgctagcttcgttgtgcagggatgaatacaacaaggtgagcggcttggacaacgccaagcaaatttgggataccctcaagatctctcatgagggtaatgatgccaccatgatcaccaagatggagttggtggaaggcgagctgggaaggttcgcaatgatcaggggagaagagccaacacaaacatacaataggctcaagaccctggtcaacaagattaggagttatgggagcacaagatggatggaccacgacgtcgtccgacttatgctaaggtacaccaagatgacgctcgaagagattcttggaaagtttgtgagcgggcgcatgatggtgaaggaggcccgatatgtggacgacgctctaaatggtccactccccgtccacgagcctcaaactattgccctcaaggcaaccagcagcagggagatgctaccaagcaaggtggcacaagttgaggcgaccgggctaaacgaagatgagatggctctcatcatcaagcgtttcaagaccgcattaaagggacgcaacgagtaccccaacaagaataaagaaaagggaaagcgctcctgcttcaaatgtggtaagataggtcattttattgctcaatgtcccgataatgaaaatgaccagggggaagaaagacatgggaagaaggagaagaagaaaagctataggaaggctaaaggcgaggcacatcttggcaaggaatgggactcggactgctcgtcatccgactccgatgatgaaggattggcagcctcggccttcaacaaatcttctctcttccccaactaa

SEQ ID NO: 4597 - DNA, 5670 bp, Zea mays
  Clone ID: TF_ZM4672.C3.o1.fg
atgtcgggagatcacgccaagaaggagatggagaccggcgaaaagcccactacaagccacgggagcacttcatcggaagagtcccgcaccaaaaggagggagaagaagaagagctcctccaacaaagggaaggagaagaaatcttcttctcatcacaaagagaagaaggaaaaatcttcttcccacaagccgcatcggaaaggcgacaagcacaagaggatgaggaaggtggtctactacgagaccgacacttcatcaacatcgacctccgactccgatgcgccctccgtcacttctaagcgccaagagcgcaagaagtatagtaagatccccctacgctaccctcgcatttccaaacatacacctttactttccgtcccactaggcaaaccaccaacttttgatggtgaagattacgctaggtggagcgatttaatgcgatttcatctaatctcgctccacaaaagcatatgggatgttgttgagtttggtgcgcaggtaccatccgtaggggatgagaactatgatgaggatgagttagcccaaatcgagcacttcaactcacaagccacaacaattctcctcgcctcactaagtaaagaggaatataacaaagtacaagggttgaagaacgccaaggaggtttgggatgtactcaaaaccgcgcacgagggagatgagctcaccaagatcaccaagcgggaaacgatcgagggggagctcggtcggttccggcttaacaaaggggaggagccacaacacatgtacaaccggctcaagactttggtaaaccaagtgcgcaacctcgggagcaagaagtgggacgaccacgaagtggtaaatgttattttaagatctctcatttttctaaatctcactcaagttcaattgattcgtggtaatcctagatatactaaaatgacccccgaggaagttatcgggcattttgtaagttttgagtgcatgatagaaggctcgaggaaaatcaacgagcttggcgacccatccgaagctcaacccgttgcattcaaggcgacggaagaaaagaaggaggagtctacaccaattcgacaaccaatagacgcctccaagcttgacaatgaggagatggcgctcgtcatcaagagcttccgccaaatcctcaaacaaaggagggggaaagactacaagtcccgctccaagaaggtttgctacaaatgtggtaagcccggtcattttattgctaaatgtcctatgtctagtgacagtgaccgaggcgacgacaagaaggggagaagaaaggagaagaagaggtactacaggaagaagggcggcgatgcccatgtttgtcgcgagtgggactccaacgagagctcaagcgactcctccgacgacgaggacgccgccaacatcgccgtcaccaagggacttctcttccccaacgtcggccacaagtgcctcatggcaaaggacggcaaaaagaagaaggttaaatccaactcctccactaaatatgaatcgtctagtgatgataatgccagtgatgaggaggataatttgcgtattctctttgccaatcttaacatggagcaaaaagaaaaactaaatgaattgattagtgctattcatgaaaaggatgaccttttggactcccaagaggattgtctaattaaagaaaacaagaaacatgttaaggttaaaaaggcttatgctctagaagtagaaaaatgtgaaaaattgtctagtgagctaagcacttgccgtgagatgattgacaaccttagaaatgaaaatgctattttaaatgctaaggttgattcacatgtttgtaatgtttcaattcccaatcttagagatgataacattgacttgcttgctaagattgatgaattgaatgcatctcttgctaggcttagattagagaatgaaaatttaattgctaaggctaaagattttgatgtttgcaatgctactatttccgaccttagaactaagaatgaaatgttgcatgctaaggttgtagaacttaaatcttgcaaaccctctacatctaatgttgagcatgtttctatttgcactagatgtagagatattgatgttaatgctattcttgatcatatggctttaattaaacaacaaaatgatcatatagcaaaattagatgctaaaattgccgagcacaacctagaaaatgagaaatttaaatttgctcgtagcatgctttataatgggagacgccctggcattaaggatggcattggcttccaaaggggagacaatgtcaaacttaatgctcctccaaagaacttatctaactttgttaagggcaaggctcccatgcctcaggataacgagggttacattttgtaccctgccggctatcctgagagcaaaattagaaagattcattctaggaagtctcactctggccctaatcatgcttatatgtataagggtgagacatctagctctaggcaaccaacccatgctaagttgcctaagaagaaaattcctaatgcatcaaatgatcatgccatttcatttaaaacttttgatgcatcttatgtgcttactagcaaatccggcaaggtttatgcatccgggggctcaagttggatactcgacagcgggtgcacaaaccatatgactggggagaaaagaatgttctcctcatatgagaaaaaccaagatccccaacgagctatcacattcggggatggaaatcaaggtgtcactgtctttagaagaagtgatgattcaatagcatttaagggagtgttagagggtcagctatacttggtagattttgatagagctgaactcgacacttgcttaattgctaagactaacatgggttggttctggcatcgccgactagcccatgttgggatgaagaatcttcataagcttctaaagggagagcacattttaggattaacaaatgttcattttgagaaagacaggatttgtagcgcatgccaggcggggaagcaagttggagtccatcatccacacaagaacatcatgacgaccgacaggccgcttgagctactccacatggatctattcggcccgattgcctacataagcatcggcgagagtaagtattgtcttgtaatagtggatgattattctcgcttcacttgggtattctttttacaggaaaaatctcaaacccaagagactttaaagggattcttgagacgagctcaaaatgagttcggcttaaggatcaagaaaataagaagcgacaatgggacgaagttcaagaactctcaaattgaaggcttccttgaggaagagggcatcaagcatgagttctcttctccctacacacctcaacaaaatggtgtagtggagaggaagaatcgaactctattggacatggcaagaaccatgcttgatgagtacaagacaccggaccggttttgggtcgaagcagtcaacaccgcctgctacgccatcaaccggttatatcttcaccgaatcctcaagaagacatcctacgaactcctaaccggtaaaaagcccaacatttcatattttagagttttcggtagcaaatgctttattcttgttaaaagaggtagaaaatctaaatttgctcctaaaactgtagaaggttttttacttggttatgactcaaacacaagggcatatagggtctttaacaagtccactggactagttgaagtctcatgtgacgttgtgtttgatgaaactaacggctctcaagtagagcaagttgatcttgatgagataggtaatgaagaggctccatgcatcgcgctaaggaacatgtccattggggatgtgtgtcctaaggaatccgaagagcctccaaatgcacaagatcagccatcctcctccatgcaagcatctccaccaactcaaaatgaggaagaggctcaagttgatgaagggcaaaatcaggaagatgagccacctcaagatgatagcaatgatcaagggggagatgcaattgatcaagaaaaggaagatgaggacgaaccaaggccgccacacccaagagtccaccaagcaatccaacgagatcaccccgtcgacaccatcctcggcgatattcataagggggtaactactcgatctcgggttgctcatttttgtgaacattactcttttgtttcctctattgagccacacagggtagaggaagctctccaagattcggattgggtggtggcgatgcaagaggagctcaacaacttcactagaaatgaggtatggcatttagttccacgtcctaatcaaaatgttgtaggaaccaaatgggtcttccgcaacaagcaagatgagcatggtgtggtgacaaggaacaaagctcgacttgtggccaagggatactcccaagttgaaggtttggatttcggtgaaacctatgcacccgtagctaggcttgagtcaattcgcatattattagcctatgctacttaccatggctttaagctttatcaaatggacgtgaaaagtgccttcctaaatggaccgatcaaggaagaggtctatgttgagcaacctcccggctttgaagacagtaagtaccctaaccatgtttataggctctctaaggcgctttatgggctcaagcaagccccaagagcatggtatgaatgcctaagagatttccttattgctaatgacttcaaagtcggcaaggccgatcctacactctttactaaaactcttgaaaatgacttgtttgtatgccaaatttatgttgatgatattatatttgggtctactaacgagtctacatgtgaagagtttagtaggatcatgacacagaaattcgagatgtcgatgatgggggagttgaagtattttctaggattccaagtcaagcaactccaagagggcaccttcattagccaaacgaagtacactcaagacattctaaccaagtttgggatgaaggatgccaaacccatcaagacacccatgggaaccaatgggcatctcgacctcgacacgggaggtaagtccgtggatcaaaaggtataccggtcgatgattggttcattgctttatttatgtgcatctcgaccggacattatgctttccgtttgcatgtgtgcaagattccaatccgaccctaaggaatcccaccttacgaccgtaaaacgaatcttgagatatttggcttacacacctaagtttgggctttggtaccctcggggatccacatttgatttgattggttattcggatgccgattgggcggggtgcaaaattaataggaagagcacatcggggacttgccagttcttgggaagatccttggtgtcttgggcttcaaagaagcaaaattcggtcgctctttccaccgccgaagccgagtacattgccgcaggtcattgttgcgcgcaattgctatggatgaggcaaaccctgcgggactatggttacaaattaaccaaagtccctttgctatgtgataatgagagtgcaatcaaaatggccgacaatcccgtcgaacatagccgcactaagcacatagccattcggtatcattttcttagggatcaccaacaaaagggggatatcgagatttcttacattaatactaaagatcaattagccgatatttttaccaagccacttgatgaacaatcttttaccagacttaggcatgagctcaatattcttgattctagaaatttcttttgctag

SEQ ID NO: 4598 - DNA, 1815 bp, Zea mays
  Clone ID: TF_ZM4685.C2.o1.fg
atgtcgggaggatccgccaagagggagatggaaacagacacaagccgcgggaaggctccatcaagggagtccggcgccaaaggaagggaggactcacctccccacgtcaagtcgcaccggagtggcgataagaagaagaaaatgaagaaagtggtctactacaagaccgattcttcgtcgccctccacctccggctccaacgcaccgtctgtcacttctaagcgccatgagcacaagaagtttagggatgaggtgaccaagatcaccaagcaggagacgatcgagggggagcttggtcgattcgtcctcaaccaaggagaggagccacaagccatgtacaatcggctcaagaccttggtcaaccaagtgcgcaacctcgggagcacaaaatgggatgaccatgaaatggtcaaggaggttatagggaagtttgtgagctttgagttgatgatcaaaggctccaaacaaatcatcgagcaaggcggcacctccacaactgaggtgcaacccgtcgcattcaaagcgacggaagaaaagaaagaagagtctacatcaagtaggctccccatcgacgcctctaagctcgacaacgaggaaatggcgcccatcatcaagagcttccgccaaatcctcaagcaaaggagggggaaggattacataccccgctccaagaaagtgtgctacaaatgtggtaagcccggtcattttatcgctaaatgccctatgtcgagtgatagtgacagggacaacgacaagagggggaataagaagagatattacaagaaaaagggcggcgatgcccacatatgtcgagaatgggacttcgacgagagcaccaccggctcctcctccaacgaggacgccgccaacatcgccgtcaacaagggcctcctcttccccaacgacggccacaagtgcctcatggcaaaggacgacaaaaagaagaaggtaaaaactagagcctccactaaatatacaacatctagtgatgagggtagttctagtgaagatgaggatgatttgcttagtctttttgccaaccttaacatgcaacaaaaggaaaaactaaatgaattgataggtgccattcatgagaaggatgaactcttggatagccaagaggaattccttattaaggaaaataaaaaatatgttaagataaaggatgcttgtgctcaggaagtagaaaaaaatgaaaatttgactaaggagcttagcatttgccatgacaccatttccaaccttagaaatgagaacgctaaactagatgctaaaattgccgagcatgaactagagaatgaaaattttaaatttgctcgtagcatgctttataatgggagacgccctagcattaaggatggcattggtttccaacagggaagcaatgtcaagcttaatgcccctaagaaattgtcaaactttgtaaagggcaaggctcccatggctcgggataacgagggttacattttatatcctgctggttatcctgagcataagattaggagaattcattctaggaagtctcattctggttctcatcatgcttttatgtataagaatgagacatctagttctaaacattctacccatgttaaaatgcctaaaaagaaaactcatgctgcatcaaatgagccaattatttcatttcagacttttgatgcatcttatgtgctgactaacaaatcaggcaaagtagttgccaaatatgttggggccaaacacaagggatcaaagacttgtgtttgggtgcccaaggtgcttgtctctaacatcaaaggacccaagactatttgggtacctaagaacaaggtctaa

SEQ ID NO: 4599 - DNA, 1891 bp, Zea mays
  Clone ID: TF_ZM4878.C9.o1.fg
atgacccccgaggaagttatcgggcattttgtaagttttgagtgcatgatagaaggctcgaggaaaatcaacgagcttggcgacccatccgaagctcaacccgttgcattcaaggcgacggaagaaaagaaggaggagtctacaccaagtcgacaaccaatagacgcctccaagcttgacaatgaggagatggcgctcgtcatcaagagcttccgccaaatcctcaaacaaaggagggggaaagactacaagtcccgctccaagaaggtttgctacaaatgtggtaagcccggtcattttattgctaaatgtcctatgtctagtgacagtgaccgaggcgacgacaagaaggggagaagaaaggagaagaagaggtactacaggaagaagggcggcgatgcccatgtttgtcgcgagtgggactccgacgagagctcaagcgactcctccgacgacgaggacgccgccaacatcgccgtcaccaagggacttctcttcccaaacgtcggccacaagtgcctcatggcaaaggacggcaagaagaagaaggttaaatccaactcctccactaaatatgaatcgtctagtgatgataatgctagtgatgaggaggataatttgcgtattctctttgccaatcttaacatggagcaaaaagaaaaactaaatgaattgattagtgctattcatgaaaaggatgaccttttggactcccaagaggattgtctaattaaagaaaacaagaaacatgttaaggttaaaaaggcttatgctctagaagtagaaaaatgtgaaaaattgtctagtgagctaagcacatgccgtgagatgattgacaaccttagaaatgaaaatgctattttaaatgctaaggttgattcacatgtttgtaatgtttcaattcccaatcttagagatgataatattgacttgcttgctaagattgatgaattgaatgtatctcttgctagccttagattagagaatgaaaatttaattgctaaggctagagattttgatgtttgcaacactactatttccgaccttagaactaagaatgaaatgttgcatgctaaggttgtagaacttaaatcttgcaaaccctctacatctaatgttgagcatgtttctatttgcactagatgtagagatgttgatgttaatgctattcttgatcatatggctttaattaaacaacaaaatgatcatatagcaaaattagatgctaaaattgccgagcacaacctagagaatgagaaatttaaatttgctcgtagcatgctttataatgggagacgccctggcatcaaggatggcattggcttccaaaggggagacaatgtcaaacttaatgcccctccaaagaacttatctaactttgttaagggcaaggctcccatgcctcaggataacgagggttacattttgtaccctgtcggttatcccgagagcaaaattaggagaattcactctaggaagtctcactctggctctaatcatgcttttatgtataggggtgagacatctagctctaggcaaccaacccgtgccaagttgcctagaaagaaaactcctaatgcatcaaatgatcatgccatttcatttaaaacttttgatgcttcttatgtgttgactaacaaatccggcaaagtagttgccaaatatgttgggagcaagcacaaggggtcaaggacttgtgtttgggtacccaaagttcttgtgtctaatgccaaaggacccaaaaccatttgggtttatgcatccgggggctcaagttggatactcgacagcgggtgcacaaaccacatgacaggggagaaaaggatgttctcctcatatgagaaaaaccaagatccccaacgagctatcacattcggggatggaaatcaag

SEQ ID NO: 4600 - DNA, 5790 bp, Zea mays
  Clone ID: TF_ZM4944.C2.o1.fg
atgtcgggagatcacgccaagaaggagatggagaccggcgaaaagcccactacaagctacgggagcacttcatcggaagagtcccgcaccaaaaggagggagaagaagaagagctcctccaacaaagggaaggagaagaaatcttcttctcaccacaaagagaagaaggaaaaatcttcttcccacaagccgcatcggaaaggcgacaagcacaagaggatgaggaaggtggtctactacgagaccgacacttcatcaacttctacctccgactccgatgcgccctccgtcacttctaagcgccaagagcgcaagaagtatagtaagatccccctacgctaccctcgcattcctaaacacacacctttactttccgtcccattaggcaaaccaccaacttttaatggtgaagattatgctatgtggagtaatttgatgcgatttcatctaacctctctccacaaaagaatatgggatgttgttgagtatggtgtacaggtaccatcaataggggatgaggactatgacacggacgaagtggcccaaatcgagcacttcaactcccaagccgcaaccatcctccttgcctccctaagcaaggaggaatacaacaaagtacaaggattgaagaacgccaaggagatttgggacctactcaagacggcgcacgagggtgatgaactcaccaagatcaccaagcgggaaacgatcgagggggagctcggtcgcttccgtcttcgccaaggggaggagccacaagacatgtacaaccggctcaagaccttggtgaatcaagtgcgcaacctcgggagtacaaagtgggatgaccacgaagtggttaaggttattctaagagctcttattttccttaaccccacacaagttcaattaattcgtggtaatccaagatatccactaatgacccccgaggaagtcatcgggaattttgttagttttgaatgcatgattaagggctccaagaagatcaacgagcttgacgagccctccacatccgaggcgcaaccggtggcctttaaggcaacggaggagaagaaggaggagtctacaccaagtagacaaccaattgacgcctccaagctcgacaatgaggagatggccctaatcatcaaaagctttaggcaaatcctcaagcaacggaaggggaaggactacaaacctcgttccaagaaggtttgctacaagtgtggtaagcccggtcacttcattgcaaaatgtcctatgtctagtgacagtgacaggggcgacgacaagaagggaagaagaaaggagaagaagaaatactacaagaagaagggcggcgatgcccatgtttgtcgggagtgggactccgacgaaagctcaagcgactcctccgacgacgaggacgccgccaacatcgccgtcaccaagggtcttctcttccccaacgtcggccacaagtgtctcatggccaaggacggcaaaaagaaggtaaaatcaaggtcctccaccaaatatgaaacatctagtgatgaggatgatgataaaaatgaggaggataacttgcgcattctttttgctaaccttaacatggaacaaaaggaaaaattaaatgaactaattagtgccatccatgaaaaggatgatctcttggactcccaagaggacttcctaatcaaggagaataagaaacatgttaaggttaaaaatgcttacgctctacaagttgaaaaatgtgaaaaattgtctagtgagctaagcacttgccgtgagatgattgacaaccttagaaatgaaaatgctattttaaatgctaaggttgattcacatgtttgtaatgtttcaattcccaatcttaaaaatgataacgttgacttgcttgctaagattgatgaattgaatgcatctcttgctagccttagattagagaatgaaaatttaattgctaaggctaaaaattttgatgtttgcaatgctactatttccgaccttagaactaagaatgaaatgttgcatgctaaggttgtagaacttaaatcttgcaaaccctctacatctaatgttgagcatgtttctatttgcactagatgtagagatattaatattgaggctatccatgatcacctagccttaattaaaaaacaaaatgatcatatagctaaactagatgctaaaattgccgagcacaacttagaaaatgagaaatttaaatttgctcgtagcatgctttataatgggagacgccctggcatcaaggatggcattggcttccaaaggggagacaatgtcaaacttaatgcccctcctaagaacttgtctaactttgttaagggcaaagctcccatgcctcaggataacgagggttacattttataccctgcaggctatcctgagagcaaaattaggaagattcattctaggaagtctcactctggccctaaccatgctttcatgtataagggtgagacatctagtcctaggcaaccaacccgtgccaagttgcctaagaagaaaattcctaatgcatcaaatgatcatgccatttcatttaaaacttttgatgcatcttatgtgcttactagcaaatccggcaaagtagttgccaaatttgttgggggcaaacacaagggctccaagacttgtgtttgggtacccaaagttcttgtatctaatgccaaaggacccaaaacagtttgggtttatgcatccgggggctcaagttggatactcgacagcgggtgcacaaaccacatgaccggggagaaaaggatgttctcctcatatgagaaaaacaaagatccccaacgagctattacatttggggatggaaatcaagggttggtcaaaggtgtcactgtctttagaagaagtgatgattcaatagcatttaagggtgtgttagagggtcagctatacttagtagattttgatagagctgagctcgacacatgtttaattgctaagactaacatgggttggctctggcaccgccgactagcccatgttgggatgaagaatcttcataagcttctaaagggagagcacattttaggactaaccaatgttcattttgagaaagacaggatttgtagcgcatgccaagcagggaagcaagttggcactcatcatccacacaagaacataatgacgactgacaggccactggagctgctacacatggatctattcggcccgatcgcttacataagcatcggcgggagtaagtactgtctagttattgtggatgattattctcgcttcacttgggtattctttttacaggaaaaatctcaaacccaagagaccttaaagggattcttgagacgagctcaaaatgagttcggcttaaggatcaagaaaataagaagcgacaatgggacggagttcaaaaactctcaaattgaaagcttccttgaggaggagggcatcaagcatgagttctcttctccctacacgccacaacaaaacggtgtagtggagaggaagaatcgaactctattggacatggcaagaaccatgcttgatgagtacaagacaccggaccggttttgggccgaagcggtcaacaccgcctgctacgccatcaaccggttatatcttcaccgaatcctcaagaagacaccatatgaactcctaaccggtaaaaagcccaacatttcatattttagagtttttggtagcaaatgcttcattctcattaaaagaggtagaaaatctaaatttgctcctaaaactgtagaaggctttttacttggttatgattcaaacacaagggcatatagggtctttaacaagtccactggactagttgaagtctcttgtgacgttgtgtttgatgaaactaacggctctcaagtagagcaagttgatcttgatgagataggtgaagaacaggctccatgcatcgcactaaggaacatgtccatcggggatgtgtgtcctaaggaatccgaagagcctccaagtacacaagatcaaccatcctcctccatgcaagcatctccaccaactcaaaatgaggatgaggctcaaaatgatgaagagcaaaatcaagaagacgagccacctcaagatgatagcaatgatcaagggggagatacaaatgatcaagaaaaggaggatgaggaagaaccaagaccgccacacccaagagtccaccaagcaatccaacgagatcaccccgtcgacaccatcctcggcgacattcataagggggtaactactcgatctcgggttgctcatttttgtgaacattactcttttgtttcctctattgagccacacaggatagaggaagctctccaagattcggattgggtggtggcgatgcaagaggagctcaacaatttcacgaggaatgaggtatggcatttagttccacgtcctaaccaaaatgttgtaggaaccaaatgggtcttccgcaacaagcaagatgagcatggtgtggtgacaaggaacaaagctcgactcgtggccaaagggtattcacaagtcgaaggtttggattttggtgaaacctatgcacccgtagctaggcttgagtcaattcgcatattattggcctatgctacttaccatggctttaagctctatcaaatggacgtgaaaagtgccttcctcaacggaccaatcaaggaagaggtctatgttgagcaacctcccggctttgaagacagtgagtaccctaaccatgtctataggctctctaaggcgctttatgggctcaagcaagccccaagagcatggtatgaatgcctaagagatttccttattgctaatggcttcaaagttggcaaggccgatcctacactctttactaaaactcttgaaaatgacttgtttgtatgccaaatttatgttgatgatattatatttgggtctactaacgagtctacatgtgaagagtttagtaggatcatgacacagaaattcgagatgtcgatgatgggggagttgaagtattttctaggattccaagtcaagcaactccaagagggcaccttcattagccaaacgaagtacactcaagacattcttgctaagtttgggatgaaggatgccaaacccatcaagacacccatgggaaccaatgggcatctcgacctcgacacgggaggtaagtccgtggatcaaaaggtataccggtcgatgattggttcattgctttatttatgtgcatctcgaccggacattatgctttccgtttgcatgtgtgcaagatttcaagccgaccctaaggaatcacaccttacggccgtaaaacgaatcttgagatatttggcttatactcctaagtttgggctttggtaccctcggggatccacatttgatttaattggttattcggatgccgattgggcggggtgcaaaattaataggaagagcacatcagggacttgccagttcttgggaagatccttggtgtcttgggcttcaaagaagcaaaattcggtcgctctttccaccgccgaagccgagtacattgccgcaggacattgttgcgcgcaattgctttggatgaggcaaaccctgcgggactacggttacaaattaaccaaagtccctttgctatgtgataatgagagtgcaatcaaaatggccgacaatcccgtcgagcatagccgcactaagcatatagccattcggtatcattttcttagggatcaccaacaaaagggggatatcgagatttcttacattaatactaaagatcaattagccgatatctttaccaagccacttgatgaacaatcttttaccagacttaggcatgagctcaatattcttgattctagaaatttcttttgctaa

SEQ ID NO: 4601 - DNA, 5823 bp, Zea mays
  Clone ID: TF_ZM4954.C4.o1.fg
atgtcgggagatcacgccaagaaggagatggagaccggcgacaagcccactacaagccaagggagcacctcatcggaagagtcccgcaccaagaaaagggagaagaagaagaactcctccaaacggaaggagaaaagatcttcctcttctcaccacaaggagaagaaggaaaaatcttcttctcacaagccgcatcggagtggggacaagcacaagaggatgaggaaggtggtctactacgagaccgacacttcatcgacatctacctccggctccgacgcggcgtccgtcacttctaaacgccaagagcgtaagaagtatagtaagattcccctacgctatcctcgtgttcctaaacatacacctctactttccgtcccattaggtaaaccaccaacttttaatggtgaagattatgctatgtggagtaatttaatgcgatttcatctaacctctctccacaagagtatatgggatgttgttgagtatggtgtacaggtaccatctataggggatgaggactatgacacggacgaagtgtcccaaatcgagcacttcaactcccaagccgcaaccatcctccttgcctccctaagcaaggaggaatacaacaaagtacaaggattgaagaacgccaaggagatttgggacctactcaagacggcgcacgagggtgatgaactcaccaagatcaccaagcgggaaacgatcgagggggagctcggtcgcttccgtcttcgccaaggggaggagccacaagacatgtacaaccggctcaagaccttggtgaaccaagtgcgcaacctcgggagtacaaagtgggatgaccacgaagtggttaaggttattctaagagctcttattttccttaaccccacacaagttcaattaattcgtggtaatccaagatatccactaatgacccccgaggaagtcatcgggaattttgttagttttgaatgcatgattaagggctccaagaagatcaacgagcttgacgagccctccacatccgaggcgcaaccggtggcctttaaggcaacggaggagaagaaggaggagtctacaccaagtagacaaccaattgacgcctccaagctcgacaatgaggagatggccctaatcatcaaaagctttaggcaaatcctcaagcaacggaaggggaaggactacaaacctcgttccaagaaggtttgctacaagtgtggtaagcccggtcactttattgcaaaatgtcctatgtctagtgacagtgacaggggcgacgacaagaagggaagaagaaaggagaagaagaagtattacaagaagaagggcggcgatgcccatgtttgtcgggagtgggactccgacgaaagctcaagcgactcctccgacgacgaggacgccgccaacatcgccgtcaccaaaggccttctcttccccaacgtcggccacaagtgtctcatggccaaggacggcaaaaagaaggtaaaatcaaggtcctccactaaatatgaaacatctagtgatgaggatgatgataaaaatgaggaggataacttgcgcattctctttgctaaccttaacatggaacaaaaggaaaaattaaatgaactaattagtgccatccatgaaaaggatgatctcttggactcccaagaggacttcctaatcaaggagaataagaaacatgttaaggttaaaaatgcttacgctctacaagttgaaaaatgtgaaaaattgtctagtgagctaagcacttgccgtgagatgattgacaaccttagaaatgaaaatgctattttaaatgctaaggttgattcacatgtttgtaatgtttcaattcccaatcttagaaatgataacgttgacttgcttgctaagattgatgaattgaatgcatcacttgctagccttagattagagaatgaaaatttaattgctaaggctaaaaattttgatgtttgcaatgctactatttccgaccttagaactaagaatgaaatgttgcatgctaaggttgtagaacttaaatcttgcaaaacctctacatctaatgttgagcatgtttctatttgcactagatgtagagatattaatattgatgctatccatgatcacctagccttaattaaaaaacaaaatgatcatatagctaaactagatgctaaaattgccgagcacaacttagaaaatgagaaatttaaatttgctcgtagcatgctttataatgggagacgccctggcatcaaggatggcattggcttccaaaggggagacaatgtcaaacttaatgcccctcctaagaacttgtctaactttgttaagggcaaagctcccatgcctcaggataacgagggttacattttataccctgcaggctatcctgaaagcaaaattaggaagattcattctaggaagtctcactctggccctaaccatgctttcatgtataagggtgagacatctagttctaggcaaccaacccgtgccaagttgcctaagaaggaaattcctaatgcatcaaatgatcatgccatttcatttaaaacttttgatgcatcttatgtgcttactagcaaatccggcaaagtagttgccaaatttgttgggggcaaacacaagcattccaagacttgtgtttgggtacccaaagttcttgtatctaatgccaaaggacccaaaacagtttgggtttatgcatccgggggctcaagttggatactcgacagcgggtgcacaaaccacatgaccggggagaaaaggatgttctcctcatatgagaaaaacaaagatccccaacgagctatcacattcggggatggaaatcaagggttggtcaaaggtttgggtaaaattgctatttcacctgaccattccatttccaatgtttttcttgttgattcattagattacaacttgctttctgtttcccaattatgtcaaatgggctacaactgtctttttactgatatatgtgtcactgtctttagaagaagtgatgattcaatagcatttaagggtgtgttagagggtcagctatacttagtagattttgatagagctgagctcgacacatgtttaattgctaagacaaacatgggttggctctggcaccgccgactagcccatgttgggatgaagaatcttcataagcttctaaagggagagcacattttaggactaaccaatgttcattttgagaaagacaggatttgtagcgcatgccaagcagggaagcaagttggcactcatcatccacacaagaacataatgacgactgacaggccactggagctcctacacatggatctattcggcccgatcgcttacataagcatcggcgggagtaagtactgtctagttattgtggatgattattctcgcttcacttgggtattctttttacaggaaaaatctcaaacccaagagaccttaaagggattcttgagacgagctcaaaatgagtttggcttaaggatcaagaaaataagaagcgacaatgggacggagttcaagaactctcaaattgaaagcttccttgaggaggagggcatcaagcatgagttctcttctccctacacgccacaacaaaacggtgtagtggagaggaagaatcgaactctattggacatggcaagaaccatgcttgatgagtacaagactccggaccggttttgggccgaagcggtcaacaccgcctgttacgccatcaaccggttatatcttcaccgaatcctcaagaagacatcatatgaactcataaccgaaggttttttacttggttatgactcaaacacaagggcatatagggtctttaacaagtccactggactagttgaagtctcttgtgacgttgtgtttgatgaaactaacgactctcaagtagagcaagttgatcttgatgagataggtgaagaacaggctccatgcatcgcgctaaggaacatgtccatcggggatgtgtgtcctaaggaatccgaagagcctccaagtacacaagatcaaccatcctcctccatgcaagcatctccaccaactcaaaatgaggatgaggctcaaaatgatgaagagcaaaatcaagaagacgagccacctcaagatgatagcaatgatcaagggggagatacaaatgatgaagaaaaggaggatgaggaagaaccaagaccgccacacccaagagtccaccaagcaatccaacgagatcaccccgtcgacaccatcctcggcgacattcataagggggtaactacacgatctcgggttgctcatttttgtgaacattactcttttgtttcctctattgagccacacagggtagaggaagctctccaagattcggattgggtggtggcgatgcaagaggagctcaacaatttcacgagaaacgaggtatggcatttagttccacgtcctaaccaaaatgttgtaggaaccaaatgggtcttccgcaacaagcaagatgagcatggtgtggtgacaaggaacaaagctcgactcgtggccaaagggtattcacaagtcgaaggtttggattttggtgaaacctatgcacccgtagctaggcttgagtcaattcgcatattattggcctatgctactcaccatggctttaagctctatcaaatggacgtgaaaagtgccttcctcaatggaccaatcaaggaagaggtctatgttgagcaacctcccggctttgaagacagtgagtatcctaaccatgtttataggctctctaaggcgctttatgggctcaagcaagccccaagagcatggtatgaatgccttagagatttccttattgcaaatggcttcaaagtcggcaaggccgatcctacactctttactaaaactcttgaaaatgacttgtttgtatgccaaatttatgttgatgatattatatttgggtctactaacgagtctacatgtgaagagtttagtaggatcatgacacagaaattcgagatgtcgatgatgggggagttgaagtattttctaggattccaagtcaagcaactccgagagggcaccttcattagccaaacgaagtacactcaagacattcttgctaagtttgggatgaaggatgccaaacccatcaagacacccatgggaactaatgggcatctcgacctcgacacgggaggtaagtccgtggatcaaaaggtataccggtcgatgattggttcattgctttatttatgtgcatctcgaccggacattatgctttccgtttgcatgtgtgcaagatttcaagccgaccctaaggaatcacaccttacggccgtaaaacgaatcttgagatatttggcttatactcctaagtttgggctttggtaccctcggggatccacatttgatttaattggttattcggatgccgattgggcggggtgcaaaattaataggaagagcacatcagggacttgccagttcttgggaagatccttggtgtcttgggcttcaaagaagcaaaattcggtcgctctttccaccgccgaagccgagtacattgccgcaggacattgttgcgcgcaattgctttggatgaggcaaaccctgcgggactacggttacaaattaaccaaagtccctttgctatgtgataatgagagtgcaatcaaaatggccgacaatcccgtcgagcatagccgcactaagcacatagccattcggtatcattttcttagggatcaccaacaaaagggggatatcgagatttcttacattaatactaaagatcaattagccgatatctttaccaagccacttgatgaacaatcttttaccagacttaggcatgagctcaatattcttgattctagaaatttcttttgctag

SEQ ID NO: 4602 - DNA, 5731 bp, Zea mays
  unsure (1)..(5731): unsure at all n locations
  Clone ID: TF_ZmC119_1758
atcccgtggttcggccgagaccaacgcttgcctactccacgttgtggcgtcccaacagacgagggttgcaatcaacccctctcaagcggtccaaagacccacttgaataccacggtgttttgcttgctttttctcaatcccgtttgcgaggaatctccacaacttggagcctctcgcccttacactttaagatcacaaagaaacacggagcaagggagggattagcagcacactcaagaaatcacagcaacaccacgcacacaagtcacaacgagagctcacaatacaactcaatgagttcaccactcaactagagctccaattgctatcgcaaagaatcaaaggcgcggaatcgatatcttggtgcttaggaatgttgtaggaatgcttggtatgctcctccatgcgcctaggggtcccttttatagccccaaggaagctaggagccgntgagagcaatctaggaaggctgatcttgccttctgtcgactggcgcaccggacagtccggtgcacaccggacatgtccggtgcccgatttctttccataaatggcacagtcgaccgttggcagccagagagccgttggcgcaccggacatgtccggtgcacaccggacagtccggtgcctccttctagccgntgnctcggccacgtgtcccacgcagatcgcgcggccgaccgttggcccgaccgaccgttggctcaccggacagtccggtgcacaccggacagtccggcgaattatagccgtacgtcgccggtgaattcccgagagcggtcagttcgcttgagccagcctggcgcaccggacactgtccggtgcttcaccggacagtccggtgctcccagactgagcagacttggcttagcaaagccatctcattttcaattggatttttcctgtttccagcacttagacacaatacattagtccataaaataatgtactaagtctgagaaacatacctttattcttgatttgtactttgtccaccacatgggcatagatcaacacaaaaacacttgtgttggcactcaatcaccaaaatacttagaaatggcccaaggacacatttccctttcaatctccccctttttggtgatttatgccaacacaacataaagcaactagaacaagtgcaatatcacttcaaataaaaactcaattttattttgattcagttttggcatatatggatcatcctttgccaccacttggtttgtttttgcaaatcaaactcaaaatcctatctctaagtcaaatccacttgtagagacataaagagaggttttccaaagaaaattgattcaatattccaaaaactccccctatttcccataatcaatacttctccccacaagaggccaacttttgacaaaagagacaacaaaagagatttgacaaaccaaaagctctattctactgttttcaaaatctctcaagtggtagctgatccatttatcactttggcctttattttctccccctttggcatcaagcaccaaaacgggatcaatcttggccctttaatcccattgcctcaccaaaatcttcaattaagagtacaaaggcaataagatcatagagatgaacttggaataagttaccctctcatcggagtgcagtggaagtcttgcatggtccaagttcacctttccctttcattccacttcgagactaaatcaagcagactcaagcaaatggttagtctcaaagggtcaagttgtaacacatctccccctaaacatgtgcatcactttgcaacggacttgtgaggtccagggagtgtttgtacaacttgagcaccataataagcaacaaaatgcagaatgaacctcctttgttgaggtcggtgtgcccgtcggtccccatcggagtcttggcgggtttggcgtccttcatcccaaaccgctttagcagatcttgcgtgtacttcgtttgggagatgaaggtgccgtccttgagttgcttcacttggaacccaaggaagtagttcaactcgcccatcatcgacatctcgaatttctgcgtcatcaccctgctaaactcttcacaagaatggtcggggtaccgttcatcctcgaagccagggggttgctccacgtacacctcctccttgattggcccgttgaggaaagcgctcttcacatccatttggaacaacctgttcatcgtcttgagttgggggttgcaccattgttgaggaagatgattgatctcgttcaccttgttcctgtggccgcacttctccaatcgccatggttcgtatagcggccgtcggaacatcttcttcatctacatcatcaagatcaacaacttgctctcttggagagccattagtctcatcaaatacaacgttgctagagacttcaaccaaacccgatgatttgttgaagaccctatatgcctttgtatttgagtcataacctaacaaaaacccttctacagctttgggagcaaacttagaattcctacctttcttcactagaatgtaacatttgctcccaaatacacgaaagtaagacacattgggtttgttaccggttagaagctcatatgaagtcttcttgaggaggcgatgaaggtagacccggtttatggcgtggcaagccgtgctcacggcttccgtccaaaaccgttcgggcgtcttgaattcaccaagcatcgtcctcgccatgtctagtagcgtcatgttcttcctctctaccacaccgttttgctgtggtgtatagggagcggagaactcgtgcttgattccttcctcctcaagatactcctccacttgaaggttcttgaactcggacccattgtcgcttcttatcttcttcactttgagttcaaactcgttttgggctctccttaggaagcacttgagggtccttcctcctatgcttagataggtgacgggtccaaagaggtccatatgaagtaactccaggggtcttgatgttgtcatcacatttttggcatgatgagagcttcccacctgtttacctgcttgacaagctgcacaaggtctatctttttcgaaagttagattagttagacctatcacgtgttctccctttagaagcttgtgaaggttcttcatccccacatgtgctaaacggcgatgccacagccagcccatgctagtcttagcaattaagcatgcatctagaccggcctcctcttttgcaaaatcaactaaataaagtttgccgtctagtacacccttaaaagctaatgaaccatcacttcttctaaagacagacacatctacatttgtgaataaatagttatatcccatattacaaagttgactcacagacaacaaggtatatccaagtgactcaactaagaacacattagaaatagagtgctcggatgaaataacaatttttcctaaccctttcaccttgccttggttcccatcaccgaatatgattgaaccttggggatccttgttcttgacgtaggaagagaacatcttcttttcccccgtcatgtggtttgtgcatccgctgtcgataatccagcttgagcccccggatgcatacaccttcttatcctttctacaaatagcaaaggaagcattgcaagcataataaattgtagaaggttcattcattactttcctatgaacaatatttcttctaggcatatgatgaacaacatttttcctagccaaatttctatcatgcataatagaagaactagaagcaatcatggcatgagaatcaaaagcatcataacttctataaatgttcctagaatgtttcttatcatgatacatgaaagcatggttcttttgagcactactagccataggggccttccctttctccttggcagagatggaagccttatgacttgttaagttcttgacttccctcttgaagccaagaccatccttaactgaggggtgtctaccaatcgtgtaggcatcccttgcaaattttagtttgtcaaattcactcttgctagtcttaagttgggcattaagactagccacttcatcattcaatttagaaattgaaactaggtgttcactgcaagcatcaacattaaaatctttacacctattgcaaactacaacatgttctacacaagatgttgatttattagctatttctaacttagcactcaaatcatcatttatgctctttaagctagaaatagagtcatgacatgtagacaattcacaagaaagcatttcattccttttaatttctaaagcaagggatttttgtgcctctacaaacttatcatgttcttcatacaaaagatcctcttgcttttctaataacctattcttatcattcaatgcatcaattaattcattaatcttgtcaaccttagttctatctaggcctttgaataaacatgaatagtctatttcatcatcgctagattcttcatcacttgaggaagcgtaagtactagtattatgagtgcttaccttcttttcccttgccatgaggcaggtgtgatgctcgttggggaagagggccgacttgttgaaggcggtggcggtgagtccttcgttgtcggagtcggacgacgaacaatccgagtcccactcctttccaaggtgtccctcgcccttagccttcttgtaagccttcttcttttccctcttgttcccttgttcctggtcactatcattatcgggacaattagcgataaaatgaccaatcttaccacatttgaagcatgagcgcttccccttcgtcttggtcttgttgggatgctccttgcgaccccttagcgccgtcttgctaggtagcgcctccttgctcctcgttgctttgagagcaatggtttgaggctcttggattgggccattcaacgcatcatcaacgtatctagcctccttgatcatcatccgcccgcttatgaactttccaagtatctccttgggcgtcatcttggtgtacctaggattctcacaaatattgttcacaagatgtggatcaaggacagtaaaagaccttagcattaggcggacgacgtcgtggtccgtccatcgcgtgcttccatagctccttattttgttgacgagggtcttgagccggttgtacgtttgggttggctcctcgcccctgatcattgcgaatctcccaagttcgccctccaccaactccatcttggtgagcatggtgacgtcgttcccctcatgtgagattttgagggtgtcccaaatctgcttggcgttatccaagccgcttaccttatggtattcatccctgcacaatgaagctagaagaacagtagtagcttgtgcatttttgtgaatttgctcattaatgaacatgggactatccgtgctatcaaagtgcattccattttctactatctcccatatacttggatggagagagaacaagtggctacgcattttgtgactccaaaatctgtagtcctctccatcaaagtgggggggtttaccgaggggaatggaaagcaaatgagcattggaactttgtggaatatgagaataatcaaaggaaaattttgaattaaccgtcttctttttctcgtagtcgttgtcatcatccttttgggaggaggaagattcgtcgctgtcgtagtagactatctccttgatgcgccttgttttcttcttcctcccgtcttttcttttgtggcccgagcctgagtcagtaggcttgtcatcctttggatcattgacgaaggactccttctccttatcattgaccaccatccccttgcccttaggatccat

SEQ ID NO: 4603 - DNA, 4225 bp, Zea mays
  Clone ID: TF_ZmC119_990
aaaaaaggcagcttaaagcatatctcctcctacatgtgtgatgcacatgaacccatccttcgaaagtccagggagtgattgtcccctttgaaccccacaaatacataacaaaatgcataaaggaacatgatcaaagcataccgcacatgtatgctacaaatcaatccaagttccgcgaatctaagacatttagctcactacgcagcctgcaaaaggtcttctcatctagaggcttggtaaagatatcggctagctggttctcggtgctaacatgaaacacttcgatatcccccttttgccggtggtctctcaaaaagtgatgccggatgtctatgtgctttgtgcggctgtgttcaacaggattatccgctatgcggatagcactctcattatcacataggagtgggactttgctcagattgtagccaaagtccctgagggtttgcctcatccaaagtagttgcgcgcaacactgtcctgcggcaacatactcggcctcagcggtggatagggcaacggaggtttgtttcttagaactccatgacaccagggaccttcctaagaattggcatgtccccgatgtactcttcctatcgaccttacatccagcatagtcggagtctcctttgttgaggtcggtgtgtccgtcggttcccattggagtctttgcgggcttggcgtccttcatcccaaaccgcttgatcaagtcttgcgtgtacttcgttagggagatgaaggttccatccttgagttgcttcacttggaatccaaggaaatagcttaactcgcccatcatcgacatctcaaacttttgagtcattaccctgctaaactcttcacaagacttttggttagtagaaccaaatattatgtcatcgacataaatttggcacacaaaaagatcaccatcacatgtcttagtaaaaagagttggatcggctttcccaaccttgaaagcattagcaattaaaaagtctctaaggcattcataccatgctcttggggcttgcttaagtccatagagcgccttagagagcttacacacgtggtcggggtaccgttcatcctcaaagccagggggttgctccacatacacctcctccttgattggcccgttgaggaaagcgctcttcacatccatttggaacaacctgcgacttgggcataaccttttgccaagtctagccttgttccttgtcaccaccccgtgctcgtcttgtttgttgcggaatacccacttggttcccacaacatttttcttgggacgaggcacaagtgtccaaacttcatttctcttgaagttgttgagctcctcttgcatggccaacaaccagtccggatctagcaaggcctcttctaccctgaaaggctcgatagaagagacaaaagagtaatgctcacaaaaattgactaatcgagaccgagtagttactcccttgctaatgtcacccaatatttggtcgacgggatgattcctttgaatcgtcgctcgaacttgggttggaggtgccggttgtgcttcttcctccattaaatgatcatcttgtgctcccccttgatcacatgcctcctcttgatgaacctgtttatcttcttgagttgggggatgcaccattgttgaggaagaaggttgatcttgctccttttgttccagtggcctcacatctccaatcgccatggtgcgtattgcggccgttggaatgtcttcttcatctacatcatcaagatcaagaacttgctctcttggagagccattagtctcatcaaatacaacgtcgctagagacttcaaccaaacccgatgatttgttgaagactctatacgcctttgtatttgagtcataacctaacaaaaacccttctacagctttgggagcaaactttgaatttctacccttctttacttgaatgtagcatttactcccaaaaactcggaaatacgaaacattgagtttgttaccggttagaagctcatacgaagtcttcttgaggagtcggtgaaggtagacccggttgatggcgtggcaagccgtgttcacgacttccgaccaaaaccgctcgggggtcttgaactctccaagcatcatcctcgccatgtctatgagcgtcctgttcttcctctctaccacaccattttcctgtggtgtgtagggagcggagaacttgtgcttgatcccttcctcctcaaggtactcctccacttgaagattcttgaactcagacccattgtcgctccttatcttcttcaccttgagctcaaactcgttttgagctctccttaggaagcgcttgagggtcccttgggtttcagatttatcggataacaaattatatccaagcgactcaactaagaatacattagaaatagagtgctcatttgagattgcaatcttgcctaagcctttaaccttgccttgattcccatcaccgaatatgattgagtcttgggaatctttgttcttgacgtaggaggtgaacatctgcttttcccccgtcatgtggtttgtgcatccgctgtcaataatccagcttgatcccccagatgcataaacccaactcttgttgggtcctacaaggttagtgacaatatccttagggacccaaatgcaagttttatctcccttgcattttgcccctaattttctagcaactatcttcctatcctttctataaatagcaaaggaagcatttaaggcatgataaattgtagaaggttcactatttgttttcctaggcacatgagcaacatttcttctaggcatgtgattaataacatttctcctagctaaatttctatcatgtataatagaagaactagaagcaaccatggcatgagaaaacgtatcataacttctatacccatttctagaatgtctcctatcatgatacatgaaggcatggttcttttgagcactactagccatagaggccttccctttctccttggcggagatggaagccttatggcttgttaagttcttgacttccctcttgaagccaagaccatccttaattgaggggtgtctaccaattgtgtaggcatccctagcaaattttagcttgtcaaattcactcttgctagtcttaagttgggcattaagactagccacttcatcatttaattttgaaatgcaaactaggtgttcactacaagcatcaacattaaaatctttgcacctattgcaaatcataatatgttctacacaagagttaggtttacttgatacttctagtttagcatttaaatcattattagcactttttaaagtagaaatggtttcatgacaagtagatagttcataagaaagcatttcattccttttaacttctagagcaagagaattttgtgcactaacaaacttatcgtgctcttcatataaaaggtcctcttgtttttctaataacctattcttatcattcaaggcatcaattaattcattgattttatcaactttggttctatctagtcccttcttctcctttgccatgaggcatgtgtgatgctcgttggggaagagggatgacttgttgaaggcggtggcggcgagtccttcattgtcggagtcggacgaggagcaatccgagttccactcctttccaagatgtgcctcgccctttgccttcttgtagttcttcttcttttcccactttccactctttttttcctggtcactatcattatcgggacaattagctataaaatgaccaatcttaccacatttgaagcaggagcgcttccccttcgttttgttcctgttggggtgctccttgcgaccctttagcgccgtcttgaatctcttgatgatgagggccatctcttcatcattaagcacggccgactcaacttgtgccaccttgctaggtagtgcctccttgcttcttgttgctttgagagcaacggtttgaggctcgtggattgggccattcaatgcatcatccacgtatctcgcctccttgatcatcatccgcccgcttacaaatttcccaaggatttcttcgggcgacatcttggtgtacctgggattttcacgaatattgtttaccagatgtggatcaagtacagtaaaggaccgtagcattaggcggacgaagtcgtggtccgtccatctcgtgcttccgtagctccttattttgttgacgagggtcttgagccggttgtacgtttgggttggctcctcgcccctgatcatagcgaatctcccaagttcgccctccaccaactccat

SEQ ID NO: 4604 - DNA, 1867 bp, Zea mays
  Clone ID: TF_ZmC13103_7
atggatcctaaagggaagggaatcgtgatcaacgacaaggagaaggagttcttcgtcaacgagccaagggatgacaagtccaacgactcgggctcgggccacagccgcaaagatgggaagaagaagaagacaagacgcatcaaggagatcgtctactacgacagcgatgagtctacttcctcccaaaaggacgacgaccacaacgaatacgagagaaagaaaccggcaacgaggagcaaggaggcgctaccgagcaaggtggcgcaagttgaggcggccgggctaaataatgaggagatggccctcatcattaagcgcttcaagacggtgcttaaaggtcgcaagggacagccaagcaagaccaagacaaaggagaagcgctcgtgcttcaaatgtggtaagattggtcatttcattgctaactgtcccgataatgaaagtgaccaggaaaaggggaacaaaagggagaagaagaagcattacaagaaggccaagggcgaggcacatatcggaaaggagtgggattcagattgctcctcctccgactccgacaatgaaggactcgccgccaccgccttcaacaagtcatccctcttccccaacgagcgtcacacttgcctcatggcaagggagaagaaagtttatgcatccgggggttcaagctggattatcgacagcggatgcacaaaccatatgacgggggagaagaagatgttcacctcctacgtcaagaataaggattcccaagattcaattatattcggtgatgggaatcaaggcaaggataagtctgaaacccaagggaccctcaagcgcttcctcaggagagctcaaaatgagtttgagctcaaggtgaagaagataaggagcgacaacgggtccgagttcaagaaccttcaagtggaggagttccttgaggaggaaaggatcaagcacgagttctccgctccctacacaccacagcaaaatggtgtggtagagaggaagaacaggacgctaatcgatatggcgaggacgatgcttggagaattcaagacccccgagcgtttttggtcggaagccgtgaacacggcttgccacgccatcaacagggtctaccttcatcgcctcctcaagaagacttcgtatgagctactaaccgataacaaacccaatatgaagaagatgttccgacggccgctatacgaaccatggcgattggagaagtgcggccacaggaacaagatgaacgagatcaaccttcatcctcaacaacggtgcatcccccaactcaagacgatgaacaggttcatcaaaaggaggcgtgtgatcaagggggagcacaagatgatcatgtgatgggggaagaagcgcaaccggcacctccaacccaagttcgagcgatgattcaaagggatcatcccgtcgaccaaattctgggtgacattagcaagggagtaactactcggtctcgattagttaatttttgtgaacattactcctttgcctcttctattgagcctttcagggtagaagaggccttgctagatccggactgggtgttggccatgcaagaggagctcaacaacttcaagaggaatgaagtttggacgccggtgcctcgtcctaagcaaaatgttgtgggaaccaagtgggtgttccgcaacaaacaagacgagcacggagtggtgacaaggaacaaggctcgacttgtggcaaaaggttatgcccaagtcgcaggtttggactttgaggagacttttgctcccgtggctaggctagaatccattcgtatcttgctagcatatgccgctcaccattctttcaggttgttccaaatggatgtgaagagcgctttcctcaacgggccaataaaggaggaggtgta

SEQ ID NO: 4605 - DNA, 8172 bp, Zea mays
  Clone ID: TF_ZmC29741_1
tcaatccaggttccgcgaatctaagacatttagctcactacgcaacctgcaaaaggtattatcatttaaaggcttggtagagatatcggttagtttcttatcgggactaacatgaaacactttcatatttcccttttgcttgtggtctcccataaagttatgcctaatgtctatgtgcttcgtgtggctttgttcattcgtagtatccgtcatgcggataacactctccttatcacagaggagtgggactttgctcagattgtagccaaagtccctgagggtttgcctcatccaaagtagttgcgcgcaacactgtcctacggcaacatactcggcctcagcggtggatagggcaacgaaagtttgtttcttagagttccatgacaccagggaccttcctaagaattggcacgtccccgatgtactcttcctatcgaccttacatccagcatagtcggaatctgaatatccaattaggtcaaaggtagacccctttggataccagagcccgaagcaaggcgtagcaactaaatatctaaggattcgcttcactgccactaagtgacactccttaggatcggattgaaatctagcacacatgcatacgcttagcataatatccggtctactagcacataaataaagtaaagaccctatcattgaccggtatgcttagcgttctacccggtttccacctttgttgaggtcggtgtgtccgtcggttcccatcggcgtctttgcgggcttggcgtccttcatcccaaaccgctttagcaagtcttgcgtgtacttcgtttgggagatgaaggtgccgtccttgagttgcttcacttggaacccaaggaagtagttcaactcgcccatcatcgacatctcgaatttctgcgtcatcaccctgctaaattcttcacaagactttttattagtagaaccaaatattatgtcatcgacataaatttggcacacaaaaagatcaccgtcacaagtcttagtgaaaagagttggatcggctttcccaaccttgaaagcattaccaattaagaaatctctaaggcattcataccatgctcttggggcttgcttaagtccatagagcgccttagagagcttacacacgtggtcggggtaccgttcatcctcgaagccagggggttgttctacgtacacctcttccttgattggcccgttgaggaaagcgctcttcacatccatttggaacaacctgaaagaatggtgagcggcatatgctagcaagatacgaattgattctagcctagccacaggagcaaacgtctcctcaaagtccaaacctgcgacttgggcataaccttttgccacaagtcgagccttgttcctcgtcaccaccccgtgctcgtcctgtttgttgcggaacacccacttggttcccacaacgttttgcttgggatgaggcaccagtgtccaaacttcattacgcttgaagttgttgagctcctcttgcatggccaacacccagtccggatctagcaaggcctcttctaccctgaaaggctcaatagaggagacaaaggaataatgctcacaaaaattaactaatcgagatcgagtagttactcccttgctaatatcacccagaatttggtcgacgggatgatccctttggatcatcgctcgaacttgggttggaggtgccggttgagtttcttcctccatcacatgatcatcttgtgctccccctcgatcacacgcctcctgttgatgaacctgttcatcgtcttgagttgggggatgcaccatagttgaggaagaaggttgatcttgctccttttgttcctgtggtcgtacatcaccaatcgccatggttcgtgtagcggccgtcggaacatcttcttcatctacatcatcaagatcaacaacttgctctcttggagagccattagtctcatcaaatacaacgtcgctagagacttcaaccaaacccgatgatttgttgaagaccctatacgcctttgtatttgagtcataacctaacaaaaacccttctatagctttgggagcaaatttggaattcctacccttcttcactagaatgtagcatttactcccaaatacacgaaagtacgatacattgggtttgttaccagttagcagctcatatgaggtcttcttgaggaggcggtgaaggtagaccctgttgatggcgtggcaagccgtgttcacggcttccgaccaaaagcactcgggggtcttgaactctccaagcatagtcctcgccatatctatgagcgtcatgttctttctctctaccacaccattttgctgaggtgtgtatggagcggagaactcgtgcttgatcccctcctcctcaaggaactcctccacttgaagattcttgaattcggacccgttgtcgctccttatcttctttaccttgagctcaaactcattttgagctctcctgaggaagcgcttgagggtcccttgggtttcagacttatcctgcaaaaagaacacccaagtgaagcgggaaaagtcatcaacaataactagaccatacttacttcctcctatgctcagataggcgacgggtccgaagaggtccatatgcagcagctccagaggtcttgaagtggtcatcacattcttgctgtgatgtgctcctcccacttgtttacctgcttgacaagctgcacaaggtctatctttttcgaattgcacgttagtcaaacctatcacgtgttctccctttagaagcttgtgaaggttcttcatccccacatgtgctaagcggcgatgccacagccagcccatgctagtcttagcgattaagcatgcatctagaccggcctcctcttttgcaaaatcaactaaataaagtttgtcgtctagtacacccttaaatgctagtgaaccatcacttcttctaaatacagacacatccttgcattttgcccctaatttcctagcaactatcttcctatcctttctacaaatagcaaaggaagcatttaaagcatgataaattgtagaaggaccattcataactttcctagcagcatgaacaacattctttctcggaacatgaattccatttttcctaagtatttctctatcctttatataggttgcaatggaagtatacaaagcacagtcaagtgaatcaaaagtattacatcttttatgagactgtcttctatcattgtacataaaaacatgattcatattagtactactagccacaagggccttcccattctcattggtagaaatcacatcattatgacttgtagagttcttggcttccctcttgaagccaagcccatccttaattgaggtgtgtctaccaatcgtgtaggcatccctagcaaattttagtttatcaaaatcacttttgctagccttaagttgggcattaagactagccatttcatcatttaactttgcaatagaagctatgtgttcactacaagcatcaatatcaaagtctttacatctattgcaaataacaacattttctacacaagttgttgatttactagctatttctatcttagcattcaaatcgtcattaatgctccttaagctagaaatcgtctcatggcaagaagataattcacagaaaagcatttcatttcttttaacttctaaagcatgagatttttgtgcttctacaaatttgtcatgttcttcatacaacaaatcttcttgtttttctaaaagcctattcttatcattcaaggcatcaattaactcattaattttatctaccttgattctatctaggcccttcttctcccttgccataaggcatgtgtgacgctcgttggggaagagggatgacttgttgaaggcggtggcggcgagtccttcattgtcggagtcggaggaggagcaatccgagtcccactcctttcctagatgtgcctcgcccttggccttcttgtaatttttcttcttttccctcttgctcccgtgttcctggtcactttcattatcgggacagttagcaataaaatgaccaatcttaccgcatttgaagcatgagcgcttccccttggctttgatcttgcttggctgtcccttgcgacctttaagcgccatcttgaatctcttgatgatgagggccatctcttcatcattaagtctggcggcctcaatttgtgctaccttgctgggtaacgcctccttgctccttgttgccttgagggcaacgggttgaggctcattgattggaccgtttagagcgtcgtccacatacctcgcttccttgatcatcattcgcccgcttacgaattttccaaggacttcttcgggcgacattttggtgtacctgggattctcacgaatgttattcaccaaatgaggatcaagaacggtaaaggaccttagcatcaatcggacgacgtcgtggtccgtccatcgcgtgcttccgtagctccttattttgttgataagggtcttgagccggttgtatgtttgtgtcggctcctcgccccttatcatcgcgaatcgtccaagctcgccctccaccaactccatcttggtgagcaaggtgacgtcgttcccctcatgtgaaatcttgagggtgtcccagatctgcttggtgttatccaagccactcactttgtgatattcatccctgcacaatgaagctagaagaacagtagtagtttgtgcattcttatgaatttgctcgttaatgaacaagggactatcagaactatcaaagtgcattccactctctacaatctcccatatactaggatgaagagaaaacaagtgactacgcattttgtgactccaaaatccgtagtcctctccatcaaaatgaggaggtttaccaagtggaatagataataaatgagcatttgcactttgaggaatacaagagtagtcaaaagaaaagttcgaattgaccggtttccttctctcgtagtcgttgtggttgtcgtccttttgggagaaagtagactcatcgctgtcgtcgtagtagacgatctccttgatgcgtcttgtcttcttcttcttcccatctttgcgtctgtggcccgagcccgagtcgttggacttgtcatcaatctccccctttttggtgattgatgccaaaacaaacaagtgttcattacaaaaataaagtactgaataataaacgttctccccctttttggcaccaagaaccaaaaagagagagagagaaacgccaatccaaggatcaccagtggggaggaggatgatgaggagcgaagaggtgttgcgccaggtcggaggcaaagtgttcctctccagactgggccggaggaggagcactgccagacgggtcctggggcggagggtaagaggacgattggcccggatccccgtgatatgggggagggtcaaactgctccggatcatcaaaataagtttcttcttcttcgacgtcatcggctgatgaaaaaggtaccccatacgcctgctggtaccactcgttgacatctggaggagggggtgaagaggtacatcaggagaacgaggggcgaagggagtacccaaagcggaagcttgacgacgaaggttgtcgtcggtctcccgctgacgtcgagccacctcatggacatctgcagcaatatttcggcacatggagaagaaggccgcaaacccgtgggccaggcggacacccatcccacggccacgacctcgaccacgaccacgaccacgtggtgtgggagatccgcggccaggggaagggcgcgaggcaccaccagcagcagcagcagcaccagcaccggcagacggaccagcagatgtatgaccacgagaactggagggggctttcctgaggcgcccagctggattgttgggatcaatccagaaaggggtgtatgactgatgtcgggtgcctttctcaaatctgaattgggtcacgacctcaatcatcttcataatgaatggagcatgaagacaccccttcaaaggaaagcaggctgcatgaataatttcctgccatatcatgtcaaagacattaaccctttctgagctgtttggtttcataaaagagagcaagaccttgctctccccaaggatgttcatctgatttcccccttttggaatgagggtcatcctgcagagggagttgatataatgataatacttatgaatgttggttgactcccaatactttccagactcagacagatgaaggtccttggcttcatctcttgtgggctgccggaaatcatgaatcttgatcttgtctccagatatatcgttgtcagaaaaaccaagaatgtgagcaaaacgacgatagctcaccttgtaccaactaccttcaatgaagaagttcagataggggtagttgtaatgactctccacgccagcaagctttatccagagagtggagtagaattgagcaatcacttcatcattccaatcatattggaatgtcatgatgttcttcatttgcttccttccacaggccctcagtgcctgtgacatttctgggtccccaatcgcttcacaaccttcccagttaatatatcgttgatgaaggatgggttgatgcttcttgggaagaatgactgaattatagaaatccacgtggtgaagagtccaaaagcgatttccatcgatcctgacatcgcgaatacgcaatacaggattttggaaacgaagatcttggagaagagcagaccctccactggcagtgaagtcagtgactggctcattgccagtacactgagcctctgcacgatggaggaccaagccgcgaatcacaggagcttgggccgggggaagatcaacttcatcgtccttcccaccatcatcatcacttgcaggctcccatgcctgcggattcgtcgcaggtcgagaccgaccggaaggagtccgggaagtccgaccgcgagcactttgagaccctgaggcctcagcacccggcatgacattgccgcttccgcgccctcgcttggatcgagagcgaggtggggtatcaccatggatttcctggtcatccgaggagtcggattcgaccaccgacgggttccttcgacgcaccattctaagaaataagaaatagaacctcgatccgaagatggggtcaagatctcccaacgaaatagaggaagatggtggaaacacgccgggaagaacggatctccaaccacacttccaaaagggtgagggctcgagagagtttggagtggagagaggagagaatgagatggcggcggcggaaccaaaatctctaagggtttgcttcatccatagcaactgtgcacaacatgccccagctgctatgtattcagcttctgcagtggagagtgcaacacaattttgtttcttggaactccatgacactaaggaccgcccaaggaattggcaagtcccagtagtgctttttcgatctactttgcaatcggtataatcttcctcatttaggtcgagatgtccatttgatgacattggagtcttggcgtgctttgctttttccatgccaaacttcttgagcatatcttgagtatatttagtttggcatagaaaggtaccttccttgagttgtttgacttgaaatcccaggaagtatttaagctcgcccatcatagacatctcaaacctgttcgtcattactttgctaaactcttcacaaaatttttcattagtactaccaaatataatgtcatcaacatatatttggcacacaaataattcattatcaacttttcgagtaaacaaagtagagtcagcttttcctattgtaaatccatttttaattaaaaaatctttaagacagtcataccaagctctaggggcttgtttaagcccgtagagtgccttgtgaagaagataaacatgatttggcttctttgggtcttcgaagcccggtggttgctccacatatactctttcttgtagtggtccatttagaaaagcgctcttgacatccatttgatatagcttgaaatcatggttagtagcataggcaattaatattctaattgattctaaccttgctaccggcgcatatgtttcaccaaaatcaagtccttccacttgagtatagccttgggcaaccaaccttgccttgtttcttgtaacaacgccattttcatcttgcttgttcctaaagacccatttagtttcaatcacattttgtttgggtctttggactaaggaccagacttcattcctagtgaagttgttcaactcctcttgcat

SEQ ID NO: 4606 - DNA, 6303 bp, Zea mays
  Clone ID: TF_ZmC29741_2
ctaagacccaagcctaagattctttgcgggcttggcgtccttcatcccaaaccgctttagcaagtcttgcgtgtacttcgtttgggagatgaaggtgccgtccttgagttgcttcacttggaacccaaggaagtagttcaactcgcccatcatcgacatctcgaatttctgcgtcatcacccagctaaactcttcacaagacttttgattagtagaaccaaatattatgtcatcgacataaatttggcatacaaagagatcaccatcgcaagtcttagtgaaaagagttggattagctttcccaaccttgaaagcattagcaattaaaaagtctctaaggcattcataccatgctcttggggcttgcttaagtccatagagcgccttagagagcttacacacgtggtcggggtaccattcatcctcgaagccagggggttgctctacgtacacctcctccttgatcggcccgttgaggaaagcgctctttacatccatttggaacaacttgaaagaatggtgagcggcatatgctagcaaaatacgaatagattctagcctagccacaggagcaaaggtctcctcaaagtccaaacctgcgacttgggcataaccttttgccacaagtcgagccttgttccttgtcaccaccccgtgctcgtcctgcttgttgcggaacacccacttggtttccacaacattttgattgggacgcggcaccagtgtccaaacttcattacgcttgaagttgttgagctcctcctgcatggccaacacccagtccggatctagcaaggcctcttctacctcccttgctaatatcacccaatatttggtcgatgggatgcttcctttgaatcgtcgctcgaacttggttggaggtgccggttgtgcttcttcctccatcacatgatcatcttgtgctcccccttgatcacacgcctcctcctgatgaacctgttcatcgtcttgagttggaggatgcaccatcgttgaggaagaaggttgatcttgctccaattgttcctgtggtcgcacatcgccaatcgccatggtgcgcattgcggccgttggaacgtcttcttcatctacatcatcaagatcaacaacttgctctcttggagagccattagtttcatcaaatacaacgtcgctagagacttcaaccaaacccaatgatttgttgaagaccctatacgcctttgtatttgaatcataacctaataaaaacccttctacggctttgggagcaaatttagaagttgtacctttcttcacaagaatataacacttgctcccaaatacacgaaagtaagacacattgggtttgttaccggttagcagctcatacgaagtcctcttgaggaggcggtgaaggtagacccggttgatggcgtggcaagccgtgttcacggcttccgaccaaaagcgctcgggggtcttgaactctccaagcatcgtcctcgccatatcgatgagcgtcctgttcttcctctctaccgcaccattttgctgtggtgtgtagggagcggagaattcgtgcttgatcccttcctcctcaaggaactcctccacttgaaggttcttgaactcggacccgttgtcgctccttatcttcttcatcttgagctcaaactcattttgagctctccttaggaagcgcttgagggtcccttgggtttcagatttatcctgtaaaaggaatacccaagtgaagcgggaaaaatcattgactataacaagaccatacttacttcctccgatgcttagataggcgacgggtccgaagaggtccatatgaagcatctccaaaggtcttgatgtggtcatcacatttttggtgtgatgagagcttcccacctgtttccctgcttgacaagctacacaaggtctatctttttcgaaatgcacgttagttagacctatcacgtgttctccctttagaagcttgcgaaggttcttcatccccacatgtgctaagcggcgatgccacagccagcccatgctagtcttagcaattaagcatgcatctagaccggcctcttcttttgcaaaatcaaccaaataaagtttgccgtctagtacacccttaaaagctagtgaaccatcacaccttctaaagacagacacatctaaccctttcaccttgccttggttcccatcaccgaatattattgaatcttggggatccttgttcttgatgtaggaagagaacatcctcttttcccccgtcatgtggtttgtgcatccgctgtcgataatccagcttgtacccccggatgcataaaccttcttaccctttctacaaatagcaaaggaagcattgcaagcataataaattgtagaaggttcatttattttcctaggaacattaacaacatttctcctaggcatatgatgaacaacatttctaccatgcatataggaagaactagaagcaaacatgtcatgagaatcaaaagcatcataacttctataggcattcctagaatgtctcctatcatgatacatgaaagcatggttctttttagcactactagccataggtgccttccctttctccttggcggagatgggagccttatggcttgttaagttcttggcttccctcttgaagccaagtccatccttaattgagaggtgtctaccaatagtgtaggcatcccttgcaaattttaacttatcaaattcacttttgctagtcttaagttgggcattaagactagccacttcatcatttaactttgcaatagacactaggtgttcactacaagcatccacattaaaatctttacacctagtgcaaatcacaacatgctctacacaagatgttaatttactagatttttctaacttagcattcaaatcatcatttatgctctttaagctagaaattgtctcatggcaagtagatagttcacaagaaagcatttcatttcttttaacttctaaagcatgagatttttgtgcctctacaaatttatcatgttcttcatacaacaaatcctcttgcttttctagtaacctattcttatcattcaaggcatcaattaactcattaattttgccaattttaattctatctaaacctttaaataaactagaatagtctatttcatcgtcatcactagaatcatcatcacttgaagaagcataagtggtatcccgagtatataccttcttctccttcgccatgaggcatgtgtggtgctcgtttgggaagagggatgacttgttgaaggcggtggcggcgagtccttcattgtcggagtcagaataggagcaatctgaatcccactcctttccgagatgtgcctcgcccttggccttcttgtaattcttcttcttttctcttttgttccctttttcctggtcactatcattatcgggacagttagcaataaaatgaccaatcttaccacatttgaagcatgatcgcttcgcctttgtcttggtcttgtttggctgtcccttgcgaccctttagcgccgtcttgaagcacttgattatgagggtcatctcttcatcattgagccctgccgcctcaacttgcgccaccttgctaggtagcgcctccttgcttctcgttgccttgagagcaacgggttgaggctcattgattggaccattcaacgcatcgtccacgtatctcgcctccttgatcatcattcgcccgcttacgaacttcccaagaacttcttcgggcgacatcttggtgtacctaggattttcacgaatattgttcaccagatgtggatcaagtacagtaaaggaccttagcattaggcggacgacgtcgtggtccgtccatcgcgtgcttccgtagctccttattttgttgacaagggtcttgagccggttgtacgtttgggttggctcctcgccccttatcatcgcgaatctcccaagttcgccttccaccaactccattttggtgagcatggtgacgtcgttcccctcataagagatcttgagggtgtcccagatctgcttggcattgtccaagccgctcaccttattgtattcatccctgcacaatgaagctagaagaacagtagtcgcttgtgcatttttgtggatttgctcgttaatgaacatgggactatcagtactatcaaatttcattctactctcaactatctcccatatgctcggatggagagagaacaagtgactacgcattttatgactccaaaatccgtagtcctctccatcaaagtgaggaggtttgccaagtggaatggagagcaaatgagcatttgtactttgcggaatacgagagtaatcgaaagaaaagtttgaattgaccgtttttcgtttctcgtagtcgtagtcgtccttttgggaagaagtggactcgtcgatgtcgtcatagtagacgatctccttgatgcgccttgtcttcttcttcttcccatctttccatttatggcccgagcctgagtcggtaggcttgtcatccttcagctcgttgacgaaggactccttctccgtacaccgccgtcgaagtcccgagagcagtgagttcgccagagccagcctggcgcaccggacagtccggtgcacccagactgagcagactttggctgtacaaagccatctcttttccaattcgatttttccttttgacttggtttgcactttgtccaccactttgcatagattaacacaaaagcacttgtgttggcactcaatcaccaaaatacttagaaatggcccaagggcacatttccctttcaaggtcacgttattatgccttaaggattttgggatgagaccattagggtggttggagtttgactctttggtatcggtgacaacaaggatgacgatggtgtccttctcttcactaactgtgtagtgatagatcggataccatgtgtctatgtatgatgaaattgtgtacgatgaacatcggttcacgtgtcgacccgttctcttatttatatatgcggtgtgaaaggggacttcaatcaaagattgttgccttctctgatctaggcacatgtaaggtttttgactcagccttttgaccgagctgaatgagatgaacttgaaaggtacagacccagtgctcatgatgtcggcgtggaccttgtactcctccgcgtacacgaatgaggtcacggccagggggagagccgcgtatatatagacattattgggggctgttggtcggcttgcctgtacaacagcaatgtgcagaagggtgccgtgcattccaatggccagcgaggcgatcagcatgatgaccgggcctatcaggaacttgaggagcatggagagcgaggcgacggtgtacccgcacggcacgaaccgtgactgccgcgctatgaacgtccctgaagcgaacatgctcagcccaactgcggttgtgtagatgatgaacagagagtcgctaacaatcttcggcatcgagaatccaatcttgaatgccatgagagaccagatgaggccaaggaaactggcataggtgttcggaatctggagaagcttcttcgtggccatccagacgacgtgcatcaccggcggctggacatccacggccaccaccacctgcttgttagcatctccatcgtcctctgggctcatctccttcgtggccgccgcgggcatcaacgacgacgcaacgaccgcctccgccgccggcgccggcgccacctccgtgatctcaatgttgacgaccacctggtggtggtggtggctacggtcggcggcggcatgacgatggacactactgcttccgccgttttcgtcgtcgacgacgcgctcgcccgccgtcgccggcacggctgggctgatcctggcgctgccgtcccgcgccgccatgaactcgtagaggaagatgacgacgttgtaccagatgcagaactgcatgacgacgatctgcttcatgagcccgcccgacacgggcccgtacatgccgtccaggagcggcacgcccatgatgatggtgttgggcagcgacgccaccgagaagttggtcaccacccacttgatcggcgactccgctccctgaaccacctgccgcttccctcggcctccgcggcgcctgctgaggtgggaccagaacgcccaggccgtgagcgccagcagcacgacggccttctgcagcgtgtcggcggcgatgaggcgctcgttcatgtggtacgggtcgttggtggacaccatgtggaagatgagcaccggcacggcgtacagcgccacgaagtggttgatccccgcgcactgctcgtcggagaaggctttgagccaccgcacggacgcgtagcccagcaccgccgacgtgtacagcggcgccat

SEQ ID NO: 4607 - DNA, 2874 bp, Zea mays
  Clone ID: TF_ZmC29741_31
tcaccccccctctaggcgactttcaacatgttctccctttagaagtttatgaatgttctttatcccaacatgtgctagacgacaatgccacagccagcccatgctagtcttagcaattaagcatgcatctagatcggcctcctccttcgaaaaatcaactaaatagagtttgtcgtctagtacacccttaaaagctaatgaaccataactccttctaaagacagacacatctacatttataaatagacaattataacccatattacatagttgactgacagacgataagttgtatctgagcgattcaactaagaacacattggatatggaatgctcggatgaaatagctatctttcctagtcctttaaccttgccttggttcccatctccgaagatgatcgaatcttgggaatccttgttcttgacgtaggaggtgaacatcttcttctcccccgtcatatggtttgtgcatccgctatcaataatccagcttgaacccccggatgcataaacccaactcatgttgggtcctacaaggttagcacaaatatccttagggacccaaatgcaagttttgtctcccttgcatcttgcccctaattttctagcaattatcttcctatcctttctacaaatagcaaaggaagcatttaaagcatgatattttgtggaaggttcattaactttcctaggaacattaatcatatttctcctaggcatattatgaacaacatttttcctactaacatttctatcatgcacataggaagaactagaagcaaccatggcatgagaatcaaaagcatcatatgcattataactccgataagcatttctagattgtctcctatcatgatacaaaaaggcatagttccttttagtactattagccataggggccttccctttctccttggcggagatgggagccttatggcttgttaagttcttgacttccctcttgaagccaagcccatcgttaattgaggggtgtctaccaaccgtgtaggcatccctagcaaattttagtttctcaaaatcacttttgctagtcttaagttgggcattaagactagctacctcttcatttaatttagaaatgcaagctaggtgttcactataagcatcaatgttaatatctttacacctagtgcacgctacaacattttctacacaagaggtggatttactagcaatctctaacttagcattcaaatcatcattaatgctccttaatttaaaaattgtctcatggcaagaagataattcacaagaaagcatttcatttcttttaacttctagagcataagatttttgtgcctctacaaatttgtcatgctcttcatacaaaaggtcctcttgtttttctaagagtctatctttttcattcaaggcatcaatcaattcattaattttatctactttagttctatccaatcccttgaacaaactagagtaatctatttcatcatcactagactcatcatcactggaggaatcataagtgacattgttttgattacataccttcttctcccttgccataaggcatgtgtgacgctcgttggggaagagggatgacttgttgaaggcagtggcggcgagtccttcattgtcggagtcggaggaggagcaatctgaatcccactcctttccgatatgtgcctcacccttggccttcttgtaatgcttcttcttttccctcttactcccgtgttcctggtcactatcattgtcgggacagttagcaataaaatgaccaatcttaccacatttgaagcatgagcgcttctcctttgtcttggtcttgcttggttgtcccttgcgacctttaagcgccgtcttgaagcgcttaatgatgagggccatctcctcattatttagcccggccgcctcaacttgcgccaccttgcttggtagcgcctccttgctccttgttgccttgagagcaatgggttgaggctcatgaataggaccgttcaacgcgtcgtccacgtatcttgcctccttgatcatcattcgcccgcttacgaacttcccaagaacttcttcgggcgacattttggtgtacctgggattctcacgaatattattcaccaaatgaggatcaagaacggtaaaggaccttagcattaggcggacgacgtcgtggtccgtccatcgcgtgcttccatagctccttatcttgttgacaagggtcttgagccggttgtacgtttgggttggctcctccccccttatcatcgcgaatctcccaagttcgccctccaccaactccatcttggtgagcatggtgacgtcgttgccctcgtgagagatcttgagggtgtcccatatctgcttggcattgtccaagccgctcaccttattgtattcttccctacacaaagatgctaagagaacagtagtagcttgtgcatttctatggatttgttcatttataagcatagggctatccgagctatcaaatttcattccattctctacaatttcccatatgcttggatggagagagaataagtgactacgcattttgtgactccaaaatccgtagtcctccccatcgaagtgtggaggtttgccaagaggaatggaaagcagatgcgaattcgaattatgtggaatacgagaataatcaaatgaaaagttcgaattgaccgtcttcctgtagtcgttgtcgtcgtccttttgggaagaggaagattcgtcgctgtcgtagtagacaatctccttgatgcgccttgtcttcttcttcttcccatcttttcgtctatggcccgggcccgagtcgttggacttgtcatccttaggttcgttgacgaaggactccttctccttgtcgttgatcacgattcccttccccttaggatccat

SEQ ID NO: 4608 - DNA, 1999 bp, Zea mays
  Clone ID: TF_ZmC29741_45
tagccataggggccttccctttctccttggcggagatgggagccttatggcttgttaagtccttggcttccctcttgaagccaagtccatccttaattgaggggtgtctaccaatcgtgtaggcatcccttgcaaattttagcttgtcaaattcattcttgctagtcttaagttgggcattaagactagccaattcatcattcaatttggaaattgaaactagatgttcactacaggcatcaatgtcaaaatctttacacctattgcaaatcataacatgttctacacaagagttagatttactagctatttctagcttagcattcaaatcatcatttatgctccttaagctagaaattgtctcatggcaagaagatagttcacaagaaagcatttcatttcttttaacttctaaagcatgagatttttgtgcctctacaaatttgtcatgctcttcatataaaaggtcctcttgtttctctaaaagtctatccttttcattcaaggcatcaatcaattcattaatcttatctattttagttctatccaatcccttgaacaaactagagtaatccatttcttcatcactggactcatcatcactagaagaatcataagtggcattgtttcgagtacataacttcttttccttcgccatgaggcatgtgtggcgctcgttggggaagagggatgacttgttgaaggcggtggcggcgagtccttcattgtcggagtcggatgacgaacaatctgagtcccactccttgccaaggtgtgcctcgcccttagcctttttgtatgtcttcttcttctccctcttgtttccctgttcctggtcactatcattatcggggcagttagcgataaaatgaccaatcttaccacacttgaagcacgagcgcttcccctttgtcttggtcttgcttggctgccccttgtgaccctttagcgtcgtcttggagcgcttgatgatgagagccatctcttcatcatttagccctgccgcctcaacttgtgccaccttgctaggtagcgcctccttgcttcttgttgccttgagagcaaagggttgaggctcattgattggaccattcaatgcgtcgtccacgtatctcgcctcattgatcatcattcgcccgctcacgaacttcccaagaacttcttcgggcgacatcttggtgtacctaggattttcatgaatattgttcaccagatgtggatcaagtacagtaaaggaccttagcattaggcgaacgacgtcgtggtccgtccatcgcgtgcttccatagctccttattttgttgatgtgggtcttgagccggttgtatgtttgggttggctcttcgccccttatcattgcaaatctcccgagctcgccctctaccaactccatcttggtttgcaaggtgacgttgttcccctcatgagagatcttgagggtgtcccagatctgcttggcattgtccaagccgctcaccttatgatagtcgtccctgcacaaagaggctaacaacacagtagtagcttgtgcatttttatgaatctgttcattaataaatataggactatccgagctatcaaatttcattccattctcaacaatctcccatatacttggatggagagagaacatgtgactacgcattttgtgactccaaaatccgtagtcctccccatcaaagtgtggaggtttgccaagagggatggaaagcaaatgtgcatttgagctgtgcggaatacgagagtaatcaaaagaaaagttcgtattaaccatctttcttttgtcgtagtcgttgtcgtcgttgttcttttgggaagaagtggactcatcgctgtcatcatagtagacgatctctttgatgcgtattgtcttcttcttcttcccatctttgcgtttgtggcccgagcccgagtcggtaggcttgtcatcattaggctcgttgacgaaggactccttctccttatcattgatcacaattccctttcccttaggatccat

SEQ ID NO: 4609 - DNA, 1356 bp, Zea mays
  Clone ID: TF_ZmC29741_65
cttcttctcccttgccatgaggcatgtgtgacgctcgttggggaagagggatgacttgttgaaggcggtggcggcgagtccttcattgtcggagtcggaggaggagcaatccgaatcccactcctttccgatatgtgcctcgcccttggccttcctgtaatgcttcttcttctccctcttgctcccctgttcctggtcactttcattgtcgggacagttagcaatgaaatgaccaatcttaccgcatttgaagcacgagcgcttccccttggccttggtcttgcttggctgtcccttgcgtcctttaagcgccgtcttgaagcgcttaatgatgagggccatctcctcattatttagcccggccgcctcaacttgcgccaccttgctcggtagcgcctccttgctcctcgttgccttgagagcaaggggttgcggctcgtggatcggaccgttcaaggcgtcgtccacgtatcttgcctccttgatcatcattcgcccgcttacgaacttccccagtacttcttcgggcgacatcttggtgtacctaggattttcacgaatattgttcaccaaatgaggatcaagaacggtaaaggaccttagcattaggcggacgacgtcgtgatccgtccatcgcgtgcttccgtagctccttattttgttgataagggtcttgagccggttgtatgtttgagttggctcctcgccccttatcattgcgaaccgtccaagctcgccctccaccaactccatcttggtgagcaaggtgacatcattcccctcatgagagatcttgagggtgtcccagatctgcttggcattgtccaagccgctcaccttatggtactcgtccctgcacaaagaggctagcaacacagtagtagcttgtgcatttttatgaatctgttcattaataaacatgggactatccgcactatcaaagtgcattccactttctacaatctcccatatgctaggatggagagagaacaagtgactacgcattttgtgactccaaaatccgtagtcctctccatcaaaatgaggaggtttaccaagtggaatagataataaatgagcatgagtactttgaggaatacgagagtaatcaaaagaaaagttcgaattgaccggtttctttctctcgtattcgttgtggtcgtcgtccttttgggaggaagtagactcatcgctgtcgtagtagacgatctccttgatgcgtcttgtcttcttcttcttcccatctttgcgtctgtggcccgagcccgagtcgttggacttgtcaccccttggctcgttgacgaaggactccttctccttgtcgttgatcacgattcccttccctttaggatccat

SEQ ID NO: 4610 - DNA, 5439 bp, Zea mays
  Clone ID: TF_ZmC4916_370
atggatcctaagggaaaggggatggtggtcgacaacaacgagaaggagtctatcttcaacgagctgaagaatgacaagtctaccgacttggggtcaagccacaagcgcaaagatgggaagaagaagaagacaaggcgcatcaaggagatcgtctactacgacagcgacgaatcctcttcttcccaaaaggacgacgaccacaacgactacgagagaagaaaaccggttaattcgaacttttcttttgactactctcgtattccgcaaagttcaaattcgcatttgctccccattccacttggcaagccccctcactttgatggagaggactacggattttggagccacaaaatgcgtactcacttgttctctctccatcctagcatatgggagattgtagaaagtggaatgcaatttgatagctcggatagccctatgtttatcaatgaacagattcataaaaatgcacaagctactactgtgttgctagcctctttgtgcagggacgagtacaataaagtgagcggcttggacaatgccaagcaaatatgggacaccctaaagatttctcacgaagggaacgacatcaccatgctcactaaaatggagttggtggagggtgagcttggaaggtttgcgatgataaggggcgaggagccaacccaaacatacaaccggctcaagacccttatcaacaaaataaggagctatggaagcacgatatggacggaccatgacgtcgtccgactattactaaggtcctttaccattcttgatcctcatttggtgaataatattcgtgagaatcccaggtacaccaaaatgtcgcccgaagaagtcctaggaaaattcgtcagcgggcgaatgatgatcaaggaagcaaggtacgtggacgacgccttgaatggaccgatcaacgagccgcaaccttttgctctcaaagcaacaagaagcaaggaggcgctacctagcaaggtggcccaaattgaggcggccggacttaatgatgaagagatggctctcatcattaaatgcttcaagacggtactaaagggtcacaaggggcagccaagcaagaccaagacaaaggggaagcgctcatgcttcaagtgcggtaagattggtcattttatcgctaactgccccgataatgatagtgaccaggaacagggaaacaagagggaaaagaagaagaattacaagaaggcaaagggcgaggcgcatctaggcaaggagtgggactcggactgctcctcttccgactccgacaatgaaggactcgccgccaccgccttcaacaaatcaaccctcttcccaaacgagcgtcacacatgccttatggcaagggagaagaaggtatgtactcggaactctacctatgcttcttcaagtgaggacgaatctagtgatgaggatgaagtagattactcgtgtttgtttaagggcctagatagaaccaaagtagacaaaattaatgaattgattgatgccctgaatgagaagaacatacttttagaaaagcaagaggatttgttgtatgaagaacatgataaatttgtagaagctcaaaaatcccttgcattagaaattaaaaggaatgaaatgcttgcttgtgagttgtccacatgccatgattcaatttctaaattaaagagcattaatgatgacttaaatgctaaactagtagaagcacataaatccaactcttgtgttgaacatgttgaaatttgcactaggtgtaaggatgttgatattaatgcttgtagtgaacacttagtttccatttcaaaattgaatgatgaattagctagtcttaatgcccaacttaagactagcaagagtgaatttgaaaaactaaaatttgcaagggatgcctacactattggtagacacccctcaattaaggatgggcttggcttcaagagggaagccaagagcttaacaagccataagactcccatctccaccaaggagaaagggaaggctcctatggctaatagtgttaagaagaatcatgctttcatgtactatgataggagatattctagaaatgcttttagaggtcataatgtttttgattcacatgcttatgactcttatgctatgactgcttctagttctcatgttatgcatggtagaaatgtgcttagaaaaaatgttgttcatcaaatgcctaggagaaatgttgttcataatgctcctaggaaagtagtgaatgaaccttctacaatttattgtgctttaaatgcttcctttgctatttgtagaaaggataagaaaattgttgctaggaagttaggggcaaaatgcaagggagacaaagcttgcatttgggtccctaaggatatttgcactaaccttgtaggacccaacatgagttgggtttatgcatccgggggttcaagctggattatcgacagcggatgcacaaaccatatgacgggggagaagaagatgttcacctcctacgtcaaaaataaggattcccaagattcaattgtattcggtgatgggaatcaaggcaaggtaaaagggttagttgagtctcttggttacaatttgctatctgttagtcaactatgcaatatgggatataattgtctgtttacaaatgtagatgtgtctgtctttagaagaagtgatggttcactagcttttaagggtgtattagacggcaaactttatttagttgattttgcaaaagaggaggccggtctagatgcatgcttaatagctaagactagcatgggttggctgtggcatcgccgcttagcacatgtggggatgaagaaccttcacaagcttctaaagggagaacacgtgataggattaactaatgtgcaattcgaaaaagatagaccttgtgcagcttgtcaggcaggtaaacaagtgggaggagcacatcacagcaagaatgtgatgaccacatcaagacccctggagctgctacatatggacctcttcggacctgtcgcctatctaagcatagggggaagtaagtatggtctggttattgttgatgacttttcccgcttcacttgggtgttctttttgcaggataagtctgaaacccaagggaccctcaagcgcttcctcaagagagctcaaaatgagtttgagctcaaggtgaagaagataaggagcgacaacgggtccgaattcaagaatcttcaagtggaggagtttcttgaggaggaggggatcaagcacgagttctctgctccctacacacctcagcaaaatggtgtggtagagaggaagaacaggacgctcatcgatatggcaaggaccatgcttggagagttcaagacccccgagcgcttttggtcggaagccgtgaacacggcttgccacgccatcaacagggtctaccttcaccgcctcctcaagaagacgtcatacgagcttttaaccggtaacaaacccaatgtatcgtattttcgtgtatttgggagtaaatgctacattctagtgaagaagggtagaaattctaagtttgctcccaaagctgtagaagggtttttattaggttatgattcaaatacaaaggcgtacagggtcttcaacaaatcatcgggtttggttgaagtctctagcgacgttgtatttgatgagactaatggctctccaagagagcaagttgttgattgtgatgacgtagatgaagaagatgttccgacggccgctatacgaaccatggcgattggagaagtgcggccacaggaacaagatgaacgagatcaaccttcttcctcaacaacggtgcatcccccaactcaagacaatgaacaggttcatcaaaaggaggcatgtgttcaagggggagcacaagatgatcacgtgatggaggaagaagcgcaaccggcacctccaacccaagttcgagcggtgattcaaagggatcatcccgtcgaccaaattttgggtgacattagcaagggagtaactactcgatctcgactagttaatttttgtgagcattactcctttgtctcttctattgagcctttcagggtagaggaggccttgctagatccggattgggtattggccatgcaggaggaactcaataacttcaagcgcaatgaagtttggacactagtgcctcgtcccaagcaaaatgttgtgggaaccaagtgggtgttccgcaacaaacaggacgagcacggggtggtgacgaggaacaaggctcgacttgtggcaaaaggttatgcccaagtcacaggtttggactttcaggagacgtttgctcctgtggctaggctagaatcaattcgtatcttgctagcatatgccgctcaccattctttcaggttgtaccaaatggatgtgaagagcgctttcctcaatgggccaatcaaggaggaggtgtacgtggagcaaccccctggcttcgaggatgaacgataccccgaccacgttgggaaagccgatccaactcttttcactaagacttgtgacggtgatctttttgtgtgccaaatttatgtcgatgacataatatttggttctactaaccaaaagtcttgtgaagagtttagcagggttatgacgcagaaattcgagatgtcaatgatgggcgagttgaactacttccttgggttccaagtgaagcaactcaaggacggcaccttcatctcccaaacgaagtacacgcaagatttgctgaagcggtttgggatgaaggacgccaagcctgcaaagacgccaatgggaaccgacggacacaccgacctcaacaaaggtggtaagtccgttgatcaaaaagcataccggtccatgataggctctttgctttatttatgtgctagtagaccagatattatgtttagcgtatgcatgtgtgctagatttcaatccgatcctaaggagtgtcacttagtggccgtgaagcggattcttagatatttagttgctacgccttgcttcgggatctggtatccaaaggggtcgaactttgacttgattggatattcagattccgactatgctggttgtaaggtcgataggaagagcacatcggggacgtgccaattcttaggaaggtccctggtgtcgtggaactctaagaaacaaacttctgttgccctatccaccgctgaggccgaatatgttgccgcaggacagtgttgtgcgcaactactttggatgaggcaaaccctccgggactttggctacaatctgagcaaagtcccactcctatgtgacaatgagagtgctatccgcatggcggaaaatcctgttgaacacagccgcacaaagcacattgacatccggcatcactttttgagagaccaccagcaaaagggagatatcgaagtgtttcatgttagcaccgagaaccagctagccgatatctttaccaagcctttagatgagaagaccttttgcaggctgcgtagtgagctaaatgtcttagattcgcggaacttggattga

SEQ ID NO: 4611 - DNA, 3540 bp, Zea mays
  Clone ID: TF_ZmC4916_384
atggatcctaagggcaaggggattgtgatcaaagcgacaaggagcaaggaggcactacctagcaaggtggcgcaagttgagacagccgggcttaatgaagaagaaatggcccttatcatcaagcggttcaagacggcgctaaagggtcgtaaggagcaccccaacaagaacaagacgaaggggaagcgctcctgcttcaaatgtggtaagattggtcattttatcgctaattgtcccgacaatgatagtgaccaggaaaagaagagtggaaagtgggaaaataagaagaattacaagaaggcgaagggcgaggcacatcttggaaaggagtgggattcagattgctcctcatccgactccgacaacgaaggactcgccgccaccgccttcaacaagtcatccctcttccccaacgagcatcacacttgcctcatggcaagggaaaagaagggcctagatagaaccaaggttgataaaattaatgaattaattgatgccttgaatgataagaataggttattagaaaagcaagaggatcttttgtatgaagaacatgataagtttgtagaggcacaaaaatcccttgctttagaaattaaaaggaatgaaatgctttcttgtgaactatctacttgtcatgaaaccatttctactttaaaaggtgctaatgatgatttaaatgctaaactagaagtagcaattaaatctaactcttgtgtagaacatgttatgatttgcaatagggatgcctacatgattggtagacacccctcaattaaggatggtcttggcttcaagagggaagttaagaacttaacaagccataaggcttccatctccgccaaggagaaagggaaggcccctatgggtagtagtgctcaaaagaaccatgccttcatgtatcatgataggagacattctagaaatggttatagaagttatgatacttttgattctcatgccatgattgcttctagttcttctattatgcatgatagaaatttagctaggagaaatgttgttcatgtgcctaggaaaacaaatagtgaaccttctacaatttatcatgctttaaatgcttcctttgctatttatagaaatgataggaagatagttgctagaaaattaggggcaaaatgcaagggagataaaacttgcatttgggtccctaaggatattgtcactaaccttgtaggacccaacaagagttgggtttatgcatccgggggctcaagctggattatcgacagcggatgcacaaaccacatgacgggggaaaagaggatgttctcttcctacgttaagaacagggattcccaagattcaatcatattcggtgatgggaatcaaggcaaggttaaaggcttaggcaagattgcaatctcaaatgagcactctatttctaatgtattcttagtagagtcacttggatataatttgttatccataagtcaattatgtaatatgggatataattgtctattcacaaatatagatgtgtctgtctttagaagaagtgatggttcattagcttttaagggtgtattagacgacaaactctatttagttgattttgcaaaagaggaggataaatctgaaacccaagggaccctcaagcgcttcctaaggagagctcaaaacgagtttgagctcaaggtgaagaagataaggagcgacaatgggtccgaattcaagaaccttcaagtggaggagtatcttgaggaggaaggaatcaagcacgagttctccgctccctacacaccacagctaaatggtgtggtagagaggaagaacaggacacttatagacatggcgaggacggtgcttggagagttcaagacccccgagcgcttttggtcggaagccgtgaacacggcttgccacgccatcaaccgggtctaccttcatcgcctcctcaagaagacttcgtatgagcttctaactggtaacaaacccaatgtatcttactttcgtgtatttgggagcaagtgttatattctagtgaagaagggtagaaattctaagtttgctcccaaagctgtagaagggtttttgttaggttatgactcaaatacaaaggcgtatagggtcttcaacaaatcatcgggtttggttgaagtctctagcgacgttgtatttgatgagactaatggctctccaagagagcaagttgttgatcttgatgatgtagatgaagaagatgttccaacggccgcaatacgcaccatggcgattggagatcctttcagggtagaagaggccttgctagatccggactgggtgttggccatgcaagaggagctcaacaacttcaagagaaatgaagtttgcacactggtgcctcgtcccaagcaaaatgttgtgggaaccaagtgggtgttccgcaacaaacaagacgagcacggagtggtgacaaggaacaaggcacgacttgtggcaaaaggttatgcccaagtcgcaggtttggactttgaggagacttttgctcctatggctaggctagagtccattcgtattctactagcatatgccgctcaccattctttcaggtcgtttcaaatggatgtgaagagcgctttcctcaacgggccaatcaaagaggaggtgtacgtggagcaaccccctggcttcgaggatgaacggtaccccgaccacgtctgtaagctctctaaggcgctctatggacttaagcaagccccaagagcatggtatgaatgccttagagactttttaattgctaatgctttcaaggttgggaaagccgatccaactctttttaccaagacatgtgatggtgatctttttgtgtgccaaatttatgtcgatgacataatatttggttctactaaccaaaagtcttgtgaagagtttagcagggtgatgactcaaaagtttgatatgtcgatgatgggcgagttaagctattttcttgggttccaagtgaagcaactcaaggacggcaccttcatctcccaaacgaagtacacgcaagacttgatcaagcggtttgggatgaaggacgccaagcccgcaaagactccaatgggaactgacagacacaccgacctcaacaaaggagactccgactatgctggatgtaaggtcgataggaaaagtacatcagggacgtgccaattcttaggaaggtccctggtgtcgtggagttctaagaaacaaacctccgttgccctatccaccgctgaggccgagtacgttgccgcaggacagtgttgcgcacaactactttggatgaggcaaaccctcagggactttggctacaatctgagcaaagtcccactcctatgtgataatgagagtgctatccgcatagcggataatcctgttgaacacagccgcacaaagcacatagacatccggcatcactttttgagagaccaccagcaaaagggggatatcgaagtgtttcatgttagcaccgagaaccagctagccgatatctttaccaagcctctagatgagaagaccttttgcaggctgcgtagtgagctaaatgtcttagattcgcggaacttggactga

SEQ ID NO: 4612 - DNA, 4944 bp, Zea mays
  Clone ID: TF_ZmC4916_395
atggatcctaaggggaagggaatcgtgatcaacgacaaggaaaaggagtccttcgtcaacgagccaaaagatgacaaatccaacgactctggctcgggccacagacgtaaagatgggaagaagaagaagacaagacgtatcaaggagatcgtctactacgacagcgacgagtctacttcttccgacaaggacgacgactacgacaaacaaaagacggtcaattcaaacttttcatttgattattctcgtattccacatagttcgaattcgcatttgctttccattcctcttggcaaacctccacactttgatggggaggactacggattttggagtcacaaaatgcgtagtcatttattctctctccatccaagcatatgggagatcgtagagaatggaatgaaatttgatagctcggatagccctatgtttattaatgaacaaattcataaaaatgcacaagctactactgtgttgctagcctctttgtgcagggacgagtacaataaggtgagcggcttggacaatgccaagcagatatgggacaccctcaagatttctcacgaggggaacgacatcaccatgctcaccaaaatggagttggtggagggcgagcttggaaggtttgcaatgataaggggcgaggagccaacccaaacatacaaccggctcaagacccttatcaacaaaataaggagctacggaagcacgcgatggacggatcacgacgtcgtccgcctaatgctaaggtcatttaccgttcttgatcctcatctcgtgaacaatattcgtgagaatcccaggtacacgaagatgacgcccgaggaggtactcggaaaattcgtaagcgggcggatgatgatcaaggaggcaagatacgtggacgacgccttgaatggaccgatcaacgagcatcaacctcttgctctcaaggcaacaagaagcaaggaggcgctacctagcaaggtggcacaaattgaggcagccggacttaatgatgaagagatggctctcatcatcaaacgcttcaagacggtgctaaaaggtcacaaggggcagccaagcaagaccaagacaaaagggaagcgctcatgcttcaagtgcggtaagattggtcattttatcgctaactgccccgataacgatagtgaccaggaacaggggaacaagagggaaaagaagaagaattacaagaaggccaagggcgaggcacacatcggaaaggagtgggattcggattgctcctccgactccgacaatgaaggactcgccgccaccgccttcaacaagtcatccctcttccccaacgagcgtcacacatgccttatggcaagggagaagaaagtgagtactcgagactccacttatgcttcttctagtgataatgagtctagtgatgatgacatagactattcatgcttattcaagggtttagatagatctaagatagacaaaatcaatgaattgattgatgccttgaatgataagaatgtgcttttagaaaagcaagaagatttgttgtatgaagaacatgacaaatttgtagaagcacaaaaatcacttgcattagagattaagagaaatgaaatactttcgtgtgagttgtctacatgtcatgattcaattgctagtttaaagagcaaaaatgatgatttaaatgctaaactagaaaaatctagtaaatcaacatcttgtgtagaacatgttgagatttgcactaggtgtaaagatttcgatgttgatgcctgtagtgatcatttagtttcaatttccaaactaactgaggaattggctagtcttaatgcccaacttaagactagcaagaatgaatttgataaactaaaatttgcaagggatgcctacacgatcggtagacacccctcaattaaggatggacttggcttcaagagggaagccaagaacttaacaagccataagactcccattcccgctaaggagaaagggaaggcccctatggctactagtgttaaaaagaaccatgcctttatgtatcatgataaaaaaaattctagaaatgcttatgattcttatgctatgactgcttctagttctcatgttgtgcatgatagaaatattggtagaaggaatgttgttcataatatgcctaggagaaatgttcctaggaaagttaatgagccttctacaatatatcatgctttgaatgcctcctttgcaatttatagaaaggatagaaaggtttatgcatccgggggttcaagctggattattgatagcggatgcacaaaccatatgacgggggagaagaaaatgttcacctcctacgtcaagaataaggattcccaagattcaattatattcggtgatgggaatcaaggcaaggtaaaagggttagatgtgtctgtctttagaagaagtgatggttcactagcttttaagggtgtattagacggcaaactttatttagttgattttgcaaaagaagaggataagtctgaaacccaagggaccctcaagcgcttcctcaggagagctcaaaatgagtttgagctcaaggtgaagaacataaggagcgacaatgggtccgagttcaagaatcttcaagtggaggagttccttgaggaggaagggatcaagcacgagttctccgctccttatacaccacagcaaaatggtgtggtagagaggaagaacaggacgctaatcgacatggcgaggactatgcttggagagttcaagacccccgagcggttttggtcggaagcagtgaacacggcttgccacgccatcaacagggtctaccttcaccgcctcctcaagaagacgtcatatgagcttctaaccggtaacaaacccaatgtatcgtactttcgtgtatttgggagcaagtgctacattctagtgaagaagggtagaaattctaaatttgctcccaaagctgtagaagggtttttgttaggttatgactcaaatacaaaggcgtatagagtcttcaacaaatcatcgggtttggttgaagtttctagcgacgttgtatttgatgagactaatggctctccaagagagcaagttgttgattgtgatgatgtagatgaagaagatgttccgacggccgctatacgaaccatggcgattggagaagtgcggccacaggaacaagatgaacgagatcaaccatcttcctcaactatggtgctacccccaactcaagacgatgaacaggttcaccaacaggaggcggatgatcaagggggagcacaagatgatcatgtgatggaggaagatgcgcaaccggcacctccagcccaagttcgagcgatgattcaaagggatcatcccgtcgaccaaattctgggtgatattagcaagggagtaactactcgatctcgattagttaatttttgtgagcattactcctttgtctcttctattgagcctttcagggtagaggaggccttgctagatccggactgggtgttggccatgcaggaggagctcaacaacttcaagagaaatgaagtttggacgctggtgcctcgtccgaagcaaaatgttgtgggaaccaagtgggtgttccgcaacaaacaggacgagcatggggtggtgacgagaaacaaggctcgacttgtggcaaaaggttatgcccaagtcgcaggtttggatttcgaggagacttttgctcctgtggctaggctagagtcaattcgaatcttgctagcatatgccgctcaccattctttcaggttgtaccaaatggatgtgaagagcgctttcctcaacgggccaatcaaggaggaggtgtacgtggagcaaccccctggcttcgaggatgaacggtaccccaaccacgtgtgtaagctctctaaggcgctctatggacttaagcaagccccaagagcatggtatgaatgccttagagatttcttaattgctaatgctttcaaggttgggaaagccgatccaactctttttactaagacttgtaatggtgatttgtttgtgtgccaaatttatgtcgatgacataatatttggttctactaaccaaaagtcttgtgaagagtttagcagggtgatgacgcagaaattcgagatgtcgatgatgggcgagttgaactacttccttgggttccaagtgaagcaactcaaggacggcactttcatctcccaaacgaagtacacgcaagacttgctaaagaggtttgggatgaaggacgccaagcccgcaaagacgccgatgggaaccgacggacacacagacctcaacaaaggaggtaagtctgtcgatcaaaaagcataccggtcaatgatagggtctttactttatttatgcgctagtagaccggatattatgcttagcgtatgcatgtgtgctagatttcaatccgatcctaaggagtgtcacttagtggcggtaaagcgaattcttagatatttggttgctacgccttgcttcgggctctggtatccaaaggggtctacctttgacttggttggatactcagactccgactatgctggatgtaaggtcgataggaagagtacatcggggacgtgccaattcttaggaaggtccctggtgtcttggaattctaagaaacaaacctccgttgccctatccaccgctgaggccgagtatgttgccgcaggacagtgttgcgcgcaactactttggatgaggcaaaccctctgggactttggctacaatctgagcaaagtcccactcctatgtgataatgagagtgctatccgcatggcggaaaatcctgttgaacacagccgcacaaagcacatagacatccggcatcactttctgagagaccaccagcaaaagggagatatcgaagtgtttcatgttagcaccgagaaccagctagccgatatctttaccaagcctctagatgagaagaccttttgcaggctgcgtagtgagctaaatgtcttagattcgcggaacttggattga

SEQ ID NO: 4613 - DNA, 5127 bp, Zea mays
  Clone ID: TF_ZmC4916_397
atggatcctaagggaaaggggatggtggtcaatgataaggagaaggagaccatcttcaacgagccgagggacaacaaagctactgactccggctcgagtcaaaagaagaaggaaggaaagaagaagaggtgcatcaagaagatcgtctactacgacgacaacgacgagtcctcttcttcccaaaagtacaacgacgacaacgactacgagaaaaagaagacgattaactctaatttttctttcgattactctcgtattcctaaaagtaccaatggtcatttactctccattccacttggtaaacctcctcactttgatggagaggactacggattttggagtcacaaaatgcgtagtcacttgttctctctccatccaagcatatgggagatagtagaaagtggaatgcaattttatagtactgatagtcccatatttatcaatgagcaaattcacaaaaatgcacaagctactactgttcttctagcatcattgtgcagggatgaataccataaggtgagcggcttggataacaccaagcagatctgggacaccctcaagatctcgcatgaggggaacgacgtcaccatgctcaccaagatggagttggtggaaggcgaactaggaaggttcacgatgatcaggggagaggagccaacccaaacgtacaacaggatcaagaccctcgtcaacaaaataaggagctatggaagcatgcgatggacggaccacgacgtcgtccgcctaatgctaaggtccttcactgtccttgatccacatcttgtaaacaatattcgtgagaatcctaggtacaccaagattacgcccgaggaaatacttgggaagtttgtaagcgagcggatgatgatcaaggaggcaagatacgttgatgatgcgttgaatggcccaatccacgagcctcaaaccgttgctctcaaagcaactaggagcaaggaagtgctacctagcaaggtggcacaagttgaggcggcggggctcaatgaggaagagatggccctcatcttcaagcgtttcaaaacggcgctaaggggtcgcaaggagcatcccaacaagaacaagacgaaggggaagcgctcatgcttcaaatgtggtaagattggtcattttatcgctaattgtcccgataatgatagtgaccaggaacaagagaagaagagggaaaagaagaaggcctacaagaaggctaagggcgaggcacaccttggcaaggagtgggactcagattgttcgtcatccgactccgacaacgaaggacttgccgcctcagccttcaacaaatcgtccctcttccccaacgagcatcacacttgcctcatggcaaaggagaagaaggtaaacactcgaaagactacttatgcttcttctagtgatgatgaatctagcgatgatgaaatagattatgctagtttgttcaagggcttagaaagaactaagattgataagattaatgaattaatcgatgccttgaatgacaagaatagattgttagaaaagcaagaggatcttctgtatgaagaacatgataaagttgtagaggcacaaaaatctcttgctttagaagtcaaaaggaatgaaatgctttcttgtgaactatctacttgccatgagaccatttcaagtttaaaaagtgttaatgatgatttaaatgctaaaatagaagtagcaaatagatctaactcttgtgtagaacatgttgtaatttgcaataggtgtaaagattttgatgttgatgcttgtagtgaacacctagtttctattgcaaagttaaatgatgaagtggctagtcttaatgcccaacttaagactagcaaaaatgaatttgacaaactaaaatttgcaagggatgcctacactattggtagacacccctcaattaaggatgggcttggctttaagagagaagccaagaacttaacaagtcataaggctcccatctccgcaaaggagaaagggaaggcccctatggctaatagtgctcaaaagaaccatgctttcatgtaccatgataggagatattctaggaatgttcattatgatagaagttacaatgatgttgtttcacatgccatgattgcttcaagttcttctattatgcatgatagaagtttggctaggaaaaatgtcatttatcatgtgcctaggagaaatgttcatgtacctaggaaaattaatgaaccttctacaatttatcatgcttgcaatgcttcctttgcaatttgtagaaaggataagaaggtttatgcatccgggggatcaagctggattatcgacatcggatgcacaaaccacatgacgggggagaagaagatgttcacctcctacgtcaagaacaaagattcccaagactcaatcatattcggtgacgggaatcaaggcaaggttaaagggttaggaaagattgctatttcatccgagcactccatttctaatgtgtttttagttgagtcgcttgggtataatttgttgtccgttagtcaattatgcaatatgggatataattgcttattcacaaatgtagatgtgtctgtctttagaaggagtgatggttcattagcttttaagggtgtattagatgacaaactctacttagttgattttgcaaaagaggaggccggtctagatgcatgcctaattgctaagactagcatgggctggctatggcatcgccgtttagcacatgtggggatgaagaacctccacaaacttctaaagggagaacatgtgataggtctaacaaacgataaatctgaaacccaagggaccctcaagcgcttcctaaggagagctcaaaatgagtttgagctcaagcaaaatggtgtagtagagaggaagaacaggacactcattgacatggcgaggacgatgcttggagagttcaagacccccgagcggttttggtcggaagccgtgaacacggcttgccacgccataaaccgggtctaccttcatcgcctcctcaagaagacttcgtatgagcttctaaccggtaacaaacccaatgtttcatactttcgtgtatttgggagtaaatgctacattctagtgaagaaaggtaggaattctaaattttctcccaaagctatagaagggtttttgttaggttatgactcaaatacaaaggcgtatagagtcttcaacaaatcatcgggtttggttgaggtctctagcgacgttgtatttgatgagactaatggctctccaagagagcaagttgttgatcttgatgatgtagatgaagaagacgttccaacggccgcaatacgcaccatggcgattggagatgtgcgaccacaggaacaaacggagcaagatcaaccttcttcctcaacaatggtgcaacccccaactcaagatgacgaacaggttcatcaagaagaggcatgtgatcaagggggagcgcaagatgatcatgtcatagaagaagaagcacctcaagcccctccaacccaagttcgagcgacgattcaacggaattatcccgtcgaccaaatattgggtgatataagcaagggagtaactactcgctcgagaatagttaatttttgtgagcattactcttttgtctcttctattgagcctttcagggtagaagaagccttgctagttccggactgggtgttggccatgcaggaggagctcaataatttcaagagaaatgaagtttggacactggtgccacgtcccaagcaaaacgttgtgggaaccaagtgggtgtttcacaacaaacaggacaagcacagagtggtgacaaggaataaggctagacttgtggcaaaaggttatgcccaagtcgcaggtttggactttgaggagacttttgctcctgtggctaggctagagtcaattcgcatattgttagcctatgccgctcaccattctttcaggctgttccaaatggacgtgaagagcgctttcctcaacgggccaatcaaggaggaggtgtacgtggagcaaccccctggctttgaggatgaacggtaccccgaccacgtgtgcaagctctctaaggcgctctatggacttaagcaagccccaagagcatggtatgaatgccttagagactttctaattgctaattctttcaaggttgggaaagccgatccaaccttattcactaagacttgtgacggtgacttattcgtgtgccaaatttatgtcgatgacataatatttggctctactaaccaaaagtattgtgaagagtttagtagggtgatgactcaaaaatttgaaatgtcgatgatggacgagttggactacttcctagggttccaagtgaagcaactcaaggacgacaccttcatctcccaaacgaagtacacacaagacttgctaaagcggtttgggatgaaggacgccaagcccgcaaagactccaatgggaactgacggacacgtcgacctcaacaaaggaggtaagtctgttgatcaaaaagcataccggtctatgataggttccttgctttacttatgtgctagtagaccggatattatgcttagtgtatgcatgtgtgctagatttcaatccgatccaagggagtgtcacttagtggccgtgaatcgaattcttagatatttagtcgctacgccttgcttcgggatctggtatccaaaggtgtctacctttgacttaattggatattcagactccgattacgctggatgcaaggtcgataggaagagtacatcagggacgtgccaattcttaggaaggtctctggtgtcttggagttctaagaaacaaactttcgttgccctatccaccgctgagaccgagtatgttgccgccggacagtgttgcgcgcaactactttggatgaggcaaaccctccgggactttggctacaatctgagcaaagtcccactcctatgtgataatgagagtgccatccgcatggcggataatcctgttgaacacagccgcacaaagcacatagacatccgacatcactttttgagagaccaccagcaaaagggagatatcgaagtgttttatgttagcaccgagaaccagctagacgatatctttaccaagcctctagatgagaagaccttttgcaggctgcgtagtgagctaaatgtcttagattcgcggaacttggattga

SEQ ID NO: 4614 - DNA, 4974 bp, Zea mays
  Clone ID: TF_ZmC4916_405
atggatcctaaaggcaaggggatggtgatcaacgacaaggaaaaggagtccttcgtcaatgagcccaatgatgacaagcccaccgactcaggctcgggccgcaaaagaaaagacgggagaaagaagaaggcaaggcgcatcaaggaaattgtctactacgacagcgacgaatcttcctcctcccaaaaggacgacgacgactacgatagacgaaagacggttaactcaaacttttctttcgattattcgcgcatcccgcatagttcaaatgctcaattacttcccattcgacttggcaagccccctcactttgatggagaggattacggattttggagccacaaaatgcgtactcacctgttttctctccatccaagcatttgggagattgtggaaagtggaatgaaatttgatagctcggatagccctatgtttattaatgaacagattcataaaaatgcacaagctactactgtattgctagcctctttgtgcagggacgagtatcacaaggtgagcggcttggacaatgccaagcagatctgggacaccctcaagatctctcatgagggaaacgatgtcaccttgctcaccaaaatggagttggtggaaggcgaacttggacggttcgcaatgataaggggcgaggagccaactcaaacatacaaccggctcaagacccttatcaacaaaataaggagctacggaagcacgcgatggacggatcacgacgtcgtccgcctaatgctaaggtcctttactgttcttgatcctcatttggtgaacaatattcgtgaaaatcctaggtacaccaagatgtcgcccgaagaagtacttgggaaattcgttagcgggcgaatgatgatcaaggaggcaagatacgtggacgacgccttgaatggttcgatcaacgagccgcaaccccttgctctcaaggcaacgaggagcaaggaggcgctaccgagcaaggtggcgcaagttgaggcggccgggctaaataatgaggagatggccctcatcattaagcgcttcaagacggcgcttaaaggacgcaagggacagccaagcaagaccaaagccaaggggaagcgctcgtgcttcaaatgcggtaagattggtcattttattgctaactgtcccgacaatgatagtgaccaggaacacgggagcaagagagaaaagaagaagcattacaagaaggccaagggcgaggcacatatcggaaaggagtgggattcggattgctcctcctccgactccgacaatgaaggactcgccgccactgccttcaacaagtcatccctcttccccaacgagtgtcacacatgccttatggcaagggagaagaaggtaagtaatcaaaacaatgtcacttatgattcttctagtgatgatgagtctagtgatgaagaaatagattactctagtttgttcaagggaatggatagaactaaagtagataagattaatgaattgattgatgccttgaatgaaaaggatagactcttagaaaaacaagaggatcttctatatgaagagcatgacaaatttgtagaggctcaaaaatcttatgctttagaagttaaaagaaatgaagtgctttctagtgaattatcttcttgtcatgaaaccattgctactttaaaaggtgttaataatgatttaaatgctaaactagaagtggctagtaaatctaactcttgtgtagaacatgttatggtttgcactaggtgtaaagattttaatgttgatgcttgtagtgaacacctagtttcaatttctaaattgaatgatgaagtggctagtcttaatgcccaacttaagactagcaaaagcgaatttgataaattaaaatttgcaagggatgcctatacgattggtagacatccctcaattaaggatggacttggctacaaaagggaagccaagaacttgacaagccataaggctcccatctccgccaaggagaaagggaaggcctctatggctagtagtgtgcaaaagaaccatgcctttatgtactatgatagaagacaacctagaaatgcttataggagttgtaatgcatataatgcctttgattctcatgccatgtttgcttctagctcttcttatgtgcatgatagaaatgttggtaggagaaatgttgttcataatatgcctaggagaaatgttgttaatgttcctaggaaagtaaatgaaccttctacaatatatcatgctttgaatgcttcctttgcaatttgtagaaaggatagaaaggtgattgctaggaaattaggggcaaaatgcaagggtgataaaacttgcatttgggtccctaagacaattgtgactaaccttgtaggacccaacaagagttgggtttatgcatccgggggttcaagctggattatcgacagcggatgcacaaaccatatgacgggggagaagaagatgttcacctcctacgtcaagaataaggattcccaagattcaattatattcggtgatgggaatcaaggcaaggtaaaagggctagatgtgtctgtctttagaagaagtgatgattcactagcttttaagggtgtattagacgacaagctctacttagttgattttgcaaaagaagaggccggtctagatgcatgcttaattgctaagactagcatgggctggctgtggcatcgccgcttagcacatgtggggatgaagaaccttcacaagcttctaaagggagaacacgtgataggtttgactaacgtacaattcgaaaagatagaccttgtgcagcttgtcaagcaggataagtctgaaacccaagggaccctcaagcgcttcctaaggagagctcaaaatgagtttgagctcaaggtgaagaagataaggagcgacaacgggtccgagttcaagaatcttcaagtggaggagttccttgaggaggaagggatcaagcacgagttctccgctccctacacaccacagcaaaatggtgtggtagagaggaagaacaggacgctaatcgatatggcgagaacgatgcttggagaattcaagacccccgaggtctaccttcatcgcctcctcaagaagacttcgtatgagcttctaaccggtaacaaacccaatgtatcttactttcgtgtatttgggagcaagtgctacattctagtaaagaagggtagaaattctaagtttgctcccaaagctgtagaagggtttttgttaggttatgactcaaatataaaggcgtatagagtcttcaacaaatcatcgggtttggttgaagtctctagcaacgttgtatttgatgagactaatggctctccaagagagcaagttgttgattgtgatgatgtagatgaagaagatgttccgacggccgctatacgaaccatggcgattggagtagtgcgaccacaggaacaagatgaacgagatcaaccttcttcctcaacaacggtgcatcccccaactcaagacgatgaacaggttcatcaaaaggaggcgtgtgatcaagggggagcacaagatgatcaagtaatggaggaagaagcgcaaccggcacctccaacccaagttcgaacggaggaactcaacaacttcaagcgcaatgaagtttggacactggtgcctcgtcccaagcaaaatgttgtgggaaccaagtgggtgtttcgcaacaaacaggatgagcacggggtggtgacgaggaacaaggctcgacttgtggcaaaaggttatgcccaagtcgcaggtttggactttgaggagacgttgtaccaaatggatgtgaagagcgctttcctcaacgggccaatcaaggaggaggtgtacgtagagcaaccccctggcttcgaggatgaacggtaccccgaccacgtgtgtaagctctctaaggcgctctatggacttaagcaagccccaagagcatggtatgaatgccttagagactttctaattgttaatgctttcaaggttgggaaagccgatccaactctttttactaagacatgtgatggtgatttgtttgtgtgccaaatttatgtcgatgacataatatttggttctactaaccaaaagtcttgtgaagagtttagcagggtgatgacgcagaaattcgagatgtcgatgatgggcgagttgaactacttccttgggttccaagtgaagcaactcaaggacggcatcttcatctcccaaacgaagtacacgcaagatctgctaaagcggtttgggatgaaggacgccaagcccgcaaagactccgatggggaccgacggacacaccgacctcaacaaaggaggtaagtccgttgatcaaaaggtataccggtcaatgatagggtccttactttatttatgtgctagtagaccggatattatgcttagcgtatgcatgtgtgctagatttcaatccgatcctaaggagtgtcacttagtggcggtgaagcgaattcttagatatttggttgctacgccctgcttcgggctctggtatccaaaggggtctacctttgacttggttggatactcagattccgactatgctggatgtaaggtcgataggaagagtacatcggggacgtgccaattcttaggaaggtccctggtgtcgtggaactctaagaaacaaacctccgttgccctatccaccgctgaggccgagtatgttgccgcaggacagtgttgcgcgcaactactttggatgaggcaaaccctcagggactttggctacaatctgagcaaagtcccactcctatgtgacaatgagagtgctatccgcatggcggaaaatcctgttgaacacagccgcacaaagcacattgacatccggcatcactttttgagagatcaccagcaaaagggagatatcaaagtgtttcatgttagcaccgagaaccagctagccgatatctttaccaagcctctagatgaaaagaccttttgcaggctgcgtagtgagctcaatatcctagattcgcggaacttggattga

SEQ ID NO: 4615 - DNA, 5022 bp, Zea mays
  Clone ID: TF_ZmC4916_407
atggatcctaaggaaaaggggatggtggtcaacgacaatgagaaggagtccatcttcaacgagccgaaggacgacaaggccaatgactccggctcgagtcaaaagaagaaggatggaaagaagaagaggtgcatcaagaagattgtctactacgacagcgacgaatcttcctcttctcaaaaggacgacgaatacgaggagaaaaataaaacggttaactcgaacttttctttcgattattctcgtattccgcataattccaatgctcatatgctttccattccacttggtaaacctccacactttgatggagaggactacggattttggagtcacaaaatgcgtagccacttgttctctcttcatccaagtatgtgggagatagtagaaaatggaatgcaatttgatagttcggataactccatgtttatcaatgaacaaatccataaaaatgcacaagctactactgttcttttagcatccttgtgcagggaagagtacaataaggtgagcggcttggataacgccaagcagatctgggacaccctcaagatctcgcatgaggggaacaacgccaccatgctcaccaagatggaattggtggaaggcgaactaggaaggttcgcaatgatcaggggagaggagccaactcaaacgtacaataggctcaagaccctggtcaacaagataaggagctatgggagcacgagatggacggaccacgacgtcatccgacttatgctaaggtccttcactgtccttgatcctcatcttgtaaactctattcgtgagaatcctaggtacatcaagatgacgcccgaagaaatactcggaaagtttgtaagcgggcgaatgatgatcaaggaggcaagatatgttgatgaggcgttgaatggcccaatgcccatctacgagcctcaaaaggttgctctcaaagcaacaagtagcagggagacgctacctagcaaggtggcgcaagttgaggtggccgggctaaatgaggatgaaatggccctcatcatcaagcgcttcaagacggcgctcaaaggtcgcaaggagcatcccaacaagagcaagacgaagggaaagcgctcctgcttcaagtgtggtaagattggtcactttattgctaactgtcccgacaatgatagtgaccaggaacaaggaaagaatgggaagagagagaacaagaaggtttacaagaaggctaagggcgaggcacaccttggcaaagagtgggactcgccgcctcggccttcaacaaatcgtctctcttcccaaacgagcatcacacctgcctcatggcaaaggagaaaaaggtgtaagaattttaatgttgatgcttgtagtgaacacttaatttccatttcaaaattaaatgatgaagtggctagtctaaatgcccaacttaagactagcaaggatgactttgataaactgaaatttgcaagggatgcctacactattggtagacacccctcaattaaagatgggcttggctttaagagggaagccaagaacttaacaagtcaaggggctcccattttcaacaaggaaaaagggaaggctcctatgactagtaatagtcaaaataattatgcatttatttataatagaaaattttctagaaatgcttatcataataggagttgtaatgcctatgattcaaatgccatgattgcttcgagttcttcctttgtgcatggtagagatatgcctaagaaaaatgttattcatcatatgcctaggagaaatgttgttcatgtacctaggatagcaagtaattgtaatacccaaattgtcagggccgtcaacaaccttccgttcgaggcgcggctcatgcggtcctgctcgaatcctcctccgcgaagtgcgccgatgaccgaaaccaaccaggggattaaaaccccaatcgaccccgccgcaaccctggaacccccttcatcgaagcctgggcgagtttctgggtgcccaattgggatttctggcacttcgcgggagataaggtgtatggggtctgatcaactccgtggcaaatgggtaacacgacttgtgggtaaagatgcgcaacctctgcagagtgtaaaactggtttatgcatccgggggctcaagctggattatcgacagcggatgcacaaaccacatgacaggggagaagaagatgttcacctcctacgtcaagaacaaagattcccaagattcaatcatattcggtgacgggaatcaaggcaaggttaaaggactaggaaaaatagctatttcatccgagcattccatctctaatgtgtttttagttgaatcgctcgggtataacttgttgtccgttagtcaattatgtaatatgggttacaattgcttatttacaaatgtagatgtgtctgtctttagaaggagtgatggttcattagcttttaagggtgtactagacaacaaactttatttagttgattttgcaaaggaagaggccggtctagatgcatgcttaattgctaagactagcatgggctggctgtggcatcgtcgtctagcacatgtggggatgaagaaccttcacaaacttctaaagggagaacatgtattgggtctaacaaatgtaactttcgaaaaagatagaccttgtgcagcttgtcaagcaggtaaacaagtgggaagcgctcatcacaacaagaatgtgatgaccacatcaagacctctggagctacttcatatggatctcttcggacctgtcgcctacctcagcatagggggaagtaagtatggtcttgttatagttgatgatttttcccgcttcacttgggtattctttttgcaggataaatctgaaatccaagggaccctcaagcgcttcctaaggagagctcaaaatggatttgagctcaaggtgaagaagataaggagcgacagcggagaggaagaacaggacgctcatcgacatggcgaggacgatgcttggagaattcaagacgcccgagcggttttggtcgaaagctgtgaacacgcttgccacgccataaaccgggtctaccttcatcgcctcctcaagaagacgtcatacgaactcctaaccggtaacaaacccaacgtttcatattttcgtgtatttgggagtaaatgctacattctagtgaagaaaggtaggaattccaaatttgctcccaaagttgtagaagggtttttgttaggttatgactcaaatacaaaggcgtatagagtcttcaacaaatcatcgggtttggttgaagtctctagcgacgttgtatttgatgagactaatggctctccaagagagcaagttgatcttgatgatgtagatgaagaagatgttccaacgaccgcaatacgcaccatggcgattggagatgtgcgaccacaggaacaaaaggagcaagatcaaccttcttcctcaacaatggtgcatcccccaacccaagacgatgaacaggttcatcaagaagaggcgtgtgatcaagggggagcacaagatgatcatgttatggaggaagaagcaccacaggcccctccaactcaagtccgagcgacgattcaaaggaatcatcccgccaaccaaattttgggtgatataagcaagggagtaactactcgctctagattagctaatttttgtgagcattactcttttgtctcttctattgagcctttcaaggtagaagaggccttgctagatccggactgggtgttggccatgcaggaagaacttaataacttcaagcgaaatgaagtttggacactggtgccacatcccaagcaaaacgttgtgggaaccaagtgggtgttccgcaacaaacaggatgagcacggggtggtgacaaggaacaaggctagacttgtggcaaaaggttatgcccaagtcgcaggtttggactttgaggagacttttgctcctgtggctaggctagagtctattcgtattttgttagcctatgccgctcaccattctttcaggttgtttcaaatggatgtgaagagcgctttcctcaacgggccaatcaaggaggaggtgtacgtagagcaaccccctggctttgcggatgaacggtaccccgaccacgtgtgtaagctctctaaggcgctctatggacttaatcaagccccaagagcatggtatgaatgccttagagactttctaattgctaatgctttcaaggttgggaaagccgatccaactttattcactaagacttgtgatggtgacttatttgtgtgccaaatttatgtcgatgacataatatttggttctactaaccaaaagtcttgtgaagagtttagcagggtgatgactcaaaaatttgagatgtcgatgatgggcgagttgaactacttccttgggttccaagtgaagcaactcaaggacggcacattcatctctcaaacgaagtacacacaagacttgataaagcgatttgggatgaaggacgccaagcccgcaaagactccaatgggaaccgacagacatgtcgacctcaataaaggagttgctacgccttgcttcgggatctggtatccaaaggggtcaacctttgacttaattggatactcagactccgattatgctggatgcaaggttgataggaagagtacatcagggacgtgccaattcttaggaaggtccctggtgtcttggagttctaagaaacaaacttccgttgccctatccaccgctgaggccgagtatgttgccgcaggacagtgttgcgcgcaactactttggatgaggcaaaccctcagggactttggctacaatctgagcaaagtcccactcctatgtgataatgagagtgctatccgcatgacggataatcctgttgaacacagccgcacaaagcacatagacattcggcatcactttttgagagaccatcagcaaaagggagatatcgaagtgttttatgttagcaccgaaaaccagctagccgatatctttaccaagcctctagatgagtcaaccttttgcaggctgcgtagtgagctaaatgtcttagattcgcgtaacttggattga

SEQ ID NO: 4616 - DNA, 4983 bp, Zea mays
  Clone ID: TF_ZmC4916_410
atggatcctaaagggaagggaatcgtgatcaacgacaaggagaaggagtccttcgtcaacgagccaagggatgacaagtccaacgactcgggctcgggccacagacgaaaagatgggaagaagaagaagacaagacgcatcaaggagatcgtctactatgacagcgatgagtctacttcctcccaaaaggacgacgaccacaacgaatacgagagaaagaaaccggtcaattcaaacttttcttttgattactctcgtattcctcaaagtactaatgctcatttattatctattccacttggtaaacctcctcattttgatggagaggactacggattttggagtcacaaaatgcgtagtcacttgttctctctccatcctagcatatgggagattgtagaaagtggaatgcactttgatagtacggatagtcccatgtttattaatgaacagattcataaaaatgcacaagctactactgtgttgctagcctctttgtgcagggacgagtatcataaggtgagcggcttggacaatgccaagcagatctgggacaccctcaagatctctcatgaggggaatgatgtcaccttgctcaccaagatggagttggtggagggcgagcttggacggttcgcaatgataaggggcgaggagccaactcaaacatacaaccggctcaagacccttatcaacaaaataaggagctacggaagcacgcgatggacggatcacgacgtcgtccgcctaatgctaaggtcctttaccgttcttgatcctcatttggtgaataatattcgtgaaaatcctaggtacaccaagatgtcgcccgaagaagttctggggaagttcgtaagcgggcgaatgatgatcaaggaggcaagatatgtggacgacgcgttgaacggtcctattcatgagcctcaacccattgctctcaaggcaacgaggagcaaggaggcgctaccgagcaaggtggcgcaagttgaggcggccgggctaaataatgaggagatggccctcatcattaagcgcttcaagacggcgcttaaaggtcgcaagggacagccaagcaagaccaagacaaaggagaagcgctcgtgcttcaaatgtggtaagattggtcatttcattgctaactgccccgataatgaaagtgaccaggaaaaggggaacaaaagggagaagaagaagcattacaagaaggccaagggcgaggcacatatcggaaaggagtgggattcggattgctcctcctccgactccgacaatgaaggactcgccgccaccgccttcaacaagtcatccctcttccccaacgagcgtcacacttgcctcatggcaagggagaagaaagtaagcactcatgatactagtacttatgcttcttcaagtgaggatgagtctagtgatgatgatgagatagattactcatgcttattcaagggattagatagatctaaaattaataagattaatgagttgattgatgctttgaatgacaagaatagattactagaaaaacaagaggatcttttatatgaggagcatgataaatttgttagtgcacaaaattctcttgctctagaaattaaaagaaatgaaatgctctctagtgaattatctacttgtcatgaatccatctctaaattaaaaagtgttaatgatgatttgaatgctaagttagaaatagctagtaaatcaacatcttgtgtagaaattgttgaaacttgcaataggtgtaaagattttgacattgatgcttgtagtgaacacctagtttcaatttccaaacttaatgatgaattggctagtcttaatgctcaacttaagactagcaagagtaattttgataagctaaaatttgcaagggatgcctacacaattggtagacacccctcaattaaggatggacttggctacaagaaggaagccaagaacttgacaagccataaggctcccatctccgccaaggagaaagggaaggcccctatggctagtagtgtgcaaaagaaccatgcctttatgtaccatgataggagacaatctagaaatgcttataggagatgtaacgcatatgatgcttttgattctcatgacatgtttgcttctagttcttcttatgtgcatgatagaaatgttgaaaggtttatgcatccggggggttcaagctggattatcgacagcggatgcacaaaccatatgacgggggagaagaagatgttcacctcctacgtcaagaataaggattcccaagattcaattatattcggtgatgggaatcaaggcaaggtaaaagggttaggtaaaattgcaatctctaatgagcactctatctccaatgtgtttttagttgagtctcttggttacaatttgctatctgttagtcaactatgcaatatgggatataattgtctttttacaaatgtagatgtgtctgtctttagaagaagtgatggttctctagcctttaagggtgtattagacgacaagctttacttagttgattttgcaaaagaagaggccggtctagatgcatgcttaattgctaagactagcatgggctggctgtggcatcgctgcttagcacatgtggggatgaagaaccttcacaagcttctaaagggagaacacgtgataggtttgactaacgtacaattcgaaaaagatagaccttgtgcagcttgtcaggcaggtaaacaggtgggaggagcgcatcacagcaagaatgtgatgaccacatcaagacccctggagctgctacatatggacctcttcggacccgtcgcatatctaagcataggaggaagtaagtatggtttagttattgttgatgacttttcccgcttcacttgggtgttctttttgcaggataagtctgaaacccaagggaccctcaagcgcttcctcaggagagctcaaaatgagtttgagctcaaggtgaagaagataaggagcgacaacgggtccgagttcaagaaccttcaagtggaggagttccttgaggaggaagggatcaagcacgagttctccgctccctacacaccacagcaaaatggtgtggtagagaggaagaacaggacgctaatcgatatggcgaggacgatgcttggagaattcaagacccccgtgcgtttttggtcggaagccgtgaacacggcttgccacgccgtcaacagggtctaccttcatcgcctcctcaagaagacttcgtatgaactactaaccggtaacaaacccaatgtatcttactttcgtgtatttgggagcaggtgctacattctagtgaagaagggtagaacttctaaatttgctcccaaagctgtagaagggtttttgttaggttatgactcaaatacaaaggcgtatagagtcttcaacaaatcatcgggtttggttgaagtctctagcgacgttgtatttgatgagactaatggctctccaagagagcaagttgttgattgtgatgatgtagatgaagaagatgttccgacgaccgctatacgaaccatggtgattggagaagtgcggccacaggaacaagatgaacgagatcaaccttcttcctcaacaacggtgcatcccccaactcaagacgatgaacaggacgagcacggggtggtgacggggaacaaggctcgacttgtggcaaaaggttatgcccaagtcacaggtttggacttcgaggagacgtttgctcctgtggctaggctagaatcaattcgtatcttgctagcatatgccgctcaccattctttcaggttgttccaaatggatgtgaagagcgctttcctcaacgggccaatcaaggaggaggtgtacgtggagcaaccccctggcttcgaggatgaacggtaccccgaccacgtgtgtaagctctctaaggcgctctatggacttaagcaagccccaagagcatggtatgaatgccttagagactttttaattgctaatgatttcaaggttgggaaagtcgatccaactctttttacaaagacatgtgatggtgatttgtttgtgtgccaaatttatgtcgatgacataatatttggttctactaaccaaaagtcttgtgaagagtttagcagggtaatgacgcagaaattcgagatgtcgatgatgggcgagttgaactacttccttgggttccaagtgaagcaactcaaagacggcaccttcatctcccaaacgaagtacacgcaagatctgctaaagcggtttgggatgaaggacgccaagcccgcaaagactccgatgggaaccgacggacacaccgatctcaacaaaggaggtaagtccgttgatcaaaaagcataccggtcaatgatagggtctttactttatttatgtgctagtagaccggatattatgcttagcgtatgcatgtgtgctagatttcaatccgatcctaaggagtgtcacttagtggcggtgaagcgaattcttagatatttggttgctacgccttgcttcgagctctggtatccaaaggggtctacctttgacttggttggatactcagactccgactatgctggatgtaaggtcgataggaagagtacatcggggacgtgccaattcttaggaaggtccctggtgtcgtggaactctaagaaacaaacttccgttgccctatccaccgctgaggccgagtatgttgccgcaggacagtgttgcgcgcaactactttggatgaggcaaaccctccgggactttggctacaatctgagcaaagtcccactcctatgtgacaatgagagtgctatccgcatggcggaaaatcctgttgaacacagccgcacaaagcacattgacatccggcatcactttctgcgagaccaccagcaaaagggagatatcaaagtgtttcatgttagcaccgagaaccagctagccgatatttttaccaagcctctagatgagaagaccttttgcaggctgcgtagtgagctaaatgtcttagattcgcggaacttggattga

SEQ ID NO: 4617 - DNA, 4548 bp, Zea mays
  Clone ID: TF_ZmC4916_413
atggatcctaagggcaaggggatggtgatcaacgataaggagaaggagtccttcgtcaatgagccgaaagacaacaagcctactgactcgggctcaagtcataagaagaaggacgggaagaagaagaggcacatcaagaagatcgtctactacgacgacagcgacgagtcctcctcttcccaaaaggacgactacgagaaaaagaaaacggtcaattcaaacttttcttttgattattctcgtattccgcaaagttcaaatgctcattttctttccattccccttggtaaacctcctcactttgatggagaggactacggattttggagtcacaaaatgcgtagccacttgttctctctccatccaagtatatgggagatagttgagaatggaatgcaatttgatacctcattgtgcagggatgaatatcataaagtgagcggcttggataacgccaagcaaatttgggacaccctcaagatctcacatgaggggaacgatgtcaccatgctcaccaagatggagttggtggagggcgaacttgggagatttgcaatgatcaggggagaggagccaacccaaacgtacaaccggctaaagaccctgatcaacaaaataagaagctatggaagcacgcgatggacggatcacgacgtcgtccgcctaatgctaaggtccttcactatccttgatccacatcttgtaaacaatattcgtgaaaatcctaggtacaccaagatgtcgcccgaagaaatacttggaaagttcgtaagcgggcggatgatgatcaaggaggcaagatacgtcgatgatgcattgaatgacccaatccacgagcctcaaaccgtggctctcaaagcaacgaggagcaaggaggcgctacctagcaaggtggcgcaagttgaggcggccgggcttaacgaagaagaaatggccctcatcatcaagcggttcaagacaacactaaaaggtcgcaaggagcatcccaacaagaacaagacgaaggggaagcgctcatgtttcaaatgtggtaagattggtcattttatcgctaattgtcccgataatgatagtgaccaggaacaagagaagaagagggaaaagaagaagtcttacaagaaggctaagggcgaggcacaccttggcaaggagtgggactcggattgttcgtcgtctgactccgacaatgaaggactcgccgcctcagccttcaacaagacgtccctcttccccaacgagcatcacacatgcctaatggcaaaggagaagaagggatgcctacacggttggtacccctcaattaaggatgggcttggtttcaagagggaagccaagaacttaacaagtcataaggctcccattcccgccaaggagaaagggaaggcccctatgacaaatagtgttcaaaagaaccatgccttcatgtaccatgataggagacattctagggatgttcattataatagaagttataattctcttgcttcacatgccatgattgcttcaagttcctctaatgtgtatggtagaaatatgcctaggaaaaatgttgctcatgctcctaggaaagtgattgctaagaaggtgggggccaaatgcaagggagacaagacttgcatttgggtccctaaggctattgttactaaccttgtaggacccaacaagagttgggtttatgcatccgggggctcaagctggattatcgacagcggatgcacaaaccacatgacgggggagaagaagatgttctcttcctacgtcaagaacaaggattcccaagattcaatcatattcggtgatgggaaccaaggcaaggtgaaaggactaggaaaaattgctatttcatccgagcactctatttctaatgtattcttagttgagtcgcttggatataacttgttgtctgtgagtcaactttgtaatatgggatacaatcgcttattcacaaatgtagatgtgtctgtctttagaaggagtgatggttcattagcttttaagggtgtattagacgacaaactctacttagttgattttgccaaagaggaggccggtctagatgcatgcttaattgctaagactagcatgggctggctgtggcatcgccgcttagcacatgtagggatgaagaaccttcacaaacttctaaagggagaacacgtgataggtctaacaaacgtaaccttcgaaaaagatagaccttgtgcagcttgtcaagcaggtaaacaggtgggaagctctcatcataccaaaaatgtgatgaccacatcaagacctttggagttgcttcatatggacctcttcggacccgtcgcctatctaagcataggaggaagtaagtatggtcttgttatagttgatgatttttcccgcttcacttgggtattctttttgcaggataaatctgaaacccaagggaccctcaaacgtttcctaaggagagctcaaaatgagttcgagcttaagaaaaatggtgtggtagagaggaagaacaggacgctcatagacatggcgaggacaatgcttggagaattcaagacacccgagcggttttggtcggaagccgtgaacacggcttgccacgccataaaccgggtgtaccttcatcgcctcctcaagaagacttcgtatgagcttctaaccggtaacaaacccaatgtttcgtactttcgtgtatttgggagcaaatgttatattctagtaaagaaaggtagaaattctaagtttgctcccaaagctgtagaagggtttttgttaggttatgactcaaatataaaggcgtatagggtcttcaacaaatcatcgggtttggttgaagtctctagcgacgttgtatttgatgagactaatggctctccaagagagcaagttgttgatcttgatgatgtagatgaagaagacgttccaacggccgcaatacgcaccatggcgattggagatgtgcggccacaggaacaaaaggagcaagatcaaccttcttcctcaacaatggtgcatcccccaactcaagacgatgaacagcctttcagggtagaagaggccttgctagatccggactgggtgttggccatgcaggaagagctcaacaacttcaaaagaaatgaagtctggacactggtgcctcgtcccaagcaaaacgttgtgggaaccaagtgggtgttccgcaacaaacaagacgagcacggggtggtgacaaggaacaaggcacgacttgtggcaaaaggttatgcccaagtcgcaggtttggactttgaggagacttttgctcctatggctaggctagagtcaattcgcatattgttagcctatgctgctcaccattctttcaggttgttccaaatggatgtgaagagtgctttcctcaacggaccaatcaaggaggaggtgtacgtggagcaaccccctggcttcgaggatgaatggtaccctgaccacgtgtgtaagctctctaaggcgctctatggacttaagcaagccccaagagcatggtatgaatgccttagagactttttaattgctaatgctttcaaggttgggaaagccgatccaactcttttcactaagacttgtgagggtgacttatttgtgtgccaaatttatgtcgatgacataatatttggttctactaaccaaaagtcttgtgaagagtttagcaaggtgatggctcagaaattcgagatgtcgatgatgggcgagttgaactacttccttgggttccaagtgaagcaactcaaggacggcaccttcatctcccaaatgaagtacatgcaagacttgctaaagcgatttggaatgaaggatgccaagcccgcaaagacaccaatgggaaccgacggacatgttgacctcaacaaaggaggtaagtccgttgatcaaaaggcataccggtctatgatagggtctttactttatttatgtgctagtagaccggatattatgcttagcgtatgcatgtgtgctagattccaatccgatccaagggagtgccacctagtggccgttaagcgaattcttagatatttagtcgctacgctttgcttagggatctggtatccaaaggggtctacctttgacttgattggatattcagactccaattatgctggatgtaaggtcaataggaagagtacatcagggacgtgccaattcttaggaaggtccctagtgtcatggagctctaagaaacaaacttctgttgccctatccaccgctgaggccgagtatgttgccgcaggacagtgttgcgcgcaactactttggatgaggcaaaccctcagggactttggctacaatctgagcaaagtcccactcctatgtgataatgagagtgctatccgcatggcggataatcttgttgaacacaaccgcactaagcacatagacatccggcatcactttttgagagaccaccagcaaaagggagatatcgaagtgttttatgttagcaccgagaaccagctagccgatatcttcaccaagcctctagatgagtcgaccttttgcaggctgcgtagtgagctaaatgtcttagattcgcggaacttggattga

SEQ ID NO: 4618 - DNA, 5253 bp, Zea mays
  Clone ID: TF_ZmC4916_416
atggatcctaaggggaagggaatcgtgatcaacgacaaggaaaaggagtccttcgtcaacgagccaaaagatgataaatccaacgactctggctcgggccacagacgtaaagatgggaagaagaagacaaggcgcatcaaggagatcgtctactacgacagcgacgaatcctcttcttcccaaaaggacgacgacaacgactacaggaagacgattgtagagaatggaatgaaatttgatagctcggatagtcctatgcttataaatgaacaaatccatagaaatgcacaagctactactgttcttttagcatctttgtgcagggaagaatacaataaggagagcggcttggacaatgccaagcagatatgggacaccctcaagatctctcacgagggcaacgacgtcaccatgctcaccaagatggagttggtagagggcgaacttggaagatttgctatgataaggggggaggagccaacccaaacatacaaccggctcaaaacccttgtcaacaagataaggagctatggaagcacgcgatggatggaccacgacatcgtccgcctaatgctaaggtcctttaccgttcttgatcctcatttggtgaataatattcgtgagaatcccaggtacaccaaaatgtcgcccgaagaaattcttggaaaatttgtaagcgggcggatgatgatcaaggaggcgaggtacgtcgatgacgcgttgaacggtccaatccacgagcctcaacccattgctctcaaggcatcgagaagcaaggaggcactaccaagcaaggtggcgcaaattgaggcggccgggcttaatgatgaagaaatggctctcatcattaagcgcttcaagacggcattaaggggtcgcaaggagcatcccaacaagaccaagacgaaggggaagcgctcatgcttcaagtgtggtaagattggtcactttatcgctaattgtcccgataatgatagtgaccaggaaaagaagagtgggaaatgggaaaagaagaagaattacaagaaggcaaagggcgaggctcatattggaaaggagtgggattcggattgctcctcgtctgactccgacaacgaaggactcgccgccaccgccttcaacaagtcatccctcttccccaacgagcatcacacgtgcctcatggctaaggagaagaaagtaagtactcgaaactctacttatgcttcttctagtgaggatgagtctagtgatgatgaaatagactattcatgcttatttaaaggattagatagatctaagattgacaaaattaatgaattgattgatgctttaaatgataagaataggctactagaaaagcaagaggatctcttgtacgaagaacatgataagtttgtagaggctcaaaaaacccttgcattagaaattaagagaaatgaaatgcttgcttgtgaattgtctacatgccatgattcaatttctaaattaaagagcatcaatgatgacttaaatgctaaactagtagaagcacaaaaatccaactcttgtgttgaacatgttgaaatttgcactaggtgtaaggatgttgatattaatgcttgtagtgaacacttagtttccatttcaaaattgaatgatgaattagctagtcttaatgcccaacttaagactagcaagagtgaatttgaaaaactaaaatttacaagggatgcctacactattggtagacacccctcaattaaggatgggcttggcttcaagagggaagccaagaacttaacaagccataagactcctatctccaccaaggagaaagggaaggctcctatggctaatagtgttaagaagaatcatgctttcatgtactatgataggagatactctagaaatgcctttagaagtaatgatgtttttgattcacatgcctatgattcttatgccatgactgcttctagttcttcctatatgcatggtagaagtatgactaggagaaatgctattcatcacgtgcctagaaagaatactattcatgctcctaggaaagtagtaaatgaaccttctacaatttattgtgctttaaatgcttcctttgctatttgtagaaaggataggaagatagttgctaggaagttaggggcaaaatgcaagggagacaaaacttgcatttgggtccctaaggatatttgcactaacctggtttatgcatccgggggttcaagctggattatcgacagcggatgcacaaaccatatgacgggggagaagaagatgttcacctcctacgtcaagaataaggattcccaagattcaattatattcggtgatgggaatcaaggcaaggtaaaagggttagatgtgtttgtctttagaagaagtgatggttcactagcctttaagggtgtattagacggcaagctttacttagttgattttgcaagagaagaggccggtctagatgcatgcttaattgctaagactagcatgggctggctgtggcatcgccgcttagcacatgtggggatgaagaaccttcacaagcttctaaagggagaacacgtgataggtttgactaacgtacaattcgaaaaagatagaccttgtgcagcttgtcaggcaggtaaacaggtgggaggagcgcatcacagcaagaatgtgatgaccacatcaagacccctggagctgctacatatggacctcttcggacccgtcgcctatctaagcataggaggaagtaagtatggtttagttattgttgatgacttttcccgcttcacttgggtgttctttttgcaggataagtctgaaacccaagggaccctcaagcgcttcctcaggagagctcaaaatgagtttgagctcaaggtgaagaagataaggagcgacaacgggtccgagttcaagaaccttcaagtggaggagttccttgaggaggaagggatcaagcacgagttctccgctccctacacaccacagcaaaatggtgtggtagagaggaaaaacaggacgctaatcgatatggcgaggacgatgcttggagaattcaagacccccgagcatttttggtcggaagccgtgaacacggcttgccacaccatcaacagggtctaccttcatcgcctcctcaagaagacttcgtatgagcttctaaccggtaacaaacccaatgtatcttactttcgtgtatttgggagcaaatgctacattctagtgaaaaagggtagaaattctaagtttgctcccaaagctgtagaagggtttttgttaggttatgattcaaatacaaaggcatatagggtcttcaacaaatcatcgggtttggttgaagtctctagcgacgttgtatttgatgagactaatggctctccaagagagcaagttgttgatcttgatgatgtagatgaagaagatgttccaacggccacgatacgcaccatgacgattggagatgtaaggcctcgggaacaattggagcaagatcaaccgtcttcctcaactatggtgaatcccccaacccaagatgacgaacaggtacctcaagtggaggcgcatgatcaagggggagcacaagatgttcaagttgaagaggaagaagcacctcaggcacctccaacccaagttcgagcggtgattcaaagggatcatcccgttgaccaaattttgggtgacattagcaagggagtaactactcgttcaagattagttaatttttgtgagcattactcctttgtctcttctattgagcctttcagggtagaagaggccttgctagatccggactgggtgttggccatgcaggaggagctcaacaacttcaagagaaatgaagtttggacgctggtgcctcgtcctaagcaaaatgttgtgggaaccaagtgggtgttccgcaacaaacaagacgagcacggagtggtgacgaggaacaaggctcgacttgtggcaaaaggttatgcccaagtcgcaggtttggactttgaggagacttttgctcctgtggctaggctagagtccattcgtatcttgctagcatatgccgctcaccattctttcaggttgttccaaatggatgtgaagagcgctttcctcaacgggccaataaaggaggaggtgtacgtggagcaaccccctggcttcgaggatgaacggtaccccgaccacgtgtgtaagctctctaaggcgctctatggacttaagcaagccccaagagcatggtatgaatgccttagagatttcttaattgctaatgctttcaaggttgggaaagccgatccaactctttttactaagacttgtgatggagatttgtttgtgtgccaaatttatgtcgatgacataatatttggctctactaataaaaagtcttgtgaagagtttagcagggtgatgacgcagaaattcgagatgtcaatgatgggcgagttgaactacttccttgggttccaagtgaagcaactcaaggatggcaccttcatctctcaaacgaagtacacgcaagacttgctaaagcggtttgggatgaaggacgccaagcccgcaaagactccaatgggaaccgacggacacaccgacctcaacaaaggaggtaagtccgttgatcaaaaagcataccggtcaatgataggatcgttactttacttatgtgctagtagaccggatattatgcttagcgtatgcatgtgtgctagatttcaatccgatcctaaggagtgtcacttagtggcggtgaagcgaattcttagatatttagttgctacgccttgcttcgggatctggtatccaaaggggtctacctttgacttaatcggatactcagattccgactatgctggatgtaaggtcgataggaagagtacatcggggacgtgccaattcttaggaaggtccctggtgtcgtggaactctaagaaacaaacttctgttgccctatccaccgctgaggccgagtacgttgccgcaggacagtgttgcgcgcaactactttggatgaggcaaaccctccgggactttggctacaatctgagcaaagtcccactcctatgtgataatgagagtgcaatccgcatggcggaaaatcctgttgaacacagccgcacaaagcacattgacatccgacatcactttttgagagaccaccagcaaaagggagatatcgaagtgtttcatgttagcaccgagaaccagctagccgatatccttaccaagcctctagatgagaagaccttttgcaggttgcgtagtgagctaaatgtcttagattcgcggaacctggattga

SEQ ID NO: 4619 - DNA, 5427 bp, Zea mays
  Clone ID: TF_ZmC4916_417
atggatcctaaagggaagggaatcgtgatcaacgacaaggaaaaggagtccttcgtcaacgagccaaaagatgataaatccaacgactctggctcgggccacagacgtaaagatgggaagaagaagaagacaaggcgcatcaaggagatcgtctactacgacagcgacgaatcctcttcttcccaaaaggacgacgacaacgactacaggaagacgatcaattcgaacttttcatttgattattctcgtattccacatagttcgaattcgcatttgctttccattcctctcggcaaacctccacactttgatggggaggactacggattttggagtcacaaaatgcgtagtcacttattctctcttcatccaagcatatgggagattgtagagaatggaatgaaatttgatagctcggatagtcctatgcttataaatgaacaaatccatagaaatgcacaagctactactgttcttttagcatctttgtgcagggaagaatacaataaggtgagcggcttggacaatgccaagcagatatgggacaccctcaagatctctcacgagggcaacgacgtcaccatgctcaccaagatggagttggtagagggcgaacttggaagatttgctatgataaggggggaggagccaacccaaacatacaaccggctcaaaacccttgtcaacaagataaggagctatggaagcacgcgatggacggaccacgacgtcgtccgcctaatgctaaggtcctttaccgttcttgatcctcatttggtgaataatattcgtgagaatcccaggtacaccaaaatgtcgcccgaagagattcttggaaaatttgtaagcgggcggatgatgatcaaggaggcgaggtacgtcgatgacgcgttgaacggtccaatccacgagcctcaacccattgctctcaaggcatcgagaagcaaggaggcactaccaagcaaggtggcgcaaattgaggcggccgggcttaatgatgaagaaatggctctcatcattaagcgcttcaagacggcgttaaggggtcgcaaggagcatcccaacaagaccaagacgaaggggaagcgctcatgcttcaagtgtggtaagattggtcactttattgctaattgtcccgataatgatagtgaccaggaaaagaagagtgggaaatgggaaaagaagaagaattacaagaaggcaaagggcgaggctcatattggaaaggagtgggattcggattgctcttcgtccgactccgacaacgaaggactcgccgccaccgccttcaacaaatcaaccctcttcccaaacgagcgtcacacatgccttatggcaaaggagaagaaggtatgtactcgcaactctacctatgcttcttcaagtgaggacgaatctagtgatgaggatgaagtagattattcatgtttgttcaagggcttagacagatctaagatagacaaaattaatgaattaattgatgccttgaatgaaaagaatatacttttagaaaagcaagaggattcgttgtatgaagaacatgataagtttgtagaggctcaaaaatcccttgcattagaaattaagaggaatgaaatgcttgcttgtgaagtgtcaacatgccatgattctatttctaacttaaagagcataaacgatgatttaaatgctaaactagtagaagcaaataaatccaactcttgtgttaaacatgttgaaatttgcactaggtgtaaggatgttgatattaatgcttgtagtgaacacttagtttacatttcaaaattgagtgatgaagtggctagtcttaatgctcaacttaagactagcaaaagtgattttgaaaaactaaaatttgctagggatgcctacacggttggtagacacccctcaattaaggatggacttggcttcaagagggaagccaagaacttaacaagccataaggctcccattcccgccaaggagaaagggaaggcccctatggctactagtgctaaaaggaaccatgcctttttgtatcatgataaaagacaaactagaagttatgatgcttttgattcatatgtttgtgattctcatgccatgtttgctcctagttcttcttatgtgtatgatagaaatgttactaggagaaatgttgtccctaaaagaaatgttgcaaatgttcatagaaaagtagtgaatgaaccctctacaatttattgtgctttgaatgcttcatttgcaatttgtagaaaggatagaaaagtaattgctaggaagttaggggcaaaatgcaaaggtgataaaacttgcatttgggtccctaaggaaattgtgactaaccttgtaggacccaacaagagttgggtttatgcatctgggggttcaagctggattatcgacagcggatgcacaaaccatatgacgggggagaagaaaatgttcacctcctacgtcaagaataaggattcccaagattcaattatattcggtgatgggaatcaaggcaaggtaaaagggttagatgtgtttgtctttagaagaagtgatggttcactagcttttaagggtgtattagacggcaaactttatttagttgattttgcaaaagaagaggctggtctagatgcatgcttaatagctaagactagcatgggctggctgtggcatcgccgcttagcacatgtggggatgaaaaaccttcacaagcttctaaagggagaacacgtgataggtttgactaacgtgcaattcgaaaaagatagaccttgtgcagcttgtcaagcaggtaaacaagtgggaggagcacatcacagcaagaatgtgatgaccacctcaagacctctggagctgctgcatatggacctcttcggacccatcgcctatctgagcataggaggaagtaagtatggtctagttattgttgatgacttttcccgcttcacttgggtgttctttttgcaggataagtctgaaacccaagggaccctcaagcgcttcctcaggagagctcaaaatgagtttgagctcaaggtgaagaagataaggagcgacaacgggtccgaattcaagaatcttcaagtggaggagtttcttgaggaagaggggatcaagcacgagttctccgctccctacacaccacagcaaaatggtgtggtagagaggaagaacaggacgctcatcgatatggcgaggacgatgcttggagagttcaagacctccgagtgcttttggtcggaagccgtgaacacggcttgccacgccatcaacagggtctaccttcatcgcctcctcaagaagacctcgtatgagctgctaaccggtaacaaacctaatgtatcgtattttcgtgtattcgggagtaaatgctacattcttgtgaagaaaggtagaacttctaaatttgctcccaaagctgtagaagggtttttattaggttatgattcaaatacaaaggcgtatagggtcttcaacaaatcatcgggtttggttgaagtctctagcgacgttgtatttgatgagactaatggctctccaagagagcaagttgttgatcttgatgatgtagatgaagaagacgttccaacggccgcaatacgcaccatggcgattggagaggtgtggccacaggaacaaaatgagcgagatcaaccttcttcctcaacaatggtgcatcccccaactcaagacgatgaacaggtacatcaacaggaggcgtgtgatcaagggggagcacaagatgatcatgtgatggaggaagaagcgcaaccggcacctccaacccaagttcgagcggtgattcaaagggatcatcccgtcgaccaaattctgggtgatattagcaagggagtaactactcggtctcgattagttaatttttgtgaacattactcctttgtctcttctattgagcctttcagggtagaagaggccttgctagatccggactgggtgttggccatgcaagaggagctcaacaacttcaagaggaatgaagtttggacgttggtgcctcgtcctaagcaaaatgttgtgggaaccaagtgggtgttccgcaacaaacaagacgagcacggagtggtgacaaggaacaaggctcgacttgtggcaaaaggttatgcccaagtcgcaggtttggactttgaggagacttttgctcccgtggctaggctagagtccattcgtatcttgctagcatatgtcgctcaccattctttcaggttgttccaaatggatgtgaagagcgctttcctcaatgggccaataaaggaggaggtgtacgtggagcaaccccctggcttcgaggatgaacggtaccccgaccacgtgtgtaagctctctaaggcgctctatggacttaagcaagccccaagagcatggtatgaatgccttagagatttcttaattactaatgctttcaaggttgggaaagccgatccaactcttttcactaagacatgtgatggtgatttgtttgtatgccaaatttatgtcgatgacataatatttggttctactaataaaaagtcttgtgaagagtttagcagggtgatgacgcagaaattcgagatgtcaatgatgggcgagttgaactacttccttgggttccaagtgaagcaactcaaggaaggcaccttcatctctcaaacgaagtacacgcaagacctgctgaagcggtttgggatgaaggacgccaagcccgcaaagactccgatggggaccgacggacacactgacctcaacaaaggaggtaagtccgttgatcaaaaggcataccggtcaatgatagggtcgttactttacttatgtgctagtagaccggatattatgcttagcgtatgcatgtgtgctagatttcaatccgatcctaaggagtgtcacctagtggcagtgaagcgaatccttagatatttagttgctacgccttgcttcgggctctggtatccaaaggggtctacctttgacttgattggatattcagactccgactatgctggatgtaaggtcgataggaagagtacatcggggacgtgccaattcttaggaaggtccctggtgtcatggaactctaagaaacaaacttccgttgccctatccacggctgaggccgagtatgttgccgcaggacagtgttgcgcgcaactactttggatgaggcaaaccctcagggactttggctacaatctgagcaaagtcccactcctatgtgataatgagagtgctatccgcatggcggaaaatcctgttgagcacagccgcacaaagcacatagacatccggcatcactttttgagagaccaccagcaaaagggagatatcgaagtgtttcatgttagcaccgagaaccagctagccgatatctttaccaagcctctagatgagaagaccttttgcaggctgcgtagtgagttaaatgtcttagattcgcagaacttggattga

SEQ ID NO: 4620 - DNA, 4971 bp, Zea mays
  Clone ID: TF_ZmC4916_438
atggatcctaagggcaaggggatcgtgatcaatgataaggataaggagtccttcgtcaacgagccaaaagatgacaagcctaccgactcaggctcgggccacaaacgaagagatgggaagaagaagaagacaaggcgcatcaaagagatcgtctactacgacgatagcgatgagtcctcttcttcccaaaaggacaacgacgacaacgactacgacaaaagaaagacggttaattcaaacttttctttcgattattcttgtattccgcatagctcaaatgcacatttgctttccattcctattggcaaacctccacactttgatggggaggactacggattttggagtcagaaaatgcgtagtcacttgttctctctccatccaagcatatgggagattgtagagagtggaatgaaatttgatagctcggatagtcccatgtttataaatgaacaaatccataaaaatgcacaaactactactgtcctgttagcatctttgtgcagggaagagtacaataaggtgagcggcttggacaatgccaagcagatctgggacaccctcgggatctcacatgaggggaacgacgtcaccatgctcaccaagatggagttggtcgagggcgagcttgggagatttgcaatgataaggggagaggatccaacccaaacatacaaccggctcaagaccctcatcaacaagataaggagctatggaagcacgcgatggacggaccacgacatcgttcgtctaatgctaaggtcctttactgttcttgatccacatcttgtgaacaatattcgtgaaaatcctaggtacacaaagatgtcgcccgaagaagttcttgggaagttcgtgagcgggcgaatgatgataaaggaggcgagatacatggacgatgcaatgaacggtccaatccatgagcctcaacccattgctctcaaggcatcaaggagcaaggaggcactacctagcaaggtagcgcaagttgaggcggccgggctcaatgatgaagagatggccctcatcatcaagcgcttcaagacggtgctaaagggacgcaaggagcatcccaaaaagaccaagacgaaggggaagcggtcatgcttcaaatgtggtaagattggtcattttatcgctaactgtcccgataatgatagtgaccaggaacaagggaacaagagggaaaagaagaattacaaaaaggccaagggcgaggcacatcttggaaaggagtgggattcggattgctcctcttctgactccgacaatgaaggactcgccgccaccgccttcaacaagtcatccctcttccccaacaagcatcacacatgcctcatggcaaaggagaagaagggcctagatagaaccaaggttgataaaattaatgaattaattgatgccttgaatgataagaataggtgtaaagattttgatgttgatgcttgtagcaaacacctagcttcaatttctaaattaaatgatgaagtggctagtcttaatgcacaacttaagactagcaaaagtgattttgataagttaaaatttgcaagggatgcctacacgattggtagacacccctcaattaaggatggacttggcttcaagagggaagccaagaacttaacaagccataaggctcccatctccgccaaggagaaagggaaggcccctatggctagtagtactaaaaagaaccatgctttcatgtatcatgataggagatattctagaaatgcctatagaagttatgatacttatgattcatatgctatgactgcttctagttcccatgttgtgcatgatagagatatgcctaggagaaatgttgttcctaggaaaattaatgaaccttctacaatatatcatgcttgcaatgcttcctttgctatttgtagaaaggataagaaggtttatgcatccgggggttcaagctggattatcgacagcggatgcacaaaccacatgacgggggagaagaagatgttcacctcctacgtcaagaacaaggatccccaagattcaatcatattcggtgatgggaaccaaggcaaggtgaaaggctttggcaagattgcaatctcaaatgagcactctatttctaatgtgtttttagttgagtcacttggatataatttgttatctgttagtcaattatgcaatatgggatataattgtttattcacaaatatagatgtgtctgtctttagaaggtgtgatggttcattagcttttaagggtgtactagacgacaaactttatttagttgattttgcaaaagaggaggccggtctagatgcatgcttaattgctaagacttgcatgggctggctgtggcatcgccgtttagcacatgtgggaatgaagaaccttcacaagcttctaaagggagaacacgtgataggtttaactaacgtgcatttcgaaaaagatagaccttatgcagcttgtcaagcaggtaaacaagtgggaggagcgcatcacagcaaaaatgtgatgaccacatcaagacccctggagctgctacatatggacctcttcggaaccgtcgcctatctgagcataggaggaagtaagtatggtctagttattgttgatgacttttcccgcttcacttgggtattctttttgcaggataaatctaaaacccaagggaccctcaagcgcttcctaaggagagctcaaaacgagtttgagctcaagaggaagaacaggatgctaatcgacatggcgaggacgatgcttggagagtttaagacccccgagcacttttggtcggaagccgggaacacggcttgccacgccatcaaccgggtctaccttcatcgcctcctcaagaagacttcgtatgagctactaaccggtaacaaacccaatgtttcgtatttccgagtttttgggagtaaatgctatattctagtgaagaaaggtagaaattctaaatttgctcccaaagctgtagaagggtttttgttaggttatgactcaaatacaaaggcgtatagagtcttcaacaaatcatcgggtttggttgaagtctctagcgacgttgtatttgatgagactaatggctctccaacagagcaagttgttgattttgatgatgtagatgaagaagaagttccaacggccgcaatacgcaccatggcgattggagatgtgcggccacaggaacaagatgaacgagatcaaccttcttcctcaacaatggtgcatcccccaactcaagatgatgaacaggaggcgtgtgatcaagggggagcacaagatgatcatgtaatggaggaagaagcacaactggcacctccaacccaagttcgagcgatgattcaaagggatcatctcgtcgaccaaattttgggtgacattagcaagggagtaactactcgatctcgattagttaatttttgtgagcattactcttttgtctcttttattgagcctttcagggtagaagaggccctgctagatccggactgggtgttggccatgcaggaggagctcaacaacttcaagagaaatgaagtttggacacttgtgcctcgtcccaagcaaaatgttgtgggaaccaagtgggtgttccgcaacaaacaagacgagcacggggtggtgacaaggaacaaggctagacttgtggcaaaaggttatgcccaagtcgcaggtttggactttgaggagacttttgctcctgtggctaggctagagtccattcgcattttgctagcatatgccgctcaccattctttcaggttgttccaaatggatgtaaagagcgctttcctcaacgagccaatcaaggaggaggtgtacgtggagcaaccccctggcttcgaggatgaacggtaccccgaccacgtgtgtaagctctctaaggcgctctatggacttaagcaagccccaagagcatggtatgaatgccttagagactttttaattgctaatgctttcaaggttgggaaagccgatccaactctttttactaagacttgcgatggtgatctttttgtgtgccaaatttatgtcgatgacataatatttggttccactaaccaaaagtcctgtgaagagtttagcagggtgatgacgcagaaattcgagatgtcgatgatgggcgagttgaactacttccttgggttccaagtgaagcaactcaaggacggcaccttcatctcccaaactaagtacatgcaagacttgctaaagcggtttgagatgaaggacgccaagcccgcaaagactctgatgaggaccgacagacacaccgacctcaacaaaggaggtaagtccgttgatcaaaaggcataccggtcaatgatagggtctttactttatttatgtgctagtagaccggatattatgctcagcgtatgcatgtgtgctagatttcaatccgatcctaaggagtgtcacttagtggcggtgaagcgaatctttagatatttagtcgctacgccttgcttcgggatcaggtatccaaaggggtctacttttgacttgattggatattcagattccgactatgtcggatgtaaggtcgataggaagagtacattggggacgtgccaattcttaggaaggtccctagtgtcatggaattctaagaaacaaacttttgttgccctatccaccgctgaggccgagtacgttgccgcaggacagtgttgcgcgcaactactttggatgaggcaaaccctccgggactttcgctacaatctgagcaaagtcccactcctatgtgataatgagagtgctatccgcatggcggaaaatcctgttgaacacagtcgcacaaagcacatagacatccggcatcactttttaagagaccaccagcaaaagggagatatcgaagtgtttcatgttagcaccgagaaccagctagccgatatctttaccaagcctctagatgagaagaccttttgcaggctgcgtagtgagctcaatgtcttagattcgcggaacctggattga

SEQ ID NO: 4621 - DNA, 5517 bp, Zea mays
  Clone ID: TF_ZmC4916_444
atggatcctaaggggaagggaatcgtgatcaacgataaggagaaggagtccttcgtcaacgagccaaaggatgacaagtcaaacgactcgggctcgggtcatagacgaaaagatgggaagaagaagaagacaaggcgcatcaaggagattgtctactacgacagcgacgaatcttcctcttcccaaaaggacgatgacaacgactacaggaagacggtcaattcgaacttttcatttgattattcttgtattccacatagttcgaattcgcatttgctttccattcctctcggcaaacctccacactttgatggggaggactacggattttggagtcacaaaatgcgtagtcatttattctctctccatccaagcatatgggagattgtagagaatggaatgaaatttgatagctcggatagccctatgtttattaacgaacaaattcataaaaatgcacaagctactactgtgttgctagcctctttgtgcagggacgagtacaataaggtgagcggcttggacaatgccaagcagatatgggacaccctcaagatttctcacgaggggaacgacatcaccatgctcactaaaatggagttggtggagggcgagcttggaaggtttgcaatgataaggggcgaggagccaacccaaacatacaaccggctcaagacccttatcaacaaaataaggagctacggaagcacgcgatggacggaccatgacgtcggccgcctaatgctaaggtcatttaccgttcttgatcctcatctcgtgaacaatattcgtgagaatcccaggtacacgaagatgacgcccgaggaggtactcggaaaattcgtaagcgggcggatgatgatcaaggaggcaagatacgtggacgacgccttgaatggaccgatcaatgagcctcaaccaattgctctcaaggcaacaaggagcaaggaggcgctaccaagcaaggtggcgcaagttgaggcggccgggctaaataatgaggagatggccctcatcattaagcgcttcaagacggcgcttaaaggtcgcaagggacagccaaacaagaccaagacaaaggagaagcgctcatgcttcaaatgtggtaagattggtcatttcattgctaactgtcccgataatgaaagtgaccaggaaaaggaggacaagagggaaaagaagaagcattacaagaaggccaagggcgaggcacatatcggaaaggaatgggattcggattgctcctcttccgactccgacaatgagggactcgccgccaccgccttcaacaaatcgaccctcttccccaacgagcgtcacacatgccttatggcaagggagaagaaggtatgtactcaaaaccctacctatgcttcttttagtgaggatgagtctagtgatgatgatgagatagattactcatgcttattcaagggattagatagatctaaaattgataagattaatgagttgattgatgccttgaatgacaagaatagattactagaaaaacaagaggaccttttatatgaagagcatgacaaatttgtagaagcacaaaaatcccatgctttagaagttaagagaaatgaaatgctttcttgtgaattatcttcttgccatgagacaatttctagcttaaagagcataaatgatgatttaaatgctaagctagaaaaatctagtaaattaacatcttgtgtagaacatgttgtgatttgcactaggtgtaaagactttaatgttgatgcttgtagtgaacacctcgagtgcatttctaaattaaatgatgaagtggctagtcttaatgcccaacttaagactagcaagagtgatttggataaactaaaatttgcaagggatgcctacacaattggtagacacccctcaattaaggatgggcttggcttcaagagggaagtcaagaacttgacaagccataaggctcccatctccgccaaggagaaagggaaggcccctatggctagtagtgtgcaaaagaaccatgcttttatgtaccatgataggagacaaactagaaatgcttataggagttttaatgcttatgatgattttgattctcatgtcatgtttgcttctagttcttcctatgtgcatgatagaaatgttgataggagaaatgttgttcataatatgcctaggagaaatgttgttaatgttcctagaaaagttatgaatggaccttctacaatttatcatgcactaaatgcttcctttgctatttgtagaaaggataggaaaatagttgctaggaagttaggggcaaaatgcaagggagacaaaacttgcatttgggtccctaaggaaatttgcgctaaccttgtaggacccaacatgagttgggtttatgcatccgggggttcaagctggattatcgacagcggatgcacaaaccatatgacgggggagaagaaaatgttcacctcctacgtcaggaataaggattcccaagattcaattatattcggtgatgggaatcaaggcaaggtaaaagggttagttgagtctcttggttataatttgctatctgttagtcaattatgcaacatggggtataactgcctatttacaaatgtagatgtgtctgtctttagaagaagtgatggttcactagcttttaagggtgtattagacggcaaactttatttagttgattttgcaaaagaggaggccggtctagatgcatgcttaatagctaagactagcatgggctggctgtggcatcgccgcttagcacatgtggggatgaagaaccttcacaagcttctaaagggagaacacgtgataggtttaactaacgtgcatttcgaaaaagatagaccttgtgcagcttgtcaagcaggtaaacaagtgggaggagcacatcacagcaagaatgtgatgaccacttcaagacccctggagctgctgcatatggacctcttcggacccgtcgcctatctgagcataggagggagtaagtatggtttagttattgttgatgacttttcccgcttcacttgggtgttctttttgcaggataagtctgaaacccaagggaccctcaagcgcttcctcaggagagctcaaaatgagtttgagctcaaggtgaagaagataagaagcgacaacgggtccgagttcaagaaccttcaagtggaggagttccttgaggaggaagggatcaagcatgagttctccgctccctacacaccacagcaaaatggtgtggtagagaggaagaacaggacgctaatcgacatggcgaggactatgcttggagaattcaagacccccgagcgtttttggtcggaagccgtgaacacggcttgccacgccatcaacagggtctaccttcaccgcctcctcaagaagacgtcatatgagcttctaaccggtaacaaacccaatgtatcgtactttcgtgtatttgggagcaagtgctacattctagtgaagaagggtagaaattctaaatttgctcccaaagctgtagaagggtttttgttaggttatgactcaaatacaaaggcgtatagagtcttcaacaaatcatcgggtttggttgaagtttctagcgacgttgtatttgatgagactaatggctctccaagagagcaagttgttgattgtgatgatgtagatgaagaagatgttccgacagccgctatacgaaccatggcgattggagaagtgcggccacaggaacaagatgaacgagatcaaccatcttcctcaactatggtgcatcccccaactcaagacgatgaacaggttcatcaccaggaggcgtgtgaccaagggggagcacaagatgatcatgtgatggaggaagaagcggaactggcacctccaacccaagttcgagcgatgattcaaagggatcatcccgtcgaccaaattctgggtgatattagcaagggagtaactactcgatctcgattagttaatttttgtgagcattactcctttgtctcttctattgagcctttcagggtagaggaggccttgctagatccggattgggtattggccatgcaggaggaactcaacaacttcaagcgcaatgaagtttggacactggtgcctcgtcccaagcaaaatgttgtgggaaccaagtgggtgttccgcaacaaacaagacgagcacggggtggtgacgaggaacaaggctcgacttgtggcaaaaggttatgcccaagtcgcaggtttggactttgaggagacctttgctcctgtggctaggctagaatcaattcgtatcttgctagcatatgccgctcaccattctttcaggttgtaccaaatggatgtgaagagcgctttcctcaatgggccgatcaaggaggaggtgtacgtggagcaaccccctggcttcgaggatgaacggtaccccgaccacgtgtgtaagctctctaaggcgctctatggacttaagcaagccccaagagcatggtatgaatgccttagagactttctaattgttaatgctttcaaggttgggaaagccgatccaactctttttacaaagacatgtgatggtgacttgtttgtgtgccaaatttatgtcgacgacataatatttggttctactaaccaaaagtcttgtgaagagtttagcagggtaatgacgcagaaattcgagatgtcgatgatgggcgagttgaactacttccttgggttccaagtgaagcaactcaaggacggcaccttcatctcccaaacgaagtacacgcaagacttgctaaagaggtttgggatgaaggacgccaagcccgcaaagacgccgatgggaaccgacggacacacagacctcaacaaaggaggtaagtccgttgatcaaaaagcataccggtcaatgataggttctttgctttacttatgtgctagtagaccggatattatgcttagcgtatgcatgtgtgctagattacaatccgatcctaaggagtgtcacttagtggcggtaaagcgaattcttagatatttggttgctacgccttgcctcgggctctggtatccaaaggggtctacctttgacttagttggatactcagactccgactatgctggatgtaaggtcgataggaagagtacatcggggatgtgccaattcttaggaaggtccctggtgtcatggaactctaagaaacaaacctccgttgccctatccaccgctgaggccgagtacgttgccgcaggtcagtgttgcacgcaactactttggatgaggcaaaccctccgggactttggctacaatctgagcaaagtcccactcctatgtgacaatgagagtgctatccgcatggcggagaatcctgttgagcacagccgcacaaagcacatagacatccggcatcactttttgagagaccaccagcaaaagggagatatcgaagtgtttcatgttagcaccgagaaccagctagccgatatcttcactaagcctctagatgagaagaccttttgcaggttgcgtagtgagctaaatgtcttagattcacggaacctggattga

SEQ ID NO: 4622 - DNA, 4851 bp, Zea mays
  Clone ID: TF_ZmC4916_448
atgtcgcccgaagaagttcttgggaagttcgtaagcgggcgaatgatgattaaggaggcaagatacgtggacgacgcgttgaacggtcctattcatgagcctcaacccattgctctcaaggcaacaagaagcaaggaggcactacctagcaaggtggcacaaattgaggcggtcggactaaatgatgaagagatggctctcatcatcaaacgcttcaagacggtactaaagggtcacaaggggcagccaagcaagaccaaggcaaaagggaagcgctcatgcttcaagtgcggtaagattggtcatttcatcgctaactgccctgataatgatagtgaccaggaacagggaaacaagagggaaaagaagaagaattacaagaaggcaaagggcgaggcgcatctaggcaaggagtgggactcggactgctcctcttccgactccgacaatgaaggactcgccgccaccgccttcaacaaatcaaccctcttccccaacgaatgtcacacatgccttatggcaagagagaagaaggtatgtactcggaattctacctatgcttcttcaagtgaggacgaatctagtgatgaggatgaagtagattactcatgtttgtttaagggcctagatagaaccaaggtagacaaaattaatgaattaattgatgccttgaatgataagaacatacttttagaaaagcaagaggatttgttgtatgaagaacatgataaatttgtagaagctcaaagatctcatgctctagaagttaaaagaaatgaaatactttcttgtgaattatcttcttgccatgatacaatttctaaattaaggagcatcaatgatgatttgaatgctaagttagagattgctagtaaatccacctcttgtgtagaaaatgttgtagcatgctctaggtgtaaagatattaacattgatgtttatagtgaacacctagcttgcatttctaaattaaatgaagaggtagctagtctgaatgcccaacttaagactagcaaaagtgattttgaaaaactaaaatttgcgagggatgcctacacggttggtagacacccctcaattaaggatgggcttggcttcaagaaggaagccaagaacttaacaagccataaggctcccatctccgccaaggagaaagggaaggcccctatggcaagtagcactaaaaggaatcatgcttttatatataatgataggagacaaactagaaatgcttgtaggagttataatgcttatgatgattttaactcacatgccatgtttgcttctagttcttcctttatgcatggtagaaatatgcctagaaagaatattattcatgctcctaagaaagtagtgaatgaaccttctacaatttattgtgctttaaatgcttcctttgctatttgtagaaaggataagaaaattgttgctaggaagttaggggcaaaatgcaagggagacaaaacttgcatttgggtccctaaggatatttgcactaaccttgtaggacccaacatgagttgggtttatgcatccaggggttcaagctggattatcgacagcggatgcacaaaccatatgacgggggagaagaagatgttcacctcctacgtcaagaataaggattcccaagattcaatcatattcggtgatgggaatcaaggcaagggcgacgtgggggttcctccgaagccgaggttgagtctgccttccgttgccgtggccgagcccgagccaaggggtcgggcgaggcggaagtcgttcggccgaggccagggcggagtccgagccctggggtcgggcgaagcggagtttcgtcgtcttccgggtgttagcccgagtccgagccctggggtcgggcggagcggagttcgccgtcttccgggtcttagcccgagtccgagccctggggtcgggcggagcggagttcgccgtcttccgggtcttagcccgagtccgagccctggggtcgggcggagcggagttcgccgtcttccgggtcttagcccgagtccgagccctggggtcgggcggagcggagttcgccgtcttccgggtcttagcccgagtctgagccctggggtcgggcggagcggagttcgccgtcttccggtcggagtggcgcaggcggcgctgtccttctgtcagactggccagtggagcggtggagtgacggcggtcacttcggctctgccgagggcgcgtgtcaggatagaggtgtcaggccacctttgcgttaaatgcccctgcaatttggtcagtcggtgtggcgatttagtcaaggtggcttctgagcgaagccaaggcctcgggcgagccggtgatgtgtccgccataaaaagggggcctcgggcgagacggaagtctctcgaggataagtctgaaacccaagggaccctcaagcgcttcctcaggagggctcaaaatgagtttgagctcaaggtgaaaaagataaggagcgacaacgggtccgagttcaagaaccttcaagtggaggaattccttgaggaggaagggatcaagcacgagttctccgctccctacacaccgcagcaaaatggtgtggtagagaggaagaacaggacgctcatcgatatggcgaggacgatgctaggagagttcaagacccccgagtgcttttggacggaagccgtgaacacggcttgccatgccatcaacagggtctaccttcaccgcctcctcaagaagacttcgtatgagctgctaaccggtaacaaacccaatgtatcttactttcgtgtatttgggagcaagtgctacattctagtgaagaaaggtagaaattctaagtttgctcccaaagcagtagaagggtttttattaggttatgactcaaatacaaaggcgtatagagtcttcaacaaatcatcgggtttagttgaagtctctagcgacgttgtatttgatgagactaatggctctccaagagagcaagttgttgatcttgatgatgtagatgaagaagatgttccaacggccgctatgcgcaccatggcgattggtgatgtgcgaccacaggaacacttggagcgagatcaaccttcttcctcaactatggtgcatcccccaactcaagacgatgaacaggttcatcaacaggaggcgtgtgatcaagggggagcacaagttgatcatgtgatggaggaagaagcgcaaccggcacctccaacccaagttcgagcgatgattcaaagggatcatcccgtcgaccaaatactgggtgacattagcaagggagtaactactcgatctcgattagttaatttttgtgagcattactcctttgtctcttctattgagcctttcagggtagaggaggccttgctagatccggactgggtattggccatgcatgaggagctcaacaacttcaagaggaatgaagtttggacactggtgcctcgtccgaagcagaatgttgtgggaaccaagtgggtgttccgcaacaaacaggacgagcacggggtggtgacgagaaacaaggctcgacttgtggcaaaaggttatgcccaagtcgcaggtttggatttcgaggagacttttgctcctgtggctaggctagaatcaattcgtatcttgctagcatatgccgctcatcattctttcaggctgtaccaaatggatgtgaagagcgccttcctcaacgggccaatcaaggaggaggtgtacgtggagcaaccccctggcttcgaggatgaacggtaccccgaccatgtgtgtaagctctctaaggcgctctatggacttaagcaagccccaagagcatggtatgaatgccttagagactttctaattgttaatgctttcaaggttgggaaagccgatccaactctttttacaaagacatgtgatggtgatttgtttgtgtgccaaatttatgtcgatgacataatatttggttctactaaccaaaagtcttgtgaagagtttagcagggtgatgacgcagaaattcgagatgtcgatgatgggcgagttgaactacttccttgggttccaagtgaagcaactcaaggacgacaccttcatctcccaaacgaagtatacgcaagatctgctaaagcggtttgggatgaaggacgccaagcctgcaaagactccgatgggaaccgacggacacaccgacctcaacaaaggaggtaagtccgttgatcaaaaagcataccggtccatgataggttctttgctttatttatgtgctagtagaccggatattatgcttagcgtatgcatgtgtgctagatttcaatctgatcctaaggagtgtcacttagtggcggtgaagcgaattcttagatatttagttgctacgccttgcttcgggctctggtatccaaaggggtctacctttgacttggttggatactcagattccgactatgctggatgtaaggtagataggaagagtacatcggggacgtgccaattcttaggaaggtccctggtgtcgtggaactctaagaaacaaacttctgttgccctatccaccgctgaggccgagtatgttgccgcaggacagtgttgcgcgcaactactttggatgaggcaaaccctcagggactttggctacaatctgagcaaagtcccactcctatgtgataatgagagtgctatccgcatggcggaaaatcctgttgagcacagccgcacaaagcacatagacatccggcatcactttttgagagaccaccagcaaaagggagatatcgaagtgtttcatgttagcaccgagaaccagctagccgatatctttaccaagcctctagatgagaagaccttttgcaggctgcgtagtgagctaaatgtcttagattcgcggaacttggattga

SEQ ID NO: 4623 - DNA, 2081 bp, Zea mays
  Clone ID: TF_ZmC4916_451
atggatcctaaggggaagggaattgtgatcaacgacaaggagaaggagtctttcgtcaatgagccaagggatgacaaatccaacaactcgggctcgggccacaagcgaaaagatgggaagaagaagaagacaagacgcatcaaggagatcgtctactacgacagcgatgagtcctcttcttcccaaaaggacgacgacaacgactacaggaagacggtcaattcgaacttttcgtttgattattctcgtattccacatagttcgaattcgcatttgctttccattcctcttggtaaacctccacactttgatggggaggactacggattttggagtcacaaaatgcgtagtcatttattctctctccatccaagcatatgggagattgtagagaatggaatgaaatttgatagctcggatagccctatgtttatcaatgaacaaattcataaaaatgcacaagctactactgttctcttagcatctttgtgcagggaagagtacaataaggtgagcggcttggacaatgccaagcagatatgggacaccctcaagatctctcacgaggggaacgacatcaccatgctcaccaagatggagttagtggagggcgagcttggacgattcgccatgataaggggagaagagccaactcaaacttacaaccggctcaagacccttatcaacaagataaggagctacggaagcacgcgttggacggatcacgacgtcgtccgcctaatgctcaggtcatttactgttcttgatcctcatctcgtgaacaatattcgtgagaatcccaggtacacgatgatgacgcccgaagaagtacttggaaaattcgtgagcgggcggatgatgatcaaggaggctagatatgtcgacgacgcgttgaacggtccactccacgagtctcaacccattgctctaaaggcaacaagaagcaaagaggcgctacctagcaaggtggcacaaattgaggcggccggactcaatgatgaagagatggctctaatcatcaaacgcttcaagacggtgctaaaaggtcacaaggggcagccaagcaagaccaagacaaaggggaagcgctcatgcttcaagtgcggtaagattggtcattttatcgctaactgccccgataacgatagtgaccaggaacagggaaacaagagggaaaagaagaagaattacaagaaggccaagggcgaggcacatctcggcaaggagtgggattcggattgctcctcctccgactccgacaatgagggactcgccgccactgccttcaacaaatcggctctcttccccaacgagcatcacacttgcctcatggcaagggaaaagaaggtaatcactcataatgctaatacttatgattcttctagtgatgatgaatctagtgaggatgaaattgattactctagtttattcaagggattggatagaactaagatagctaagattaatgagttgattgatgccttaaatgaaaaggatagaatcttagagaaacaagaagaccttttatatgaagaacatgataaatttgttagtgcacaaaattcacttgctttagaagttaaaagaaatggaatactttctggtgaactttctacttgtaatgaaactatttcttctttaaaaggtgaaattgatgttttaactgctaaactagaagtagcaagtaactcctgtgttgaaaatattacaatttgcactaggtgtaaggattttgatgttaatgcttgtagtgaacacttagtctcaatttcaaaactaaatgatgaagtggctagtcttaatgctcaacttaagactagcaagagtgaagttgataaaataaaatttgcaagggatgcctacacggtcggtagacatccctcaattaaggatggtcttggcttcaagagagaggccaagaacttaacaagccataaggctcccatcctcgtcaaggagaaagggaaggcccctatggctagtagtgctaaaaggaaccatgctttcttgtaccatgataagagacatgctagaaatgcttataataattttgattcacatgcttatgattctcatgccat

SEQ ID NO: 4624 - DNA, 4080 bp, Zea mays
  unsure (1)..(4080): unsure at all n locations
  Clone ID: TF_ZmC4916_456
atggatcctaaagggaagggaatcgtgatcaacgacaaggaggagtccttcgtcaacgagccaagggaagacatgtccaacgactcgggctcgggccacatacgcaaagatgggaagaagaagaagacaagacgcatcaaggagatcgtctactacgacagcgatgagtctacttcctcccaaaaggacgacgaccacaacgaatacgagagaaagaaaccggtcaattcgaacttttcttttgattactctcgtattcctcaaagtactaatgctcatttattatctattccacttggtaaacctcctcattttgatggagaggactacggattttggagtcacaaaatgcgtagtcacttgttctctctccatcctagcatatgggagattgtagaaagtggaatgcactttgatagtacggatagtcccatgtttattaatgaacagattcataaaaatgcacaagctactactgtgttgctagcctctttgtgcagggacgagtaccataaggtgagcggcttggacaatgccaagcagatctgggacaccctcaagatctctcatgaggggaatgatgtcaccttgctcaccaagatggagttggtggagggcgagcttggacggttcgcaatgataaggggcgaggagccaactcaaacatacaactggctcaagacccttatcaacaaaataaggagctacggaagcacgcgatggacggatcacgacgtcgtccgtctaatgctaaggtcctttaccgttcttgatcctcatttggtgaacaatattcgtgaaaatcctaggtacaccaagatgtcgcctgaagaagttctggggaagttcgtaagcgggcgaatgatgatcaaggaggcaagatatgtggacgacgcgttgaacggtcctattcatgagcctcagcccactgctctcaaggcaacgaggagcaaggaggcgctaccgagcaaggtggcgcaagttgaggcggccgggctaaataatgaggagatggccctcatcattaagcgcttcaagacggcgcttaaaggtcgcaagggacagccaagcaagaccaagacaaaggagaagcgctcgtgcttcaaatgtggtaagattggtcatttcattgctaactgtcccgataatgaaagtgaccaggaaaaggggaacaaaagggagaagaagaagcattacaagaaggccaagggcgaggcacatatcggaaaggagtgggattcggattgctcctcctccgactccgacaatgaaggactcgccaccaccgccttcaacaagtcatccctcttccccaacgagcgtcacacttgcctcatggcaagggagaagaaagtaagcactcatgatactagtacttatgcttcttcaagtgaggatgagtctagtgatgatgatgagatagattactcatgcttattcaagggattagatagatctaaaattaataagattaatgagttgattgatgctttgaatgacaagaatagattactagaaaaacaagaggatcttttatatgaggagcatgataaatttgttagtgcacaaaattctcttgctctagaaattaaaaggaatgaaattctctctagtgaattatctacttgtcatgaatccatctctaaattaaaaagtgttaatgatgatttgaatgctaagttagaaatagctagtaaatcaacatcttgtgtagaaattgttgaaacttgcaataggtgtaaagattttgacattgatgcttgtagtgaacatctagttttaatttccaaacttaatgatgaattgtctagtcttaatgctcaacttaagactagcaagagcaattttgataagctaaaatttgcaagggatgcctacacaattggtagacacccctcaattaaggatggacttggctacaagaaggaagccaagaacttgacaagccataaggctcccatctccgccaaggagaaagggaaggccccctatggctattcttcttatgtgcatgatagaaatgttggtaggagaaatgttgttcataatatgcctaggagaaatgttgttaataggaaagtttatgcatccgggggttcaagctggattatcgacagcggatgcacaaaccatatgacaggggagaagaagatgttcacctcctacgtcaagaataaggattcccaagattcaattatattcggtgatgggaatcaaggcaaggataagtctgaaaaccaagggaccctcaagcgcttcctcaggagagctcaagatgagtttgagctcaaggtgaagaagataaggagcgacaacggatccgagttcaagaaccttcaagtggaggagttccttgaggaggaagggatcaagcacgagttctccgctccctacacaccacagcaaaatggtgtggtagagaggaagaacaggacgctaatcgatatggcgaggacgatgcttggagaattcaagacccccgagcgtttttggtcggaagccgtgaacacagcttgccacgccatcaacagggtctaccttcaccgcatcctcaagaagacgtcgtatgagctgctgaccggtaacaaacctaatgtatcgtattttcgtatttttgggagtaaatgctacattctagtgaagaagggtaggaattccaaatttgctcccaaagccgtagaagggtttttattaggttatgattcaaatacaaaggcgtatagggtcttcaacaaatcatcgggtttggttgaagtctctagcgacgttgtatttgatgagactaatggctctccaagagagcaagttgttgatcttgatgatgtagatgaagaagacgttccaacggccgcgatacacaccatggcgattggagatgtacggcctcaagaacatttggagcaagatcaaccatcttcctcaactatggtgcatcccccaacccaaggtgacgaacaggtacctcaagtggaggcgcatgatccagggggagcacaggatgttcaagttgaagaggaagaagcacctcaggcacctctaacccaagttcgagcgacgattcaaagggatcatcccgtcgaccagatattaggtgatattagcaagggagtaactactcgctcgagattagttaatttttgtgagcattactcttttgtctcttctattgagcctttcagggtagaagaggccttgctagatccggactgggtgttggccatgcaggaggaactcaacaacttcaagcgcaatgaagtttggacattggtgcctcgtcccaagcanaatgttgtgggaaccaagtgggtgttccgcaacaaacaggacgatcacggggtggtgacgaggaacaaggctcgacttgtggcaaaaggttatgcccaagtcgcaggtttggactttgaggagacttttgctcctgtggctaggctagagtcaatttgcatcttgctagcatatgccgctcaccattctttcaggttgtaccaaatggatgtgaagagcgctttcctcaacgggccgatcaaggaggaggtgtacgtggagcaaccccctggcttcgaggatgaacggtaccccgaccacgtgtgtaagctctctaaggcgctctatggacttaagcaagccccaagagcatggtatgaatgccttagagactttttaattgctaatgctttcaaggttgggaaagccgatccaactctttttactaagacttgcgatggtgatctttttgtgtgccaaatttatgtcgatgacataatatttggttctactaaccaaaagtcttgtgaagagtttagcagggtgatgacgcagaaattcgagatgtcgatgatgggcgagttgaactacttccttgggttccaagtgaagcaactcaaggacggcaccttcatctcccaaacgaagtacacgcaagatttgctaaagaggtttgggatgaaggacgctaagcccgcaaagacgccgatgggaaccgacggacacaccgacctcaacaaaggtgtagaccggatattatgcttagcgtatgcatgtgtgctaggtttcaatccgatcctaaggagtgccacttag

SEQ ID NO: 4625 - DNA, 5532 bp, Zea mays
  Clone ID: TF_ZmC4916_458
atggatcctaagggaaaggggatggtggtcgacaacaacgagaaggagtctatcttcaacgagccgaagaatgacaagtctaccgacttgggttcaagccacaagcgcaaagatgggaagaagaagaagacaaggcgcatcaaagagatcgtctactacgacagcgacgaatcctcttcttcccaaaaggacgacgaccacaacgactacgagcaaaggaaaccggttaattctaacttttcttttgactactctcgtattccgcaaagctcaaattcacatttgctttccattccactcggcaagcccccacactttgatggggaggactacggattttggagccacaaaatgcgtagtcacctattctctctccatcctagtatatgggagattgtagatagtggaatgcactttaatagttcggatagtcctatattcattaatgagcaaatccataagaatgcacaagctactactgttcttctagcttcattgtgcagggatgaatataacaaagtgagtggcttggataacgccaagcaaatctgggataccctcaagatctctcatgagggaaatgacgctaccttgctcaccaaaatggagttggtggagggagagcttggacggttcgcgatgataaggggcgaggagccaactcaaacatacaaccggctcaagacccttatcaacaaaataaggagctacggaagcacgcgatggacggaccacgacgtcgtccgactaatgctaaggtcctttaccgttcttgatcctcatttggtgaataatattcgtgagaatcccaggtacaccaaaatgtcgcctgaagaagtcttaggaaaattcgtcagcgggcgaatgatgatcaaggaagcaaggtacgtggacgacgccttaaatggaccgatcaacgagccgcaaccttttgctctcaaagcaacaagaagcaaggaggtgctacctagcaaggtggcacaaatcgaggcggccggacttaatgatgaggagatggctctcatcattaaacgcttcaagacggttctaaagggtcacaaggggcagccaagcaagaccaagacaaaagggaagcgctcatgcttcaagtgcggtaagattggtcattttatcgctaactgccccgataatgatagtgaccaggaacagggaaataagagggaaaagaagaagaattacaagaaggcaaagggcgaggcgcatctaggcaaggagtgggactcggattgctcctcttccgactccgacaatgaaggactcgccgccaccgccttcaacaaatcaaccctcttcccaaacgagcgtcacacatgccttatggcaagggagaagaaggtatgtactcgcaactctacctatgcttcttcaagtgaggacgaatcaagtgatgaggatgaagtagattattcatgtttgttcaagggcttagatagatctaagatagataaaattaatgaattaattgatgccttgaatgaaaagaatatacttttagaaaagcaagaggatttgttgtatgaagaacatgataagtttgtagaggctcaaaaatcccttgcattagaaattaaaaggaatgaaatgcttgcttgtgaattgtctacatgccatgattctatttctaaattaaagagcattaatgatgacttaaatgctaaactagtagaagcacataaatctaactcttgtgttgaacatgttgaaatttgcactaggtgtaaggatgttgacattaatgcttgtagtgaacacttagtttccatttcaaaattgaatgatgaattagctagtcttaatgcccaacttaagactagcaaaagtgattttgataaactaaaatttgctagggatgcctacatggttggtagacacccctcaattaaggatgggcttggcttcaagagggaagccaagaacttaacaagccataagactcccatctccaccaaggagaaagggaaggctcctatggctaatagtgttaagaagaaccatgctttcatgtactatgataggagatattctagaaatgcttttagaggtcatgatgtttttgattcacatgcttatgactcttatgctatgactgcttctagttctcatgttatgcatggtagaaatatgcttagaagaaatgttgttcatcaaatgcctataaagaatattactcatgctcctaggaaagtagtaaatgaactttctacaatttattgtgctttaaatgcttcctttgctatttgtagaaaggataagaaaattgttgctaggaagttaggggcaagatgcaagggagacaaaacttgcatttgggtccctaaagatatttgtgctaaccttgtaggacccaacatgagttgggtttatgcatccgggggttcaagctggattattgacagcggatgcacaaaccatatgacgggggagaagaagatgttcacctcctacgtcaagagtaaggattcccaagattcaattgtattcggtgatgggaatcaaggcaaggtaaaagggttagtagagtctcttggttataatttgctatctgttagtcaattatgcaacatggggtataactgtctatttacaaatgtagatgtgtctgtctttagaagaagtgatgattcactagcttttaagggtgtattagatggcaagctttacttagttgattttgcaaaagaagaggccggtctagatgcatgcttaatagctaagacttgcatgggctggttgtggcatcgccgcttagcacatgtggggatgaagaaccttcacaagcttctaaagggagaacacgtgataggattgactaatgtaaaattcgaaaaagatagaccttgtgcagcttgtcaggcaggtaaacaagtgggaggagcgcatcacagcaagaatgtgatgaccacttcaagacccctggagctgctgcatatggacctcttcggacccgtcgcctatctgagcataggagggagtaagtatggtctagttattgttgatgacttttcccgcttcacttgggtgttctttttgcaggataagtctgaaacccaagggaccctcaagcgcttcctcaggagagctcaaaatgagtttgaactcaaggtgaagaagataaggagcgacaacgggtccgagttcaagaaccttcaagtggaagagtttcttgaggaggaagggatcaagcacgagttctccgctccctacacaccacagcaaaatggtgtggtagagaggaagaacaggacactaatcgacatggcgaggacgatgcttggagaatttaagacccccgagcggttttggtcggaagccgtgaacacggcttgccacgccatcaacagggtctaccttcaccgactcctcaagaagacgtcgtatgaactactaaccggtaacaaacccaatgtatcttactttcgtgtatttgggagcaagtgctacattctagtgaagaaggttagaaattcaaaatttgctcccaaagctgtagaagggtttttgttaggttatgactcaaatacaaaggcgtatagagtcttcaacaaatcatcgggtttggttgaagtctctagtgatgttgtatttgatgagactaatggctctccaagagagcaagttgttgatcttgatgatgtagatgaagaagatgttccgacggccgctatacgaaccatggcgattggtgatgtgcgaccacaggaacaagaagagcaagatcaaccttcttcctcaactatggtgaatcccccaactcaagacgatgaacaggttcatcaacaggaagcgtgtgatcaagggggagcacaagatgatcatgtgatggaggaagaagcacaactggcacctccaacccaagttcgaacgatgattcaaagggatcatcccgttgaccaaattctgggtgacattagcaagggagtaactactcggtctcgattagttaatttttgtgaacattactcctttgtctcttccattgagcctttcagggtagaggaggccttgctggatccggactgggtgttggccatgcaggaggagctcaacaacttcaagcggaatgaagtttggacactggtgcctcgtcctaagcaaaatgttgtgggaaccaagtgggtgttccgcaacaaacaagacgagcacggagtggtgacgagaaacaaggctcgacttgtggcaaaaggttatgcccaagtcgcaggtttggatttcgaggagacttttgctcctgtggctaggctagaatcaattcgtatcttgctagcatatgccgctcatcattctttcaggttgtaccaaatggatgtgaagagcgctttcctcaacgggccaatcaaggaggaggtgtacgtggagcaaccccctggcttcgaggatgaacggtaccccgaccatgtgtgtaagctctctaaggcgctctatggacttaagcaagccccaagagcatggtatgaatgccttagagactttctaattgttaatgctttcaaggttgggaaagccgatccaactctctttacaaagacatgtgatggtgatttgtttgtgtgccaaatttatgtcgatgacataatatttggttctactaaccaaaagtcttgtgaagagtttagcagggtgatgacgcagaaattcgagatgtcgatgatgggcgagttgaactacttccttgggttccaagtgaagcaactcaaggacggcactttcatctcccaaacgaagtacacgcaagatctgctgaagcggtttgggatgaaggacgccaagcccgcaaagactccgatgggaaccgacggacacaccgacctcaacaaaggaggtaagtccgttgatcaaaaagcataccggtcaatgataggatcattactttacttatgtgctagtagaccggatattatgcttagtgtatgcatgtgtgctagatttcaatccgatcctaaggagtgtcacttagtggcggtgaagcgaattctgagatatttagttgctacgccttgccttgggctctggtatccaaaggggtctacttttgacttagttggatactcagattccgactatgctggatgtaaggtcgataggaagagcacatcggggacgtgccaattcttaggaaggtccctggtgtcatggaactctaagaaacaaacctctgttgccctatccaccgctgaggccgagtatgttgccgcaggacagtgttgcgcgcaactactttggatgaggcaaaccctcagggactttggctacaatctgagcaaagtcccactcctatgtgataatgagagtgctatccgcatggcggaaaatcctgttgagcacagccgcacaaagcacatagacatccggcatcactttttgagagaccaccagcaaaagggggatatcgaagtgtttcatgttagcaccgagaaccagctagccgatatctttaccaagcctctagatgagaagaccttttgcaggctgcgtagtgagctaaatgtcttagattcgcggaacttggattga

SEQ ID NO: 4626 - DNA, 5091 bp, Zea mays
  Clone ID: TF_ZmC4916_459
atggatcctaaggggaagggaatcgtgatcaacgataaggagaaggagtccttcgtcaatgagctcaaagatgacaagcctaccgactccggctcgggtcatagacgaaaggaagggaagaagaagaagacgaggcgcatcaaggagatcgtctactacgacgacagtgatgagtctacttcttcccaaaaggacgacgaccacaacgactacgagcaaaggaaaccggttaattctaacttttcctttgactactctcgtattccgcaaagctcaaattcacatttgctttccattccactcggcaagcccccacactttgatggggaggactacggattttggagccacaaaatgcgtagtcacctattttctctccatcctagtatatgggagattgtagatagtggaatgcactttaatagttcagatagtcctatattcattaatgagcaaatccataagaatgcacaagctactactgttcttctagcttcattgtgcagggatgaatataacaaagtgagtggcttggataacgccaagcaaatctgggataccctcaagatctctcatgagggaaatgacgctaccttgctcaccaaaatggagttggtagagggcgagcttggacggttcgcgatgataaggggcgaggagccaactcaaacatacaaccggctcaagacccttatcaacaaaataaggagctacggaagcacgcgatggacggaccacgacgtcgtccgactaatgctaaggtcctttaccgttctcgatcctcatttggtgaataatattcgtgagaatcccaggtacaccaaaatgtcgcccgaagaaattcttggaaaatttgtaagcgggcggatgatgatcaaggaggcaaggtacgtcgatgacgcgttgaacggtccaatccacgagcctcaacccattgctctcaaggcatcgagaagcaaggaggcactaccaagcaaggtggcgcaaattgaggcggccgggcttaatgatgaagaaatggctctcatcattaagcgcttcaagacggcgttaaggggtcgcaaggagcatcccaacaagaccaagacaaaggggaagcgctcatgcttcaagtgtggtaagattggtcactttattgctaattgtcccgataatgatagtgaccaggaaaagaagagtgggaaatgggaaaagaagaagaattacaagaagacaaagggcgaggctcatattggaaaggagtgggattcggattgctcctcatccgactccgacaacgaaggactcgccgccaccgccttcaacaaatcaaccctcttcccaaacgagcgtcacacatgccttatggcaaaggagaagaaggtatgtactcgcaactctacctatgcttcttcaagtgaggacgaatctagtgatgaggatgaagtagattattcatgtttgttcaagggcttagacagatctaagatagacaaaattaatgaattaattgatgccttgaatgaaaagaatatacttttagaaaagcaagaggatttgttgtatgaagaacatgataagtttgtagaggctcaaaaatcccttgcattagaaattaagaggaatgaaatgcttgcttgtgaagtgtcaacatgccatgattctatttctaacttaaaaagcataaacgatgatttaaatgctaaactagtagaagcaaataaatccaactcttgtgttaaacatgttgaaatttgcactaggtgtaaggatgttgatattaatgcttgtagtgaacacttagtttacatttcaaaattgagtgatgaagtggctagtcttaatgctcaacttaagactagcaaaagtgattttgaaaaactaaaatttgctagggatgcctacacggttggtagacacccctcaattaaggatggacttggcttcaagagggaagccaagaacttaacaagccataaggctcccattcccgccaaggagaaagggaaggcccctatggctactagtgctaaaaggaaccatgcctttttgtatcatgataaaagacaaactagaagttatgatgcttttgattcatatgtttatgattctcatgccatgtttgctcctagttcttcttatgtgtatgatagaaatgttactaggagaaatgttgttcctaaaagaaatgttgcaaatgttcatagaaaagtagtgaatgaaccctctacaatttattgtgctttgaatgcttcatttgcaatttgtagaaaggatagaaaagtaattgctaggaagttaggggcaaaatgcaaaggtgataaaacttgcatttgggtccctaaggaaattgtgactaaccttgtaggacccaacaagagttgggtttatgcatccgggggttcaagctggattatcgacagcggatgcacaaaccatatgacgggggagaagaaaatgttcacctcctacgtcaagaataaggattcccaagattcaattatattcggtgatgggaatcaaggcaaggtaaaaggtttagatgtgtctgtctttagaagaagtgatggttcactagcttttaagggtgtattagacggcaaactttatttagtagattttgcaaaagaagaggaaaagtccgaaacccaagggactctcaaacgcttcctcaggagagctcaaaatgagtttgagctcaaagtgaagaagataaggagcgacaacggatccgagttcaagaaccttcaagtggaggagttccttgaagaggaagggatcaagcacgagttctccgctccctacacaccacagcaaaatggtgtggtagagaggaagaacaggacgctcatcgatatggcgaggacgatgctaggagagttcaagacccccgagtgcttttggacggaagccgttaacactgcttgccacgccatcaacagggtctaccttcatcgcctcctcaagaagacgtcgtatgagctactaaccggtaacaaacccaatgtatcatactttcgtgtatttgggagtaaatgctacattctagtaaagaagggtagaaattctaagtttgctcccaaagctgtagaagggtttttgttaggttatgactcaaatacaaaggcgtatagagtcttcaacaaatcatcgggtttggttgaagtctctagcgacgttgtatttgatgagactaatggctctccaagagagcaagttgttgattgtgatgatgtagatgaagaagatgttccgacggccgctatacggaccatggcgattggagaagtacggccacaggaacaagataaacgagatcaaccttcttcctcaactatggtgcatcccccaaccaaagatgacgaacaggtacctcaagtggaggcgcttgatcaagggggagcacaagatgatcaagtgatggaggaagaagcgcaaccggcacctccaacccaagttcgagcgatgattcaaagggatcatcccgtcgatcaaattctgggtgacattagcaagggagtaactactcgatctcgattagttaatttttgtgagcattactcctttgtctcttctattgagcctttcagggtagaggaggccttgctagatccggattgggtattggccatgcaggaggagctcaacaacttcaagcgcaatgaagtttggacactggtgcctcgtccgaagcaaaatgttgtgggaaccaagtgggtgttccgcaacaaacaggacgagcacggggtggtgacgaggaacaaggctcgacttgtggcaaaaggttatgcccaagtcgcaggtttggactttgaggagactttcgctcctgtggctaggctagagtccattcgtatcttgctagcatatgccgctcaccattctttcaggttgtaccaaatggatgtgaagagcgctttcctcaacgggccaatcaaggaggaagtgtacgtggagcaaccccctggcttcgaggatgaacggtaccccgaccatgtgtgtaagctctctaaggcgctctatggacttaagcaagccccaagagcatggtatgaatgccttagagactttttacttgctaatgctttcaaggttgggaaggccgatccaactctttttacaaagacatgtgatggtgatttgtttgtgtgccaaatttatgtcgatgacataatatttggttctactaaccaaaagtcttgtgaagagtttagcagggtgatgacgcagaaattcgagatgtcgatgatgggcgagttgaactacttccttgggttccaagtgaagcaactcaaggacggcaccttcatctcccaaacgaagtacacgcaagatctgctaaagcggtttgggatgaaggacgccaagcccgcaaagactccgatggggaccgacggacacaccgacctcaacaaaggaggtaagtccgttgatcaaaaagcataccggtcaatgataggttctttgctttatttatgtgctagtagaccggatattatgcttagcgtatgcatgtgtgctagatttcaatccgatcctaaggagtgtcacttagtggcggtgaagcgaattcttagatatttggttgctacgccttgcttcgggctctggtatccaaaggggtctacctttgacttagttggatactcagactccgactatgctggatgtaaggtcgataggaagagtacatcggggacgtgccaattcttaggaaggtccctggtgtcatggaactctaagaaacaaacatccgttgccctatccaccgctgaggccgagtacgttgccgcaggtcagtgttgcgcgcaactactttggatgaggcaaaccctccgggactttggctacaatctgagcaaagtcccactcctatgtgacaatgagagtgctatccgcatggcggagaatcctgttgaacacagccgcacaaagcacatagacatccggcatcactttttgagagaccaccagcaaaagggagatctcgaagtgtttcatgttagcaccgagaaccagctagccgatatcttcactaagcctctagatgagaagaccttttgtaggttgcgtagtgagctaaatgtcatagattcgcggaacctggattga

SEQ ID NO: 4627 - DNA, 3584 bp, Zea mays
  Clone ID: TF_ZmC5924_1
ccagccttgagttgcagcggcccggggtgcggcgggccacctgaaaaaacccttgcgccgctgagctgagtccccttcccttctctcgtcgcctccgcctccgccttcagtttagcctccaagcaggggcgccgcgcggggtattctgtccgtcgttgaggatagagagtcacttgcaccgggggagcggagatgaagccggttgtggggatcgtggtgtcgaacaagatgcagaagtcggtggtggttgcagtggaccgcctcttccacaacaaggtatacaaccgctacgtcaagcgcacctccaagttcatggcacacgacgatgacaacacctgcaacattggcgaccgggttaggctggatccttctaggcccttgagcagacacaagcactgggttgttgctgaaattctccgcagagctaaggtgtacgttccaccagctgcaacagcgtccagtgaacgtggtagcaaatctcaacaagctggtggtgctaccaaatgatccatctgaagttactcagaacaagatgcagtcacggcttgtttttctttcgctgtatgtttgtttccttgtggaatgtggttgccatgtttagcatgggagaaaaaatagcaagcagccagcatctttgcttaattactgttgttcttctgtggtgtccttcgtttaacggtactagccattaaggatgtagttaccagattcaacaagaccaatggattcatattgtattggttcacttccgatacccgcttgcatttgcatgtatggttggcagctgtctttgcaactcccctctgacactgaattgagcgggtcggaaaacatgagtgcatagtacatgtcaaactgatccagggggagtcgtgactagctgaaaaaggtctatctttgtcgaaagatacatttgttagacctaacacatgttccccctttagaagcttatgaaggttcttcatcccaacatgtgctagacggcgatgccacagccagcccatgctagtcttagcaattaagcatgcatctagaccggcctcttccttcgaaaaatcaactaaataaagtttgtcgtctagtacacccttaaaagctaatgaaccatcacaccttctaaagatggacacatctacattggtaaataaacaattgtaacccatattacagagttgactaacggacaacaagttatacccaagcgattcaactaaaaacacattagagatggaatgctcggatgaaatagctatttttcctagtcctttaaccttgccttgattcccgtcaccgaatatgattgaatcttgggaatctttgttcttgacgtaggaggtgaacatcttcttctcccccgtcatgtggtttgtgcatccgctgtcgataatccagcttgagcccccagatgcataaacccaactcttgttgggtcctgcaaggttagtaacaatagccttagggacccaaatgcaagtcttgtctcccttgcatttggcccccacctttttagcaatcactttttcatttatgcatgagagaacaaatttagcattgcaagcatgaaagacagtggtagatccattacacactttactaggagcgtgagacacaaagtttctcctacgatgaataatatttttcttaggcatatctctatcgtgcacaaaggaagaacttgaagcaatcatggcatgtgagtcaaaaacattataactcctattataatgagaatttctagaatatttcctatcatggtacatgaaagcatggttcttttgactattactagtcataggagccttccctttttccttgttgaaaatgggagccccttgacttgttaagttcttggcttccctcttaaagccaagcccatccttaattgaggggtgtctaccaatagtgtaggcatcccttgcaaattttagtttatcaaagtcattcttgctagtcttaagttgggcattaagactagccacttcaccatttaattttgcaatagaagtaagatgctcaacacatgcatcaacattaaattccttacacctattacaaattactacatgttcaatacatgagctagatttatttgctacttctaacttagcatttaagtcatcattgacactctttagactagaaatagactcatgacaagtagataattcacatgaaagcatttcatttcttttgacttctaaagcaagagacttttgcacacttacaaatttatcatgctcttcatataaaagatcctcttgcttctctagcaatctatttttctcattcaaggcatcaattaattcattgatcttatcaattttagttctatctaaacctttgaataaactagcatagtctacttcatcatcactagactcatcatcacttgaagaagcatacgtaatagtacttctagtatttaccttcttctcctttgccatgaggcatgtgtgatgctcgttggggaagagagccgacttgttgaaggccgaggcggcgagtccttcgttgtcggagtcggacgaggagcaatccgagtcccactcctttccaaggtgtgcctcgcccttcacctttttgtaggccttcttcttttcccacttcctgctctttccttgttcttggtcactatcattatcgggacagttagcaatgaagtgaccaatcttaccacacttgaagcaggagcgctttcccttcgtcttgctcttgttgggatgctctttgcgacctttgagcgccgtcttgaagcgcttgatgatgagggccatttcatcctcatttagcctggccgcctcgacttgcgccactttgctaggtagcgcctcactgctacttgttgctttgagagcaacagtttgaggctcgtggattgggccattcaacgcctcatcaacatatcttgcctccttgatcatcattcgcccacttacaaactttccgagtatttcctcgggcgtcattttggtgtacctaggattctcatgaatagagttaacaagatgaggatcaaggatagtgaaggaccttagcataagccgaacgacgtcatggtccgtccatctcgtgcttccgtagcttcttattttgttgaccagggtcttgagcctattgtacgtttgggttggctcctcccccctgatcattgcgaaccttcctagttcgccttccaccaactccattttggtgagcatagtgacgtcgttcccctcatgcgagatcttgagggtgtcccaaatctgcttggcgttgtccaagccgctcaccttatgatattcatccctgcacaatgatgcaagaggaatggaaagcaaatgagcattggaagtttgcgaaatacgagaataatcaaaagaaaagtttgagttgaccgttttctttttctcgtcgtcgtcgtctctttgggaagaagaggactcgtcgctgtcgtagtagactatcttcttgatgcgcctcttcttcttcccatccttcttcttgtgacttgagcccgagtcagtgggcttgtcgtcttttggctcattgatgaaggactccttctccttgtcattgatcaccatcccctttcccttaggatccat

SEQ ID NO: 4628 - DNA, 718 bp, Zea mays
  Clone ID: TF_ZmC5924_19
taatacaagagatctcttgcttttctaataacctattcttaccattcaaggcatcaattaattcattaattttatcaatattggttctatctaggcccttgaataaacatgaatagtctatttcatcatcgctagattcttcatcacttgaggaagtgtaagtactagtatcacgagtgcttaccttcttttcccttgccatgagacaagtgtgatgctcgtttgggaagagggccgacttgttgaaggcggtggcggcgagtccttagttgtcggagtcggacgacgaacaatccgagtcccactcctttccaaggtgtgcctcgcccttagccttcttgtaagccttcttctttttcctcttgttcccttgttcctggtcactatcattatcgggacaattagcgataaaatgaccaatcttaccacatttgaagcatgaacgcttcccctttgtcttggtcttgttgggatgctccttgcgaccccttagcgctgtcttgaaacgcttaatgatgagggccatctcttcctcattgagtcccgctgcctcaacttgtgccaccttgctaggtagcatttccttgctcctcgttgctttgagagcaacggtttgaggctcgtggattgggccgttcaacgcatcgtcaacacatcttgcctccttgatcatcatccgcccgcttacaaactttccaagtatctcctcgggcgtcat

SEQ ID NO: 4629 - DNA, 1678 bp, Zea mays
  Clone ID: TF_ZmC5924_5
ccccttcctttctcctttcgcctccgcctccgactacggcttcagtttagcctccaagcaggggcgcggcgcggggtattctgtccgtcgttgagggtagagagtcacttgcaccgggggagcggagatgaagccggttgtggggatcgtggtgtcgaacaagatgcagaagtcggtggtggttgcagtggaccgcctctttcacaacaaggtatacaaccgctatgtcaagcgcacctccaagttcatggcacacgacgatgacgacttctgcaacattggcgaccgggttaggcttgatccttttaggcccttgagcagacataagcactggggttgttgcttgaattctccgcagagctaaggtgtacgttccaccagctgcaacagcgttcagtgaacgtggtagcaaatttcaacagctggtgttggtaccaatgatccttcacatccatttgaaacaacctgcgacttgggcataaccttttgccacaagtctagccttgttccttgtcaccaccccatgctcgtcctgtttgttgcggaacacccacttggttcccacaacgttttgcttgggacgaggcaccagtgtccaaacttcatttcgcttgaagttattgagctcttccacaccgttttgttgtggtgtgtagggagcggagaactcgtgcttgactccttcctcctcaagatactcttccacttgaaggttcttgaactcggacccgttgtcgctccttatcttcttcaccttgagctcaaattcattttgagctctccttaggaagcgcttgagggtaccttgggtttcagacttatccttgccttgattcccgtcaccgaatatgattgaatcttgggaatctttgttcttggcgtaggaggtgaacatcttcttctcccccgtcatgtggtttgtgcatccgctgtcgataatccagcttgagcccccggatgcataaaccttcttctcctttgccatgaggcaggtgtgatgctcgttggggaagagagacgatttgttgaaggccgtggcggcgagttcttcgtcatcggagtcggacgaagaacaatccgagtcccactcttttccaatgtgtgcctcgcccttagccttcttgtaaaccttcttgttctctctcttcccattctttacttgttcctggtcactatcattatcgggacagttagcaataaagtgaccaatcttaccacacttgaagcaggagcgctttcccttcgtcttgctcttgttgggatgctccttgcaacctttgagcgtcgtcttgaagcgcttgatgatgagggccatttcatcctcatttagcccggccgcctcaacttgtgccaccttgctaggtagcgcctccctgctacttgttgctttgagagcaacagtttgaggctcgtgaatcgacattgggccattcaacgcctcatcaacatatcttgcctccttgatcatcattcgcccgcttacaaactttccgagtatttcctcgggcgtcatcttggtgtaccttagcataagtcggacgacgtcgtggtccgtccatctcgtgcttccatagctcctgattttgttgaccagggtcttgagcctgttgtacgtttgagttggctcctcccccctgatcattgcgaaccttcctagttcgccttccaccaactccat

SEQ ID NO: 4630 - DNA, 1259 bp, Zea mays
  Clone ID: TF_ZmC951_381
atggatcctaaggggaagggaattgtgatcaacgacaaggaaaaggagtccttcgtcaacgagccaaaagatgataaatccaacgactctggctcgggccacagacgtaaagatgggaagaagaagaagacaaggcgcatcaaggagatcgtctactacgacagcgacgaatcctcttcttcccaaaaggacgacgacaacgactacaggaagacgacggtgctaagaggtcacaaggggcagccaagcaagaccaagacaaaggggaagcgctcatgcttcaagtgcggtaagattggtcattttatcgctaactgccccgataacgatagtgaccaggaaaaggggaacaagagggaaaagaagaagcattacaagaaggcaaagggcgaggcacatctaggcaaggagtgggactcggattgctcctcttccgactccgacaatgaaggactcgccgccaccgccttcaacaaatcaaccctcttccccaacgagcgtcacacatgccttatggcaagggagaagaagagtaagtctgacaggcagtcaggtcttgccaaaggcgccacagcgaactccgctccgcccgaccccagggctcggactcgggctaagacccggaagacggcgaactccgctccgcccgaccccagggctcggactcgggctaagacccggaagacggcgaactccgctccgcccgaccccagggctcggactcgggctaagacccggaagacggcgaactccgctccgcccgaccccagggctcggactcgggctaagacccggaagacggcgaactccgctccgcccgaccccagggctcggactcgggctaagacccggaagacggcgaactccgctccgcccgaccccagggctcggactcgggctaagacccggaagacggcgaactccgctccgcccggccccagggctcggactcgggctaagacccggaagacgacgaaactccgcctcgcccgaccccagggctcggactccgccctggcctcggccgaacgacttccgactcgcccgaccccagggctcggactccgccctggcctcggccgaacgacttccgcctcgcccgaccccttggctcgggctcggccacggcaacagaaggcagactcaacctcggcttcggaggaaaccccacgtcgccggaagcaggacaacgtcagcagggactcgaccgctccaacagctgtccctccatcaggctccgccgcacctccgacagccat

SEQ ID NO: 4631 - DNA, 3345 bp, Zea mays
  Clone ID: TF_ZM3613.C2.o2.fg
atggatcctaagggaaagaggatggtgatcaacgacaaggagaaggagtgcttcatcaatgagccaaaagacgacaagcccactgactcgggctcaagtcacaagaagaaggatgggaagaagaagaggcgcatcaagaagatagtctactacgacagcgacgagtcctcttcttcccaaagagacgacgacgacgagaaaaagaaaacggacaccctcaagatctcacatgaggggaacgacgccaccatgatcaccaagatggagttggtagaatgcgaactaggaagattcgcaatgatcaggggggaggagccaactcaaacgtacaacaggctcaagaccctggtcaacaaaatcaggagctatggaagcacgagatggacggaccacgacgtcgtccggcttatgctaaggtccttcactgtccttgatcctcatcttgtaaactctattcgtgaaaatcctaggtacaccaagatgatgctcgaggaaatactcggaaagtttgtaagcgggcgaatgatgatcaaggagacaagatatgttgatgaggcgttgaatggcccaatgccgatccacgagcctcaaaccgttgctctcaaagaaacaagcagcagggaggggctacctagcaaggcggcgcaagttgaggcggccgggctaaatgaggatgaaatggccctcatcatcaagcgcttcaagacggcgctcaaaggtcgcaaggagcatcccaacaagagcaatacaaagggaaagcgctcctgcttcaagtgtggtaagattggtcactttattgctaactgtcccgataatgatagtgaccaggaacaaggaaagaatgggaagagagagaacaagaagatttacaagaaggctaagggcgaagcacaccttggaaaagaatgggactcggattgttcttcgtccgactccgacgacgaaggactcgccgccacggccttcaacaaatcgtctctcttccccaacgagcatcacacctgcctcatggcaaaggagaagaaggtaagcactcaaaatactattgcatatgcttcttcaagtgatgatgaatctagtgatgatgaagtagactacgcaagtttattcaaaggcttagatagaactaaaattgataagatcaatgaattaattgatgcgttgaatgagaagaatagattgctagaaaagcaagaggatcttttatatgaagagcatgataaatttgtaagtgtgcaaaagtctcttgctttagaagttaaaagaaatgaaatgctttcatgtgaattatctacttgtcatgagtctatttctagtctaaagagtgtcaatgatgacttaaatgctaagttagaagtagcaaataaatctagctcatgtattgaacatgtagtaatctgtaataggtgtaaggattttaatgttgatgcatgtgttgagcaccttacttctattgcaaaattaaatggtgaagtggctagtcttaatgcccaacttaacactagcaagaataactttgataaactaaaatttgcaaggggtgcctacactattggtagacacccctcaattaaggatgggcttggctttaaaagggaagccaagaacttaacaagccaaagagctcccattttcaacaaggaaaagggaaaggctcctatggctaatagtagtcaaaagaatcatgcatttatttatgatagaaaattttctagaaatgcttatcataataggagttgtaatgcttatgattcacatgccatgattgcttcaagttcttccgttgtgcatgatgtgtccgtctttagaaggtgtgatggtttgttagcttttaagggtgtactagacggcaaactctatttagttgatttttcgaaggaggaggccggtctaaatgcatgcttaatcgctaagactagcatgggctgtttgtggcatcgccgtctagcacatgttggaatgaagaaccttcataaacttctaaagggggaacatgtgttaggtctaacaaatgtaactttcgaaaaagatagaccttgtgcagcttgtcaagcaggtaaacaggtgggaagctctcatcatagcaaaaatgtgatgaccacatcaagacctttagagctacttcacatggacctcttcggccctgtcgcctacctcagcatcgggggaagtaagtatggtcttgttattgttgatgatttttcctgcttcacttgggtattctttttgcaggataaaacagaaacccaagggaccctaaagtgcttcctaaggagagctcaaaacgaatttgagctcaaggtgaaaaagataaggagcgacaatgggtccgagttcaagaatcttcaagtggaggagtaccttgaggaggaaggaatcaagcacgagttctccgctccctacacaccacaacaaaacggtgtggtagagaggaagaacaggacgctcatagacatggcaaggacgatgcttggagagttcaagacgcccgagcgattttggtcggaagccgtgaacacggcttgccacgccataaaccgagtctaccttcatcgcctcctcaagaagacgtcgtacgaactcctaaccggtaacaaacccaacgtttcatatttttgtgtatttgggagtaaatgctacattctagtgaagaaaggtaggaattccaaatttgctcccaaagctgtagaagggtttttgttaggttatgactcaaatacaaaggcgtatagagtcttcaacaaatcatcgggtttggttgaattctctagcgatgttgtatttgatgagactaatggctctccaagagagcaagttgatcttgatgatgtagatgaagaatatgttccaacggccgcaatacgcaccatggcgatcggagatgtgcgaccacaggaacaaaaggagcaagatcaaccttattcctcaacaatggtgcaccccccaactcaaactgatgatcaggttcaagaagaggcgtgtgatcaagggggagcacaagatgatcatgtaatggaggaagaagcacctcaggcccctccaactcaagtccgagaaacgattcaaaggaatcatcccgtcgaccagatcttgggtgatataagcaagggagtaactactcgctctagattagctaatttttgtgagcattactcgtttatctcttctattgagcctttcagggtagaagaggccttggtagatccggactgggtgttggccatgcaggaagagctcaacagcttcaagcgaaatgaggtttggaccctgggtgttggccatgcaggaagagctcaaccacttgatttcattgtgctaacacttaatcaagttttgtggctttaa

SEQ ID NO: 4632 - DNA, 1932 bp, Zea mays
  Clone ID: TF_ZM3613.C7.o2.fg
atggatcctaaggggaagggaatcgtgatcaacgataaggagaaggagtccttcgtcaacgagcccaaagatgacaagcctaccgactccggctcgggccatagacggaaggaagggaagaagaagaagacaaggcgcatcaaggagatcgtctactacgacgacagcgacgaatcttcctcttcccaaaaggacaacgacgacaacgactacaggaagacggtcaattcgaacttttcatttgattattctcgtattccacatagttcgaattcgcatttgctttccattcctcttggcaaacctccacactttgatggggaggactacggattttggagtcacaaaatgcgtagtcatttattctctctccatccaagcatatgggagattgtagagaatggaatgaaatttgatagctcggatagccctatgtttattaatgaacagattcataaaaatgcacaagctactactgtgttgctagcctctttgtgcagggacgagtacaacaaggtgagcggcttggacaacgccaagcagatctgggacaccctcaagatttctcatgagggaaatgacgttaccttgcttaccaaaacggagttggtggagggcgagcttggacggttcgcgatgataaggggcgaggagccaactcaaacatacaaccggctcaagacccttattaacaaaataaggagctacggaagcacgcgatggacggaccacgacgtcgtccgactaatgctaaggtcctttaccgttcttgatcctcatttggtgaataatattcgtgagaatcccaggtacaccaaaatgtcgcccgaagaagtcctaggaaaattcgtcagcgggcgaatgatgattaaggaagcaaggtacgtggacgatgccttgaatggaccgatcaacgagccgcaacctcttgctctcaaagcaacaagaagcaaggaggcgctacctagcaaggtggcacaaattgaggcggccggacttaatgatgaagagatggctctcatcatcaaacgcttcaagacggtgctgaagggtcacaaggggcagccaagcaagaccaagacaaaggggaagcgctcatgcttcaagtgcggtaagattggtcattttatcgctaactgccccgataatgatagtgaccaggaacagggaaacaagagggaaaaaaagaagaattacaagaaggcaaagggcgaggcacatattggaaaggagtgggattcagattgctcctcgtccgactccgacaacgaaggactcgccgccaccgccttcaacaagtcatccctcttcccaaacgagcatcacacttgccttatggcaagggaaaagaaggtaatcactcgtaacgctagtacttatgattcttctagtgatgagtctagtgatgatgatgacatagactactctagcttgttcaagggtttggatagaactaaaatagataaaattaatgagttgattgatgccttgaatgagaaggatagactcttagagaaacaagaggatttgttgtatgaagaacatgataaatttgtagaggcacaaaaatcctatgctttagaagttaaaagaaatgaaatgctttcttttgaactatctacttgtcatgaaaccatttctactttgaaaggtgtcaacaatgatttaaatgctaaattagaagtagcaaataaatccaattcttgtgtagaacatgttgaaatttgtactaggtgtaaagattttgacattgatgcttgtagtgaacacctagtttcaatttccaagcttaatgatgaattggctagtcttaatgctcaacttaagactagcaagaatgatttcgataaactaaaatttgcaagggatgcctacacaattggtagacacccctcaattaaggatggacttggcttcaagagaggaagctaa

SEQ ID NO: 4633 - DNA, 2122 bp, Zea mays
  Clone ID: TF_ZM3615.C2.o1.fg
atggatcctaaagggaagggaatcgtgatcaacgacaaggagaaggagtccttcgtcaacgagccaagggatgacaagtccaacgactcgggctcgggccacagacgcaaagatgggaagaagaagaagacaagacacatcaaggagatcgactactacgacagcgatgagtctacttcctcccaaaaggacgacgaccacaacgactacgagaaaaagaaaccgatcaattcgaacttttcttttgactactctcgtattccgcatagttcaagttcacatttgctctccattccactcggcaagcccccacactttgatggagaagactacgaattttggagccacaaaatgcgtagtcacctattctctctccatcctagtatatgggagattgtagaaagtggaatgcactttgatagttcggatagtcccatgttcattaatgagcaaatacataagaatgcacaagctactactgttcttctagcttctttgtgcagggatgaatacaacaaagtgagcggcttggataacgccaagcaaatatgggacaccctcaagatctctcatgaggggaacgacgtcaccttgctcaccaagatggagttggtggagggcgagcttggacggttcgcaatgataaggggcgaggagccaactcaaacatacaaccggctcaagacccttatcaacaaaataaggagctatggaagcacgcgatggacggaccacgacgtcgtccgactgatgctaaggtcctttaccgttcttgatcctcatttggtgaataatattcgtgagaatcccaggtacaccaaaatgtcgcccgaagaagtccttggaaaattcgtaagtgggcgaatgatgatcaaggaggcaaggtacgtggacgacgccttgaatggatcgatcaacgagccgcaacctcttgctctcaaagcaacaagaagcaaggaggcgctacctaacaaggtggcacaaattgaggcggccggacttaatgatgaagagatggctctcatcatcaagagattcaagacggcgctcaaaggtcgcaagggacagccaagcaagaccaaagccaaagggaagcgctcatgcttcaaatgcggtaagattggtcattttattgctaactgtcccgataatgaaagtgaccaggaactcgagagcaagagggaaaagaagaaacattacaagaaggccaagggcgaggcacatatcggaaaggagtgggattcggattgctcctcctccgactccgacaatgaaggactcgccgccaccgccttcaacaagtcgtccctcttccccaacgagcatcacacatgcctcatggcaaaggagaagaaggtatgtactcgagaaagtaccacttactcttctagtgatgatgattctagtgatgacaatgaaatagactattctagtttatttaaaggtcttgatagaattaaaattggcaaaattaatgagttaattgatgccttgaatgaaaaggataggcttttagaaaagcaagaggatttgttatatgatgaacatgataaatttgtagaagcacaaaaatctcatgctttagaagttaaaagaaacgaaatgctttcttgtgaattatcttcttgccatgagacaatttctagcttaaggagcattaatgatgacttgaatgctaagattgctagtaaatctaactcttgcgtagagaatgttataacttgcactaggtgtaaagatattaacattgatgcttatagtgaacacctagcttgcatttctaaattaaatgaagaggtggctagtcttaatacccaacttgagactagcaaaagtgattttgataaactaaaatttgctagggatgcctacacggttggtagacacccctcaattaaggatgaacttggcttcaagagggaagccaagaacttaacaagccataaggctcccatctccgccaaggagaaagggaaggcccctatggctaaaagtactaaaaggaaccatgcttttatgtatcatgataggagacaaactagaaatgcttataggagttataatgcttatgatgactttaactctcatgccatggttgcttctagttcttcctatatgcatg

SEQ ID NO: 4634 - DNA, 4983 bp, Zea mays
  Clone ID: TF_ZM3619.C10.o1.fg
atggatcctaaggggaagggaatcgtgatcaacgacaaagagaaggaatctttcgtcaacgagccaaaagacgacaagcctaccgactccggctcggggcatagacggaaggaagggaagaagaagaagacaaggcgcatcaaggagatcatctactacgacgatagtgatgagtctacttcttcccaaaaggatgatgacaacgactacaaaaagacggtcaattcgaacttttcatttgattattctcgtattcaacatagttcgaattcgcatttgctttccattcctcttggcaaacctccacacttcgatggggaggactacggattttggagtcacaaaatgcgtagtcatttattctctctccatccaagcatatgggagattgtagagaatggaatgaaatttgatagctcggatagccctatgtttatcaatgaacaaattcataaaaatgcacaagctactactgttctcttagcatctttgtgcagggaagaatacaataaagtgagcggcttggacaatgccaagcagatatgggacaccctcaagatctctcacgaggggaacgacatcaccatgctcaccaagatggagttggtggagggcgagcttggacgattcgccatgataaggggagaagagccaactcaaacttacaaccggctcaagacccttatcaacaagataaggagctacggaagcacgcgttggacggatcacgacgtcgtccgcctaatgctcaggtcatttaccgttcttgatcctcatctcgtgaacaatattcgtgagaatcccaggtacacgatgatgacgcccgaagaagtacttggaaaattcgtgagcgggcggatgatgatcaaggaagcaagatacgtcgacgacgcgttgaacggtccactccacgagtctcaacccattgctctaaaggcaacaaggagcaaggagtcgctacctagcaaggtggcgcaagttgaggcggccgggctcaatgatgaagaaatggctcttatcattaaacgcttcaagacagtactaaaaggtcacaaggggcagccaagcaagaccaagacaaaggggaagcgctcatgcttcaagtgcggtaagattggtcattttatcgctaactgccccgataatgatagtgaccaggaacagggaaacaagagggaaaagaagaagaattacaagaaggcaaagggcgaggcgcatctaggcaaggagtgggactcggactgctcctcgtccgactccgacaacgaaggactcgccgctaccgccttcaacaagtcatccctcttcccaaacgagcatcacacttgccttatggcaagggaaaagaaggtaatcactcgtaacgctagtactaatgattcttctagtgatgagtcgagtgatgatgatgacatagactattctagtttgttcaagggattggatagaaataaaattgataaaatcaatgaattgattgatgcattaaatgagaaggataaactcttagagaaacaagaggatttattatatgaagagcatgataaatttgtagaagctcaacgatctcatgctctagaagttaaaagaaatgaaatgctttcttgtgaactatcttcttgccatgagacaatttctaaattaaagagcattaatgatgacttaaatgctaaactagtagaagcaaatagatccaactcttgtgtggaacatgttgaaatttgcactaggtgtaaggatgttgatattaatgcgtgcagtgaacacttagtctccatttcaaaattgaatgatgaattagctagtcttaatacccaacttaagactagcaaaagtgaatttgaaaaactaaaatttgcaagggatgcctacactattggtagacacccctcaattaaggatgggcttggcttcaaaagggaagccaagaacttaacaagccataagactcccatctccaccaaggagaaaggaaaggctcctatggctaatagtgttaagaagaatcatgctttcatgtattatgataggagatattctagaaatacttttagaggtcatgatgtttttgattcacatgcttatgactcttatgctatgactgcttctagttctcatgttatgcatggtagaaatgtgcttagaagaaatgttgttcatcaaatgcctaggagaaatgttgttaggaaagtagtgaatgaaccttctacaatttattgtgctttaaatgcttcttttgccatttgtagaaaggataagaaaattgttgctaggaagttaggggcaaaatgcaagggagacaaaacttgcatttgggtccctaagaatatttgtgctaaccttgcaggacccaacatgagttgggtttatgcatccgggggttcaagctggattattgacagcggatgcacaaaccatatgacgggggagaagaaaatgttcacctcctacgtcaagaataaggattcccaagattcaatcatattcggtgatgggaatcaaggcaaggataagtctgaaacccaagggaccctcaagcgcttccttaggagagctcaaaatgagtttgagctcaaggtgaagaagataagaagcgacaacgggtccgagttcaagaaccttcaagtggaggagttccttgaggaggaagggatcaagcatgagttctccgctccctacacaccacagcaaaatggcgtggtaaagaggaagaacaggacgctcatcgacatggcgaggacgatgctaggagagttcaagacccccgagtgcttttggacggaagccgtgaacacggcttgccacgccatcaacatggtctaccttcatcgcctcctcaagaagacttcgtatgagcttctaaccggtaacaaacccaatgtatcttactttcgtgtatttgggagcaagtgctacattctattgaagaaaggtagaaattctaagtttgctcccaaagctgtagaagggtttttgttaggttatgactcaaatacaaaggcgtatagagtcttcaacaaatcatcgggtttggttgaagtctctagcgacgttgtatttgatgagactaatggctctccaagagagcaagttattgattgtgatgtagatgaagaagatgttccgacgaccgctatacgaaccatggcgattggagacgttcggccacaggaacaatatgaacgagatcaaccttcttcctcaactaaggtgcatcccccaactcaagacgatgaacaggttcatcaacaggaggcgtgtgatcaaggaggagcacaagttgataatgtgatggaggaagaagcgcaaccagcacctccaacccaagttcgagcgatgattcaaagggatcatcccgtcgaccaaattctgggtgacattagcaagggagtaactactcgatctcgattagttaatttttgtgagcattactcctttgtctcttctattgagcctttcagggtagaggaggccttgctagatccggactgggtgttggccatgcaggaggagctcaacaacttcaagcgcaatgaagtttggacactggtgcctcgtccgaagcaaaatgttgtgggaaccaagtgggtgtttcgcaacaaacaggacgagcacggggtggtgacgaggaacaaggctcgacttgtggcaaaaggttatgcccaagtcgcaggtttggactttgaggagacgtttgctcctgtggctaggctagaatcaattcgtatcttgctagcatatgccgctcaccattctttcaggttgtaccaaatggatgtgaagagcgctttcctcaacgggcctataaaggaggaggtgtacgtagagcaaccccctggcttcgaggatgaacggtaccccgaccacgtgtgtaagctctctaaggcgctctatggacttaagcaagccccaagagcatggtatgaatgccttagagatttcttgattgctaatgctttcaaggttgggaaagccgatccaactcttttcactaagacatgtgatggtgatttgtttgtgtgccaaatttatgtcgatgacataatatttggttctactaaccaaaagtcttgtgaagagtttagcagggtgatgacgcaaaaattcgagatgtcgatgatgggcgagttgaattacttccttgggttccaagtgaagcaactcaaggacggcaccttcatctcccaaacgaagtatacgcaagatctgctaaagcggtttgggatgaaggacgccaagcccgcaaagactcctatgggaaccgacggacacaccgacctcaacaaaggaggtaagtccgttgatcaaaaagcataccggtcaatgatagggtcattactttacttatgtgctagtagaccggatattatgcttagcgtgtgcatgtgtgctagatttcaatccgatcctaaggaatgtcacttagtggcggtgaagcgaatccttagatatttagttgctacgccttgcttcgggctctggtatccaaaggggtctacctttgacttggttggatactcagattccgactatgctggatgtaaggtcgataggaagagtacatcggggacgtgccaattcttaggaaggtccctggtgtcatggaattctaagaaacaaacttccgttgccctatccaccgctgaggccgagtatgttgccgcaggacagtgttgcgcgcaactactttggatgaggcaaaccctccgggactttggctacaatctgagcaaagtcccactcctatgtgataatgagagtgctatccgcatggcggagaatcctgttgagcacagccgcacaaagcacatagacatccggcatcactttttgagagaccaccagcaaaagggagatatcgaagtgtttcatgttagcaccgagaaccagctagccgatatcttcactaagcccctagatgagaagaccttttgcaggttgcgtagtgagctaaatgtcttagattcgcggaacctggattga

SEQ ID NO: 4635 - DNA, 1569 bp, Zea mays
  Clone ID: TF_ZM3639.C3.o2.fg
atggattctaaagggaagggaatcgtgatcaacgacaaggagaaggagtccttcgtcaacgagccaagggatgacaagtccaacgactcgggctcgggccacagacgcaaagatgggaagaagaagaagacaagacgcatcaaggagatcgtctactacgacagcgatgagtctacttcctcccaaaaggacgacgaccacaacgaatacgagagaaagaaaccggtcaattcgaacttttcttttgattactctcgtattcctcaaagtactaatgctcatttattatctattccacttggtaaacctcctcattttgatggagaggactacggattttggagtcacaaaatgcgtagtcacttgttctctctccatcctagcatatgggagattgtagaaaatggaatgcactttgatagcacggatagtcccatgtttattaatgaacagattcataaaaatgcacaagctactactgtgttgctagcctctttgtgcagggacgagtaccataaggtgagcggcttggacaatgccaagcaaatctgggacaccctcaagatctctcatgaggggaacgatgtcaccttactcaccaagatggagttggtggagggcgagcttggacggttcgcaatgataaggggcgaggagccaactcaaacatacaaccggctcaagacccttatcaacaaaataaggagctacggaagcacgcgatggacggatcacgacatcgtccgcctaatgctaaggtcctttactgttcttgatcctcatttggtgaacaatattcgtgaaaatcctaggtacaccaagatgtcgcccgaagaagtacttgggaaattcgttagcgggcgaatgatgatcaaggaggcaagatacgtggacgacgccttgaatggtccgatcaacgagccgcaaccccttgctctcaaggcaacgaggagcaaggaggcgctaccgagcaaggtggcgcaagttgaggcggcagggctaaataatgaggagatggccctcatcattaagcgcttcaagacggcgcttaaaggacgcaagggacagccaagcaagaccaaagccaaggggaagcgctcgtgcttcaaatgcggtaagattggtcattttattgctaactgtcccgacaatgatagtgaccaggaacacgggagcaagaaagaaaggaagaagcattacaagaaggccaagggcgaggcacatatcggaaaggagtgggattcggattgctcctcctctgactccgacaatgaaggactcgccgccactgccttcaacaagtcatccttcttccccaacgaacgtcacacatgccttatggcaagggagaagaaggtaagtaatcaaaacaatgtcacttatgattcttctagtgatgatgagtctagtgatgaagaaatagattactctagtttgttcaagggaatggatagaactaaagtagataagattaatgaattgattgatgccttgaatgaaaaggatagactcttagaaaaacaagaggatcttttatatgaagagcatgacaaatttgtagaggcttaa

SEQ ID NO: 4636 - DNA, 1905 bp, Zea mays
  Clone ID: TF_ZM3639.C5.o5.fg
atggatcctaaagggaagggaatcgtgatcaacgacaaggagaaggagtccttcgtcaacgagccaagggatgacaagtccaacgactcgggctcgggccacagacgcaaagatgggaagaagaagaagacaagacacatcaaggagatcgtctactacgacagcgatgagtctacttcctcccaaaaggacgacgaccacaacgaatacgagagaaagaaaccggtcaattcgaacttttcttttgattactctcgtattcctcaaagtactaatgctcatttattatctattccacttggtaaacctcctcattttgatggagaggactacggattttggagtcacaaaatgcgtagtcacttgttctctctccatcctagcatatgggagattgtagaaagtggaatgcactttgatagtacggataatcccatggttattaatgaacagattcataaaaatgcacaagctactactgtgttgctagcctctttgtgcagggacgagtaccataaggtgagcggcttggacaatgccaagcagatctgggacaccctcaagatctctcatgaggggaacgatgtcaccttactcaccaagatggagttggtggagggcgagcttggaaggttcgcaatgataaggggcgaggagccaactcaaacatacaaccggctcaagacccttatcaacaaaataaggagctacggaagcacgcgatggacggatcacgacgtcgtccgcctaatgctaaggtcttttaccgttcttgatcctcatttggtgaacaatattcgtgaaaatcctaggtacaccaagatgtcgcccgaagaagttcttgggaagttcgtaagcggacgaatgatgatcaaggaggcaagatatgtggacgacgcgttgaacggtcctattcatgagcctcaacccattgctctcaaggcaacgaggagcaaggaggcgctaccgagcaaggtggcgcaagttgaggcggccgggctaaataatgaggagatggccctcatcattaagcgcttcaagacggcgcttaaaggtcgcaagggacagccaagcaagaccaagacaaaggagaagcgctcgtgcttcaaatgtggtaagattggtcatttcattgctaactgtcccgataatgaaagtgaccaggaaaaggggaacaaaagggagaagaagaagcattacaagaaggccaagggcgaggcacatatcgggaaggagtgggattcggattgctcctcctccgactccgacaatgaaggactcgccgccaccgccttcaacaagtcatccctcttccccaacgagcgtcacacatgccttatggcaagggagaagaaggtaagtaatcaaaacaatgtcacttatgattcttctagtgatgatgagtctagtgatgaagaaatagattactctagtttgttcaagggattggatagaactaaagtagataagattaatgaattgattgatgccttgaatgaaaaggatagactcttagaaaaacaagaggatcttttatatgaagaacatgacaaatttgcagaggcacaaaaatcttatgctttagaagttaaaagaaatgaagtgctttctagtgaactatcttcttgtcatgaaactattgctaagttaaagagttttaatgatgatttaaatgctagactagaagtagctagtaaatctaattcttgtgtagaaattgttggaacttgtaataggtgtaaagattttgacattgatgcttgtagtgaacacctagtttcaatttccaaacttaatgatgaattggctagtcttaatgctcaacttaagactagcaagagtaattttgataagctaaaatttgcaagggatgcctacacaattggtagacaccccctcaattaa

SEQ ID NO: 4637 - DNA, 978 bp, Zea mays
  Clone ID: TF_ZM3642.C4.o6.fg
atggatcctaagggaaagaggatggtgatcaacgacaaggagaaggagtgcttcatcaatgagccaaaagacgacaagcccactgactcgggctcaagtcacaagaagaaggatgggaagaagaagaggcgcatcaagaagatagtctactacgacagcgacgagtcctcttcttcccaaagagacgacgacgacgagaaaaagaaaacggacaccctcaagatctcacatgaggggaacgacgccaccatgatcaccaagatggagttggtagaatgcgaactaggaagattcgcaatgatcaggggggaggagccaactcaaacgtacaacaggctcaagaccctggtcaacaaaatcaggagctatggaagcacgagatggacggaccacgacgtcgtccggcttatgctaaggtacaccaagatgatgctcgaggaaatactcggaaagtttgtaagcgggcgaatgatgatcaaggagacaagatatgttgatgaggcgttgaatggcccaatgccgatccacgagcctcaaaccgttgctctcaaagaaacaagcagcagggaggggctacctagcaaggcggcgcaagttgaggcggccgggctaaatgaggatgaaatggccctcatcatcaagcgcttcaagacggcgctcaaaggtcgcaaggagcatcccaacaagagcaatacaaagggaaagcgctcctgcttcaagtgtggtaagattggtcactttattgctaactgtcccgataatgatagtgaccaggaacaaggaaagaatgggaagagagagaacaagaagatttacaagaaggctaagggcgaagcacaccttggaaaagaatgggactcggattgttcttcgtccgactccgacgacgaaggactcgccgccacggccttcaacaaatcgtctctcttccccaacgagcatcacacctgcctcatggcaaaggagaagaaggtgtaa

SEQ ID NO: 4638 - DNA, 2007 bp, Zea mays
  Clone ID: TF_ZM3650.C1.o1.fg
atggatcctaaggggaagggaatcgtgatcaacgataaggagaaggagtccttcgtcaacgagcccaaagatgacaagcctaccgactccggctcgggccatagacggaaggaagggaagaagaagaagacaaggcgcatcaaggagatcgtctactacgacgacagcgacggatcttcctcttcccaaaaggacgacgacaacgactacaggaagacgattcataaaaatgcacaagctactactgtgttgctagcctctttgtgcagggacgagtacaataagttggtggagggcgagcttggaagatttgcgatgataaggggcgaggagccaacccaaacatacaaccggctcaagacccttatcaacaaaataaggagctatggaagcacacgatggacggaccatgacgtcgtccgactattactaaggtcctttaccattcttgatcctcatttggtgaataatattcgtgagaatcccaggtacaccaaaatgtcgcccgaagaagttcttgggaagttcgtaagcgggcgaatgatgatcaaggaggcaagatacgtggacgacgcgttgaacggtcctattcatgagcctcaacccattgctctcaaggcaacgaggagcaaggaggcgctaccaagcaaggtggcgcaagttgaggcggccgggctaaataatgaggagatggccctcatcattaagcgcttcaagacggcgcttaaaggtcgcaagggacagccaagcaagaccaaaacaaaggagaagcgctcgtgcttcaaatgtggtaagattggtcatttcattgctaactgtcccgataatgaaagtgaccaggaaaaaggggacaaaagggagaagaagaagcattacaagaaggccaagggcgaagcacatatcggaaaggagtgggattcggattgctcctcctccgactccgacaatgaaggacttgccgccaccgccttcaacaaatcaaccctcttccccaacgagcgtcacacatgccttatggcaagagagaagaaggtgagtactcgagacaccacttatgtctcttctagtgatgatgaatctagcgatgaggaaatagattactctagcttgttcaagggattggatagaaataagattgataaaatcaatgaattgattgatgccttgaatgagaaggatagactcttagagaaacaagaggatttattgtatgaagaacatgataaatttatagaagcacaaaaatcctatgctttagaagttaaaagaaatgaaatgctttcttttgaactatctacttgtcatgaaaccatttctactttaaaaggtgtcaacaatgatttaaatgctaaattagaagtagcaaataaatccaattcttgtgtagaacatgttgtaatttgtactaggtgtaaagattttgacattgatgcttgtagtgaacacctagtttcaatttccaagcttaatgatgaattggctagtcttaatgctcaacttaagactagcaagaatgatttggataaactaaaatttgcaagggatgcctacacgatcggtagacacccctcaattaaggatggacttggcttcaagagagaagccaagaacttaacaagccataaggctcccattcccgccaaggagaaagggaaggcccctatggctagtagtgtgcaaaagaaccatgcgtttatgtaccatgataagagacaaactagaaatgcttataggagttacaatgcttatgatgattttgattctcatgacatgtttgtttctagttcttcccatatgcatggtagaaatatgtctaggagaaatgctattcatcattgtgacaccccagtgtcacctagggtttctcttaaacagccaaaccaaaaaccatcattttatgtgaaccaaagtaagcatgagcatcaaaacaatttaagtgagaaagaattcaccaagtatatacttaaaagtgtcatgatcaaaacaattgagacttttgaaagataa

SEQ ID NO: 4639 - DNA, 2580 bp, Zea mays
  Clone ID: TF_ZM3660.C5.o2.fg
atggatcctaaagggaagggaatcgtgatcaacgacaaggagaaggagtccttcgtcaacgagccaagggatgacaagtccaacgactcgggctcgggccacagacgcaaagatgggaagaagaagaagacaagacgcatcaaggagatcgtctactacgacagcgatgagtctacttcctcccaaaaggacgacgaccacaacgactacgagaaaaagaaaccggtcaattcgaacttttcttttgactactctcgtattccgcatagttcaagttcacatttgctctccattccactcggcaagcccccacactttgatggagaggactacggattttggagccacaaaatgcgtagtcacctattctctctccatcctagtatatgggagattgtagaaagtggaatgcactttgatagttcggatagtcccatgttcattaatgagcaaatacataagaatgcacaagctactactgttcttctagcttctttgtgcagggatgaatacaacaaagtgagcggcttggataacgccaagcaaatatgggacaccctcaagatctctcatgaggggaacgacgtcaccttgctcaccaagatggagttggtggagggcgagcttggacggttcgcaatgataaggggcgaggagccaactcaaacatacaaccggctcaagacccttatcaacaaaataaggagctatggaagcacgcgatggacggaccacgacgtcgtccgactgatgctaaggtcctttaccgttcttgatcctcatttggtgaataatattcgtgagaatcccaggtacaccaaaatgtcgcccgaagaagtccttggaaaattcgtaagtgggcgaatgatgatcaaggaggcaaggtacgtggacgatgccttgaacggaccgatcaacgagccgcaacctcttgctctcaaagcaacaagaagcaaggaggcgctacctaacaaggtggcacaaattgaggcggccggacttaatgatgaagagatggctctcatcatcaagagattcaagacggcgctcaagggtcgcaagggacagccaagcaagaccaaagccaaagggaagcgctcatgcttcaaatgcggtaagattggtcattttattgctaactgtcccgataatgaaagtgaccaggaactcgggagcaagagggaaaagaagaaacattacaagaaggccaagggcgaggcacatatcggaaaggagtgggattcggattgctcctcctccgactccgacaatgaaggactcaccgccaccgccttcaacaagtcgtccctcttccccaacgagcatcacacatgcctcatggcgaaggagaagaaggtatgtactcgagaaagtaccacttattcttctagtgatgatgattctagtgacgacaatgaaatagactattctagtttatttaaaggtctagatagaattaaaattggcaaaattaatgagttaattgatgccttgaatgaaaaggataggcttttagaaaagcaagaggatttgttatatgatgaacatgataaatttgtagaagcacaaaaatctcatgctttagaagttaaaagaaacgaaatgctttcttgtgaattatcttcttgccatgagacaatttctagcttaaggagcattaatgatgacttgaatgctaagattgctagtaaatctaactcttgcgtagagaatgttataacttgcactaggtgtaaagatattaacattgatgcttataatgaacacctagcttgcatttctaaattaaatgaagaggtggctagtcttaatacccaacttgagactagcaaaagtgattttgagaaactaaaatttgctagggatgcctacacggttggtagacacccctcaattaaggatggacttggcttcaagagggaagccaagaacttaacaagccataaggctcccatctccgccaaggagaaagggaaggcccctatggctaaaagtactaaaaggaaccatgcttttatgtatcatgataggagacaaactagaaatgcttataggagttataatgcttatgatgactttaactctcatgccatggttgcttctagttcttcctatatgcatggtagaaatatgtctaggagaaatactatttatcatgtgcctagaaagaatattattcatgctcctaggaaagtagtgaatgaatcttctacaatttattgtgctttaaatgcttcctttgctatttgtagaaaggataggaaaatagttgctaggaagttaggggcaaaatgcaagggagacaaaacttgcatttgggtccctaaggatatttgcactaaccttgtaggacccaacatgagttgggtttatgcatccgggggttcaagctggattatcgacagcggatgcacaaaccatatgacgggggagaagaagatgttcacctcctatgtcaagaataaagattcccaagattcaattatattcggtgatgggaatcaaggcaaggataagtctgaaacccaagggaccctcaagcgcttcctcaggagagctcaaaatgagtttgagctcaag

SEQ ID NO: 4640 - DNA, 639 bp, Zea mays
  Clone ID: TF_ZM3970.C3.o1.fg
atggatcctaaagggaagggaatcgtgatcaacgacaaggagaaggagttcttcgtcaacgagccaagggatgacaagtccaacgactcgggctcgggccacagccgcaaagatgggaagaagaagaagacaagacgcatcaaggagatcgtctactacgacagcgatgagtctacttcctcccaaaaggacgacgaccacaacgaatacgagagaaagaaaccggcaacgaggagcaaggaggcgctaccgagcaaggtggcgcaagttgaggcggccgggctaaataatgaggagatggccctcatcattaagcgcttcaagacggtgcttaaaggtcgcaagggacagccaagcaagaccaagacaaaggagaagcgctcgtgcttcaaatgtggtaagattggtcatttcattgctaactgtcccgataatgaaagtgaccaggaaaaggggaacaaaagggagaagaagaagcattacaagaaggccaagggcgaggcacatatcggaaaggagtgggattcagattgctcctcctccgactccgacaatgaaggactcgccgccaccgccttcaacaagtcatccctcttccccaacgagcgtcacacttgcctcatggcaagggagaagaaa

SEQ ID NO: 4641 - DNA, 2136 bp, Zea mays
  Clone ID: TF_ZM4163.C9.o2.fg
atgattcaagtttcacaagatcacctattcaccctccctctaggtgctctcatcgtcaacgagcccaaggatgacaagcctaccgacttgggctcgggccacaaacgcaaagatgggaagaagaagaagacaaggcgcatcaaggagatcgtctactacgacgacaacgatgagttcacttcttcccaaaaggacaacggcgacaatgactacgacaaaagaaagatggttaattcgaacttttcttttgactactctcgtattccgcaaagtacaaatgctcatttgctttccatccctctcggcaaacctccacactttgatggggaggactacagattttggagtcacaaaatgtgtagtcacctgttctctctccatccaagtatatgggagattgttgagaatggaatgaaatttgatagctcggatagtcctatattcattaatgaacagattcataagaatgcacaagctactactgtgttgttagcctctttgtgcagggacgagtaccataaggtgagcggcttggacaatgccaagcagatctgggacaccctcaagatctctcatgaggggaatgatgtaaccttgctcaccaagatggagttggtagagggcgagctcgggagatttgcaatgataaggggcgaggagccaacccaaacatacaaccggctcaagaccctcatcaacaaaataaggagctacggaagcacgcgttggacggaccacgacgtcgttcgcctaatgctaaggtcttttactgtacttgatccacatttggtgaacaatatctgtgaaaatcctaggtacaccaagatgtcacccgaagaagttcttgggaaattcgtgagcgggcgaatgatgatcaaggaggcgagatatgtcgacgacgcgttgaacggtccaatccatgagcctcaacccattgctctcaaagcaacgaggagcaaggaggcactacctagcaaggtggcacaagttgaagcggcagggctaaatgatgaagagatggctctcatcatcaagcgcttcaagacggcgctaaagggtcacaaggggcaaccgagcaagaccaagacaaaggggaagcgctcatgcttcaagtgtggtaagattggtcattttatcgctaactgccccgataatgatagtgaccaggaacaggggaacaagagggagaagaagaaggcatataaaaaggctaagggcgaggcacaccttggcaaggaatgggactcgcattgttcgtcatccgactccgacgatgaaagactcgccgccaccgccttcaacaagtcatccctcttccccaacgagcggcatacatgcctcatggcgaaggagaagaaggtatgtaatcgaaacaatgccgcttatgaatcttctagtgatgatgagtctagtgatgaagaaataaattactctagtttgttcaagggactggatagaaataaagtagataagattaatgaattgattgatgccttgaatgaaaaggatagacttttagaaaaacaagaggaccttttatatgaagagcatgacaaatttgtagaggcacaaaaatctcatgctttagaagttaaaagaaatgaaatgctttcttgtgaactatcttcttgccatgagacaatttctagcttaaggagcataaatgatagtttgaatgctaagttagaaatagctagtaaatctaactcttgtgtagaacatgttatgatttgcaataggtgtaaagattttgacactgatgcttgtagtgaacacctagtttcaatttccaaactgaatgatgaattggctagtcttaatgcccaacttaagactagcaagagtgattttgataaactaaaatttgcaagggatgcctacacgattggtaggcacccctcaattaaggatggacttggctttaagagggaagccaagaacttaacgagccataaggcacccatctccatcaaggagaaagggaaggcccctatggcaaaaagtgctaaaaagaaccatgcttttatgtaccattatagaagacagtcctataggagttgtaatgcttatgatgcttttgactctcatgccatgtgtgcttctagttcttcctatatgcatggtagagatatgtga

SEQ ID NO: 4642 - DNA, 2505 bp, Zea mays
  Clone ID: TF_ZM4290.C9.o7.fg
atggatcctaaggggaagggaatcgtgatcaacgacaaggaaaaggagtccttcgtcaacgagccaaaagatgacaaatccaacgactctggctcgggccatagacgtaaagatgggaagaagaagaagacaaggcgcatcaaggagatcgtctactacgacagcgacgaatcctcttcttcccaaagggacgacgaccacaacgactacgagcaaaggaaaccggttaattctaacttttcctttgactactctcgtattccgcaaagctcaaattcacatttgctttccattccactcggcaagcccccacactttgatggggaggactacggattttggagccacaaaatgcgtagtcaccttttttctctccatcctagtatatgggagattgtagatagtggaatgcactttaatagttcggatagtcctatattcattaatgagcaaatacataagaatgcacaagctactactgttcttctagcttcattgtgcagggatgaatataacaaagtgagtggcttggataacgccaagcaaatctgggataccctcaagatctctcatgagggaaatgacgctaccttgctcaccaaaatggagttggtggagggcgagcttggacggttcgcgatgataaggggcgaggagccaactcaaacatacaaccggctcaagacccttatcaacaaaataaggagctacggaagcacgcgatggacggaccacgacgtcgtccgactaatgctaaggtcctttactgttcttgatcctcatctagtgaacaatattcgtgagaatcccaggtacacgaagatgacgcccgaggaggtactcggaaaattcgtaagcgggcggatgatgatcaaggaggcaagatacgtggacgacgccttgaatggaccgatcaacgagcatcaaccccttgctctcaaggcaacaagaagcaaggaggcgctacctagcaaggtggcacaaattgaggcggctggacttaatgatgaagagatggctctcatcatcaaacgcttcaagacggtgctaaaaggtcacaaggggcagccaagcaagaccaagacaaaggggaagcgctcatgcttcaagtgcggtaagattggtcattttatcgctaactgccccgataacgatagtgaccaggaacaggggaacaagagggaaaagaagaagaattacaagaaggccaagggcgaggcacacatcggaaaggagtgggattcggattgctcctccgactccgacaatgaaggactcgccgccaccgccttcaacaagtcatccctcttccccaacgagcgtcacacttgcctcatggcaagagagaagaaggtaatcactcgtaatgatgtcacttatgattcttctagtgacgatgagtctagtgatgatgaaatagattactctagtttgttcaagggattagatagaaataaaattgataaaatcaatgaattgattgatgccttgaatgaaaaggataggcttttagaaaagcaagaggaccttttatatgaagaacatgataagtttgtagaagcacaaaaatcacttgctttagagattaagagaaatgaaatgctttcttgtgagttgtctacatgtcatgattcaatttctagtttaaaaagcataaatgatgatttaaatgctaagctagaaaaatctagtaaatcaacatcttgtgtagaacatgttgtgatttgcactaggtgtaaagattttgacattgatgcgtgtagtgaacatctagtttcaatttctaaattgaatgatgaagtggctagtcttaatgctcaacttaaggctagcaaaagcgaatttgataaactaaaatttgcaagggatgcctacacagtgggtagacacccctcaattaaggatggtcttggcttcaagagagaggccaagaacttaacaagccataaggctcccatctacgtcaaggagaaagggaaggcccctatggctagtagtgctaaaaagaatcatgctttcttgtactatgataggagacatgctagaaatgcttataatgattttgattcacatgcttatgattcttatgctatgactgcttctagttctcatgttgtgcatgatagaaaggtttatgcatccgggggttcaagctggattattgacagcggatgcacaaaccatatgacgggggagaagaaaatgttcacctcctacgtcaagaataaggattcccaagattcaatcatattcggtgatgggaatcaaggcaagatgtgtctgtctttagaagaagtgatggtgttgggggccttcgtcctccgaaggtattttcggatccagaattatgaatatggagcacggccaggacgaagcctgaaccagacgaaggtcgagtgtagccgaagctgtgcgcagggaagcttcggcgcgatggcagaagggggaaccgacttaaagatgaaaagacttcgggggcctcgacagatttccataagccgttaa

SEQ ID NO: 4643 - DNA, 4635 bp, Zea mays
  Clone ID: TF_ZM4318.C3.o5.fg
atggatcctaaggggaagggaatcgtgatcaacgacaaggagaaggagtccttcgtcaacgagccaaaggatgacaagtccaacgactcgggctcaggccatagacaaaaagatgggaagaagaagaagacaaggcgcatcaaggagattgtctactacgacagcgacgaatcttcctcttcccaaaaggacgacgacaacgactacaggaagacggtcaattcgaacttttcatttgactattctcgtattccacacaattcgaattcgcatttgctttccattcctcttggcaaacctccacacttcgatggggaggactacagattttggagtcacaaaatgcgtagtcacttattctctctccatccaagcatatgggagattgtagagaatggaatgaaatttgatagctcggatagtcctatgcttataaatgaacaaatccatagaaatgcacaagctactactgttctcttagcatctttgtgcagggaagaatacaataaggtgagcggcttggacaatgccaagcagatatgggacaccctcaagatctctcacgagggcaacgacgtcaccatgctcaccaagatggagttggtggagggcgaacttgggagattcgctatgataaggggggaggagccaacccaaacatacaaccggctcaaaacccttgtcaacaagataagaagctatggaagcacgcgatggacggaccacgacgtcgtccgcctaatgctaaggtcctttaccgttcttgatcctcatttggtgaataatattcgtgagaatcccaggtacaccaaaatgtcgcccgaagaagttcttgggaagttcgtaagcgggcgaatgatgatcaaggaggcaagatacgtggacgacgcgttgaacggtcctatccatgagcctcaacccattgctctcaaggcaacaaggagcaaggaggcgctaccaagcaaggtggcacaagttgaggcggccgggctaaataatgaggagatggccctcatcattaagcgcttcaagacggcgcttaaaggtcgcaagggacagccaagcaagaccaagacaaaggagaagcgctcatgcttcaaatgtggtaagatcggtcatttcattgctaactgccccgataatgaaagtgaccaggaaaaaggggacaagagggaaaagaagaagcattacaagaaggccaagggcgaggcgcatctaggcaaagagtgggactcggactgctcctcctccgactccgataatgaaggactcgccgccaccgccttcaacaagtcatctctcttccccaacgagcgtcacacatgccttatggcaagggagaagaaggtatgtactcagaactctacctatgcttcttcaagtgaggacgaatctagtgatgaggatgaagtagattactcatgtctgtttaagggcctggatagaaccaaggtagacaaaattaatgaattgattgatgccctgaatgagaagaacatacttctagaaaagcaagaggatttgttgtatgaagaacatgataaatttgtagaagctcaaagatctcatgctctagaagttaaaagaaatgaaatgctttcttgtgaattatcttcttgccatgatgcaatttctaaattaaggagcattaatgatgattttaatgctaagttagagattgctagtaaatccacctcttgtgtagaaaatgttgtagcgtgcactaagtgtaaagatattaacattgatgcttgtagtgaacacctagcttgcatttctaaattaaatgaagaggtagctagtcttaatgcccaacttaatactagcaaaagtgactttgagaaactaaaatttgctagggatgcctacacggttggtagacacccctcaattaaggatgggcttggcttcaagagggaagccaagaacttaacaagccataaggctcctatctccgccaaggagaaagggaaggcccctatggcaagtagcactaaaaggaatcatgcttttatatatcatgataggagacaaactagaaatgcttataggagttataatccttatgatgattttaactcacatgccatgtttgcttctagttcttcctgtatgcatggtagaaatatgcctaggaaaaatgctatgcctagaaagaatattattcatgccctaggaaaaaaggataggaaggcttatgcatccgggggttcaagctggattattgatagcggttgcacaaaccatatgacgggggagaagaagatgttcacctcctacgtcaagaataaggattcccaagattcaatcatattcggtgatgggaatcaaggcaaggataagtctgaaacccaagggaccctcaagcgcttcctcaggagagctcaaaatgagtttgagctcaaggtgaagaagataaggagcgacaacgggtccgagttcaagaaccttcaagtggaggagttccttgaagaggaagggatcaagcacgagttctccgctccctacacaccacaacaaaatggtgtggtagagaggaagaacaggacgctcatcgatatggcgaggacgatgctaggagaggtctaccttcatcgcctcctcaagaagacgtcgtatgagctactaaccggtaacaaacccaatgtatcctactttcgtgtatttgggagcaagtgctacattctagtgaagaagggtagaaattctaaatttgctcccaaagctgtagaagggtttttgttaggttatgactcaaatacaaaggcgtatagagtcttcaacaaatcatcgggtttggtcgaagtctctagagacgttgtatttgatgagactaatggctctccaagagagcaagttgttgattgtgatgatgtagatgaagaagatgttccgacggccgctatacgaaccatggcgattggagaagttcggccacaggaacaagatgaacaagatcaaccttcttcctcaacaatggtgcttcccccaactcaagacgatgaacaggttcatcaacaggaggcgtgtgatcaagggggagcacaagttgatcatgtgatggaggaagaagcacaaccggcacctcaaacccaagttcgagcaatgattcaaagggatcatcctgtcgaccaaattctgggtgacattagcaaaggagaggagctcaacaacttcaagaggaatgaagtttggacactggtgcctcgtccgaagcaaaatgttgtgggaaccaagtgggtgttccgcaacaaacaggacgagcacggggtggtgacaaggaacaaggctcgacttgtggcaaaaggttatgcccaagtcgcaggtttggattttgaggagacttttgctcctgtggctaggctagagtctattcgtatcttgctagcatatgtcgctcaccattctttcaggttgttccaaatggatgtgaagagcgctttcctcaacgggccaatcaaggaggaggtgtacgtggagcaaccccctggcttcgaggatgaacggtaccccgaccatgtgtgtaagctctctaaggcgctctatggacttaagcaagccccaagagcatggtatgaatgccttagagactttctaattgttaatgctttcaaggttgggaaagccgatccaactctttttacaaagacatgtgatggtgatttgtttgtgtgccaaatttatgtcgatgacataatatttggttctactaaccaaaagtcttgtgaagagtttagcagggtgatgacgcagaaattcgagatgtcgatgatgggcgagttgaactacttccttgggttccaagtgaagcaactcaaggacggcaccttcatctcccaaacgaagtacacgcaagatctgctaaagcggtttgggatgaaggacgccaagcccgcaaagactccgatgggaactgacggacacaccgacctcaacaaaggaggtaagtccgttgatcaaaaagcataccggtccatgataggttctttgctttatttatgtgctagtagaccggatattatgcttagcgtatgcatgtgtgctagatttcaatccgatcctaaggagtgtcacttagtggcggtgaagcgaattctgagatatttagttgctacgccttgcttcgggctctggtatccaaaggggtctacctttgacttagttggatactcagattccgactatgctggatgcaaggtcgataggaagagtacatcggggacgtgccaattcttaggaaggtccctggtgtcgtggaactctaagaaacaaacttccgttgccctatccaccgctgaggccgagtacgttgccgcaggacagtgttgcgcgcaactactttggatgaggcaaaccctccgggactttggctacaatctgagcaaagtcccactcctatgtgataatgagagtgctatccgcatggcggaaaatcctgttgagcacaaccgcacaaagcacatagacatccgacatcactttttgagagaccaccagcaaaagggggatatcgaagtgtttcatgttagcaccgagaaccagctagccgatatctttaccaagcctctagatgagaagaccttttgcaggctgcgtagtgagctaaatgtcttagattcgcggaacttggattga

SEQ ID NO: 4644 - DNA, 4731 bp, Zea mays
  Clone ID: TF_ZM4325.C1.o23.fg
atggatcctaagggaaatgggatcgtgatcaatgataaggagaaggagtccttcgtcaacgagccgaaagacgacaagcctatcgactcgggctcaggccacaaacgaaaagatgggaagaagaagaagacgaggcgcatcaaggagatcatctactacgacgacagcgacgagtcctcttcttcccaaaaggacgactacgactatgagaaacggaaaacggtcaattcgaacttttcttttgattactctcgtattccgcaaagtacaaatgctcatttgctctccattccacttggcaaacctcctcactttgatggggaggactacggattttggagtcataaaatgcgtagtcacttgttctctctccatccaagcatatgggagatagtagagagtggaatgaaatttgatagtactgatagtcccatgttcattaacgagcaaatccacaaaaatgcacaagcgactactgttcttctagcttcattgtgcagggacgaataccataaggtaagcggcttggacaatgccaagcagatctgggacaccctcaagatctctcatgagggaaacaacatcaccatgctcaccaaaatggagttggtggaaggcgaacttgggagattcgcgatgataaggggtgatgagccaacccaaacgtacaaccggctcaagacccttgtcaacaaaataaggagctacggaagcacacgatggacggaccacgacattgtccgcctaatgctaaggtcctttactgtccttgatccacatcttgtgaacaatattcgtgagaatcctaggtacaccaagatgtcgcccgaagaaattcttgggaaatttgtaagcgggcggatgatgatcaaggaagcaagatacgtcgacgatgaactaaatggaccaatccaagagcctcaaactattgctctcaaggcaacgaggagcaaggaggcgctacctagcaaggtggcacaagttgaggcggcagggctcaatgatgaagagatggccctcatcatcaagcgcttcaagacgacgctaaagggtcgcaaggggcaaccaagcaagaccaagacaaaggggaagcgctcatgcttcaaatgtggtaagattggtcattttatcgctaactgtcccgataatgatagtgatcaggaacaagggaacaagagggagaagaagaaggcatacaagaaggctaagggcgagacacaccttggcaacgagtgggactcagattgttcgtcatccgactccgacaatgaagggctcgccgccaccgccttcaccaagtcatccctcttccccaacgagcgtcacacatgcctcatggcgaaggataagaaggtatgtactcgagacaatactacttatgcttcttcaagtgaggatgagtctagtgatgatgatgaaatagattattcttgtttattcaagggtctagatagaaccaaggttgataagattaacgaattaattgatgccttgaatgataagaatagattattagagaagcaagaggatcttttatatgaagaacatgataagtttgtagaggctcaaaaatcccttgctttagaaatcaaaaggaatgaaatgctttcttgtgaattatctacttgccatgagacaatttctagtttaaaagatgttaacaatgatttaaatgctaaactagaagtagcaaatagatctaactcttgtgtagaacatgttgtgatttgcactaggtgtaaagattttaatgttgatgcttgtagtgaacacctagtgtctattgcaaagttaaatgatgaactagctagtcttaatgcccaacttaagactagcaagagtgaatttgataagttaaaatttgcaagggatgcctatacgattggtagacacccctcaattaaggatggacttggcttcaagagggaagccaagaacttaacaagccataaggctcccatctccgccaaggagaaagggaagacccctatggctagtagtgctaaaaaaaccatgctttcatgtatcatgataggagacattctaggaatgcctatagaagttatgatgcttttgattctcatgccatgtttgcttctagttcttcctatatgcatggtttatgcatccgggggctcaagctggattatcgacagcggatgcacaaaccacatgacgggagagaagaggatgttctcttcctacgtcaagaacaaggatccccaagattcaataatattcggtgatgggaaccaaggcaaggtgaaagggttagatgtgtctgtctttagaaggtgtgatggttcactagcttttaagggtgtactagacgacaaactttatttggttgattttgcaaaagaagaggccagtctagatgcatgcttaattgctaagacttgcatgggctggctgtggcatcgccgcttagcacatgtggggatgaagaaccttcacaagcttctaaagggagaacacatagaccttgtgcagcttgtcaagcaggataaatctgaaacccaagggaccctcaagcgcttcctcaggagagctcaaaatgagtttgagcttaaggtgaagaagataaggagcgacaacgggtccgagtttaagaaccttcaagtggaggagttccttgaggaggaagggatcaagcacgaattctccgctccctacacaccacagcaaaatggtgtggtagagaggaagaacaggacactcatcgatatggcgaggactatgcttggagagttcaagacccctgagcgcttttggtcggaagccgtgaacacggcttgccacgccatcaaccggctctaccttcaccgcctcctcaagaagactttgtatgagcttctaaccggtaacaaacccaatgtgtcttactttcgtgtatttgggagcaaatgctatattctagtgaagaagggtaggaattccaaatttgctcccaaagctgtagaagggtttttgttaggttatgactcaaatacaaaggcgtatagagtcttcaacaaatcatcgggtttggttgaagtctctagcgacgttgtatttgatgagactaatggctctccaagagagcaagttgttgatcttgatgatgtagatgaagaagatgttccgacggccgcaatacgcaccatggctattggagatgtgcgaccacaggaacaaacggagcaagatcaaccgtcttcctcaacgatggtgcatcccccaactcaagatgatgaacagcctttcagggtagaagaggccttgctagatctggactgggtgttggccatgcaggaggagctcaacaacttcaagcgtaatgaagtttggacactggtgccttgtcccaagcaaaatgttgtgggaaccaagtgggtgttccgcaacaaacaggacgagcacgaggtggtgataaggaacaaggctcgacttgtggcaaaaggttatgcccaagtcacaggtttggactttgaggagacctttgctcctgtggctaggctagagtccattcgtattttgctagcatatgccgctcaccattctttcaggttgttccaaatggatgtgaagagcgctttcctcaacgggccaatcaaggaggaggtgtacgtggagcaaccccctggcttcgaggatgaacggtaccccgaccacgtgtgtaagctctctaaggcgctctatggacttaagcaagccccaagagcatggtatgaatgcattagagactttttaattgctaatgctttcaaggttgggaaagccgatccaactcttttcactaagacttgcgatggtgatctttttgtgtgccaaatttatgtcgatgacataatatttggttctactaatcaaaagtcttgtgaagagtttagcaggttgaactacttccttgggttccaagtaaagcaactcaaggatggcaccttcatctcccaaacgaagtacacgcaagacttgctaaagcggtttgggatgaaggacaccaagcccgcaaagactccgatgggaaccgacggacacaccgacctcaacaaaggaggtaagtccgttgatcaaaaagcatacctgtcgatgatagggtctttactttatttatgtgctagtagaccggatattatgcttagcgtatgcatgtgtgctagatttcaatccgatccaagggagtgtcacttagtggccgtgaagcgaattcttagatacttagtcgctacgccttgcttcgggatctggtatccaaaggggtctacctttgacttgattggatattcagattccgactatgctggatgtaaggtcgataggaagagtacatcggggacgtgccaattcttaggaaggtccctggtgtcctggaattctaagaaacaaacttccgttgctctatccaccgctgaggccgagtatgttgccgcaggacagtgttgcgcgcaactactttggatgagtcaaaccctctgggactttggctacaatctgagcaaagtcccactcctatgtgacaatgagagtgctatccgcatagcggacaatcctgttgagcacagccgcacaaagcacattgacatccgacatcactttttgagagaccaccagcaaaagggagatatcgaagtgttctatattaacaccgagaaccagctagccgatatctttaccaagcctctagatgagaagaccttttgcaggctgcgtagtgagctaaatgtcttagattcgcggaacttggattga

SEQ ID NO: 4645 - DNA, 3957 bp, Zea mays
  Clone ID: TF_ZM4326.C1.o5.fg
atggaacctaaggggaagggaatcgtgatcaacgataaggagaaggagtccttcgtcaatgagctcaaagatgacaagcctaccgactccggctcgggtcatagacgaaaggaagggaagaagaagaagacgaggcgcatcaaggaaatcgtctactatgacgacagtgatgagtctacttcttcccaaaaggacgatgaccacaacgactatgagcaaaggaaaccggttaattctaacttttcctttgactactctcgtattccacaaagctcaaattcacatttgctttccattccactcggcaagcccccacactttgatggggaggaccacggattttggagccacaaaatgcgtagtcacctattttctctccatcctagtatatgggagattgtagatagtggaatgcactttaatagttcggatagtcctatattcattaatgagcaaatccataagaatgcacaagctactactgttcttctagcttcattgtgcagggatgaatataacaaagtgagtggcttggataacgccaagcaaatctgggataccctcaagatctctcatgagggaaatgacgctaccttgctcaccaaaatagagttggtggagggcgagcttggacggttcgcgatgataaggggcgaggagccaactcaaacatacaaccgactcaagacccttatcaacaaaataaggagctacggaagcacgcgatggacggaccacgacgtcgtccgactaatgctaaggtcctttaccgttcttgatcctcatttggtgaataatattcgtgagaatcccaggtacaccaaaatgtcgcccgaagaagtcttaggaaaattcgtcagcgggcgaatgatgatcaaggaggcaagatacgtggacgacgccttgaatggaccgatcaacgaaccacaaccttttgctctcaaagcatcaagaagtaaggaggcgctacctagcaaggtggcacaaattgaggcggtcggacttaatgatgaagagatggctctcatcatcaaacgcttcaagacggtgctaaagggtcacaaggggcagccaagcaagaccaagacgaaggggaagcgctcatgcttcaagtgcggtaagattggtcattttatcgctaactgccccgataatgatagtgaccaggaaatgggaaacaagagggaaaagaagaagcattacaagaaggcaaagggcgaggcgcatctaggcaaggagtgggactcggattgctcctcttccgactccgacaatgaaggactcgccgccaccgccttcaacaaatcaaccctcttccccaacgagcgtcacacatgccttatggcaagggaaaagaaggtatgtactcgcaactctacctatgcttcttcaagtgaggacgaatctagtgatgaggatgaagtagattattcatgtttgttcaagggcttagatagatctaagatagacaaaattaatgaattaattgatgccttgaatgaaaagaatatacttttagaaaagcaagaggatttgttgtatgaagaacatgataagtttgtagaggctcaaaaatcccttgcattagaaattaagaggaatgaaatgcttgcttgtgaagtgtcaacatgccatgactctatttctaacttaaagagcataaacgatgatttaaatgctaaactagtagaagcaaataaatccaactcttgtgttgaatatgttgaaatttgcactaggtgtaaggatattgatattaatgcttgtagcgaacacttagtttctatttcaaaattgaatgatgaattagctagtcttaatgctcaacttaagactagcaagagtaattttgataaactaaaatttgctagggatgcctacacggttggtagacacccctcaattaaggatgggcttggcttcaagagggaagccaagaacttaacaagccataaggctcccattcccactaaggagaaagggaaggcccctatggctactagtgctaaaaagaaccatgcctttttgtatcatgataggagacaaactagaaatgcttataggagttataatgagtacgatgatttttctcatgctatgtttgcttctagttcttcatatgtgcatgatagaaatgttggtagaagggatgttgttcataatatgcctaggagaaatgttgttaatattcctaggaaagttaatgagccttctacaatatatcatgctttgaatgcttcctttgcaatttgtagaaaggatagaaaggtttatgcatccgggggttcaagctggattattgacagcggatgcacaaaccatatgacgggggagaagaagatgttcacctcctacgtcaagaataaggattcccaagattcaatcatattcggtgatggaaatcaaggcaaggtaaaaggattaggtaaaattgcaatctcaaatgagcactcaatttctaatgtgtttttagttgagtccttgggatataatttgctatctgttagtcaattatgcaacatggggtataactgtctatttaaaaatgttgtgggaaccaagtgggtgttccgcaacaaacaggacgagcacggggtggtgacgagaaacaaggctcgacttgtggcaaaaggttatgcccaagtcgcaggtttggatttcgaggagacttttgctcctgtggctaggatagaatcaattcgtatcttgctagcatatgccactcaccattctttcaggttgtaccaaatggatgtgaagagcgctttcctcaacgggccaatcaaggaagaggtgtacgtggagcaaccccctggctttgaggatgaacgataccccgaccacgtgtgtaagctctctaaggcgctctatggacttaagcaagccccaagagcatggtatgaatgccttagagactttctaattgctaatgctttcaaggttgggaaagccgatccaactctttttacaaagacatgtgatggtgatttgtttgtgtgccaaatttatgtcgatgacataatatttggttctactaatcaaaagtcttgtgaagagtttagcagggtgatgacgcacaaattcgaaatgtcgatgatgggcaagttgaactacttccttgggttccaagtgaagcaactcaaggacggcaccttcatctctcaaacgaagtacacgcaagacttgctcaagcggtttgggatgaaggacgccaagcccgcaaagacaccgatgggaaccgacggacacaccgacctcaacaagggaggtaagtccgttgatcaaaaagcataccggtcaatgatagggtcattactttacttatgtgctagtagaccggatattatgcttagcgtatgcatgtgtgctagatttcaatccgatcctaaggaatgtcacttagtggcggtgaagcgaattcttagatatttagttgctacgccttgcttcgggctctggtatccaaaggggtctacctttgacttagttggatactcagactccgactatgctggatgtaaggtcgataggaagagtacatcggggacgtgccaattcttaggaaggtccctggtgtcatggaattctaagaaacaaacttccgttgccctatccaccgctgaggccgagtatgccgcaggacagtgttgcgcgcaactactttggatgaggcaaaccctccgggactttggctacaatctgagcaaagtcccactcctatgtgataatgagagtgctatccgcatggcggaaaatcctgttgaacacagccgcacaaagcacatagacatccgacatcactttttgagagatcaccagcaaaagggagatattgaagtgtttcatgttagcaccgagaaccagctagccgatatctttaccaagcctctagatgagaagaccttttgcaggctgcgtagtgagctaaatgtcttagattcgcggaacttggattga

SEQ ID NO: 4646 - DNA, 5448 bp, Zea mays
  Clone ID: TF_ZM4333.C5.o2.fg
atggatcctaaagggaagggaatcgtgatcaacgacaaggagaaggagtcctttgtcaacgagccaagggatgacaagtccaacgactcgggctcgggccacagacgcaaagatgggaagaagaagaagacaagacgcatcaaggagatcgtctactacgacagtgatgagtctacttcctcccaaaaggacgacgaccacaacgaatacgagaaaaagaaaccggttaattcgaacttttcttttgattactctcgtattcctcaaagtactaatgctcatttattatctattccacttggtaaacctcctcattttgatggagaggactacggattttggagtcacaaaatgcgtagtcacttgttctctctccatcctagcatatgggagattgtagaaagtggaatgcactttgatagtacggatagtcccatgtttattaatgaacagattcataaaaatgcacaagctactactgtgttgctagcctctttgtgcagggacgagtaccataaggtgagcggcttggacaatgccaagcagatttgggacaccctcaagatctctcatgaggggaacgatgtcaccctactcaccaagatggagttggtggagggcgaacttggatggttcgcaatgataaggggcgaggagccaactcaaacatacaaccggctcaagacccttatcaacaaaataaggagctacggaagcacgcgatggacggatcacgacgtcgtccgcctaatgctaaggtcctttactgttcttgatcctcatttggtgaacaatattcgtgaaaatcctaggtacaccaagatgtcgcccgaagaagtacttggaaaatttgttagcgggcgaatgatgatcaaggaggcaagatacgtggacaacgccttgaatggtccgatcaacgagccgcaaccccttgctctcaaggcaatgaggaacaaggaagcgctaccgagcaaggtggcgcaagttgaggcggccgggctcaataatgaggagatggccctcatcattaagcgcttcaagacggcgcttaaaggtcgcaagggacagccaagcaagaccaagacaaaggagaagcgctcgtgcttcaaatgtggtaagattggtcatttcattgctaactgtcccgataatgaaagtgaccaggaaaaggggaacaaaagggagaagaagaagcattacaagaaggccaagggcgaggcacatataggaaaggagtgggattcggattgctcctcctccgactccgacaatgaaggactcgccgccaccgccttcaacaagtcatctctcttccccaacgagcgtcacacatgccttatggcaagggaaaagaaggtgagtactcgagactccacttatgcttcttctagtgataatgagtctagtgatgatgatgacatagactattcatgcttattcaaaggcttagatagatctaagatagataagattaatgagttgattgatgctttgaatgacaagaatagattactagaaaaacaagaagatcttttatatgaggagcatgataaatttgttaatgcacaaaattcttatgctttagaagttaaaagaaatgaagtgctttctagtgaattgtcttcttgtcatgaaaccattactactttaaagagtgttaatgatgacttaaatgctaaactagaaggagctagtaaaaattcttgtgtagaacatgttgagatttgcactaggtgtaaagatttcgatgttgatacttgtagtaaacacctagtctcaatttctaatttgaatgatgaagtggctagtcttaatgcccaacttaagactagtaaaagcgaatttgataaattaaaatttgcaagggatgcctatacgattggtagacatccctcaattaaggatggacttggcttcaaaagggaagccaagaacttaacaagccataaggctcccattcccgctaaggagaaagggaaggcccctatggctactagtgctaaaaggaaccatgcctttttgtatcatgataggaaaaattctagaaatgcttttagaagttatgatgcttttgattcacatgcttatgattcttgtactatgactgcttctagttctcatgttatgcatgatagaaaagttggtagaagaaatgttattcataatatgcctaggagaaatgttgttaatattcctaggaaagttaatgagccttctacaatatatcatgctttgaatgcttcctttgcaatttgtagaaaggatagaaatgtgattgctaggaaattaggggcaaaatgcaagggtgataaaacttgcatttgggtccctaagacaattgtgactaaccttgtaggacccaacaagagttgggtttatgcatccgggggttcaagctggattatcgacagcggatgcacaaaccatatgacgggggagaagaagatgttcacctcctacgtcaagaataaggattcccaagattcaattatattcggtgatgggaatcaaggcaaggtaaaagggctagatgtgtctgtctttagaagaagggatggttcactagcatttaagggtgtattagacggcaaactttatttagttgattttgcaaaagaggaggccggtctagatgcatgcttaatagctaagactagcatgggctggctgtggcatcgccgcttagcacatgtggggatgaagaaccttcacaagcttctaaagggagaacacgtgataggtttgactaacgtacaattcgaaaaagatagaccttgtgcagcttgtcaagcaggtaaacaagtgggaggagcacatcacagcaagaatgtgatgaccacatcaagacccctggagctgctacacatggatctcttcggacccgtcgcctatctgagcataggaggaagtaagtatggtctagttattgttgatgacttttcccgcttcacttgggtgttctttttgcaggataaatctgaaacccaagggaccctcaagcgcttcctcaggagagctcaaaatgagtttgagctcaaggtgaagaagataaggagcgacaacgggtcggaattcaagaaccttcaagtggaggagttccttgaggaggaagggatcaagcacgagttctccgctccctacacaccacagcaaaatggtgtggtagagaggaagaacaagacgctaatcgacatggcgaggactatgcttggagaattcaagacccccgagcgtttttggtcggaagccgtgaacacggcttgccacgccatcaacagggtctaccttcaccgcctcctcaagaagacttcgtatgagctactaaccggtaacaaacccaatgtatcctactttcgtgtttttggaagcaaatgctacattctagtgaagaaaggtagaaattctaaatttgctccaaaagctgtagaagggtttttgttaggttatgactcaaatacaaaggcgtatagagtcttcaacaaatcatcgggtttggttgaagtctctagcgacgttgtatttgatgagactaatggctctccaagagagcaagttgttgattgtgatgatgtagatgaagaagatgttccaacggccgctatacgaaccatggcgattggagaagtgcggccacaggaacaagatgaacgtgatcaaccttcttcctcaacaaaggtgcatcccccaactcaagacgatgaacaggttcatcaaaaggaggcgtgtgatcaagggggagcacaagataatcaagaaatggaggaagaaacgcaaccggcacctccaatccaagttcgagcgatgattcaaagggatcatcccgtcgaccaaattctgggtgatattagcaagggagtaactactcgatctcgattagttaatttttgtgagcattactcctttgtctcttctattgagcctttcagggtagaggaggccttgctagatccggactgggtgttggccatgcaggaggagctcaacaacttcaagcgcaatgaagtttggacactggtgcctcatcccaagcaaaatgttgtgggaaccaagtgggtgttccgcaacaaacaggacgagcacggggtggtgacgaggaacaaggctcgacttgtggcaaaaggttatgcccaagtcgcaggtttggactttgaggagacgtttgctcctgtggctaggctagaatcaattcgtatcttgctagcatatgccgctcaccattctttcaggttgtaccaaatggatgtgaagagcgctttcctcaacgggccgatcaaggaggaggtgtacgtggagcaaccccctggcttcgaggatgaacggtaccccgaccacgtgtgtaagctctctaaggcgctctatggacttaagcaagccccaagagcatggtatgaatgtcttagagactttcttattgttaatgctttcaaggttgggaaagccgatccaactctctttactaagacatgtgatggtgatttgtttgtgtgccaaatttatgtcgatgacataatatttggttctactaaccaaaagtcttgtgaagagtttagcagggtgatgacgcagaaattcgagatgtcgatgatgggcgagttgaactacttccttgggttccaagtgaagcaactcaaggacggcaccttcatctcccaaacgaagtacacgcaagatctgctaaagcggtttgggatgaaggatgccaagcccgcaaagactccgatgggaaccgacggacacaccgacctcaacaaaggaggtaagtccgttgatcaaaaagcataccggtcaatgatagggtctttactttatttatgtgctagtagaccggatattatgcttagcgtatgcatgtgtgctagatttcaatccgatcctaaggagtgtcacttagtggcggtgaagcgaattttaagatatttggttgctacgccttgtttcgggctctggtatccaaaagggtcgacctttgacttggttggatactcagattccgactatgctggatgtaaggtcgataggaagagtacatcagggacgtgccaattcttaggaaggtccctggtgtcgtggaactctaagaaacaaacctccgttgccctatccaccgctgagaccgagtacgttgccgcaggacagtgttgcgcgcaactgctttggatgaggcaaaccctccgggactttggctacaatctgagcaaagtcccactcctatgtgataatgagagtgctatccgcatggcggaaaatcctgttgagcacagccgcacaaagcacatagacatccggcatcactttttgagagaccaccagcaaaagggagatatcgaagtgtttcatgttagcaccgagaaccagctagccgatatctttaccaagcctctagatgagaagaccttttgcaggttgcgtagtgagctaaatgtcttagattcgcgaaacctggattga

SEQ ID NO: 4647 - DNA, 5265 bp, Zea mays
  Clone ID: TF_ZM4352.C4.o3.fg
atggatcctaaggggaagggaatcgtgatcaacgacaaggaaaaggagtccttcgtcaacgagccaaaagatgacaaatccaacgactctggctcgggccacagacgtaaagatgggaagaagaagaagacaaggcgcatcaaggagatcgtctactacgacagcgacgaatcctcttcttcccaaaacgacgacgacaacgactacaggaagacggtcaattcgaacttttcatttgattattctcgtattccacatagttcgaattcacatttgctttccattcctcttggcaaacctccacactttgatggggaggactacggattttggagtcacaaaatgcgtagtcatttattctctctccatccaagcatatgggagattgtagagaatggaatgaaatttgatagctcggatagccctatgtttattaatgaacaaattcataaaaatgcacaagctactactgtgttgctagcctctttgtgcagggacgagtacaataaggtgagcggcttggacaatgccaagcagatatgggacaccctcaagatttctcacgaggggaacgacatcaccatgctcactaaaatggagttggtggagggcgagcttggaaggtttgcaatgataaggggcgaggagccaacccaaacatacaaccggctcaagacccttatcaacaaaataaggagttatggaagtacgcgatggacggatcacgacgtcgtccgcctaatgctaaggtcatttaccgttcttgatcctcatctcgtgaacaatattcgtgagaatcccaggtacacgaagatgacgcccgaggaggtactcggaaaattcgtaagcgggcggatgatgatcaaggaggcaagatacgtggacgacgccttgaatggaccgatcaacgaacatcaaccccttgctctcaaggcaacaagtagcaaggtggcacaaattgaggcggccggacttaatgatgaagagatggctctcatcatcaaacgcttcaagacggtgctaaaaggtcacaaggggcagccaagcaagaccaagacaaagagaaagcgctcatgcttcaagtgcggtaagattggtcattttatcgctaactgccccgataacgatagtgaccaggaacaggggaacaagagggaaaagaagaagaattacaagaaggccaaggacgaggcacacatcggaaaggagtgggattcggattgctcctccgactccgacaatgaaggactcgccgccaccgccttcaacaagtcatccctcttccccaacgagcgtcacacatgccttatggcaagggagaagaaggtgagtactcgagactccacttatgcttcttctagtgataatgagtctagtgatgatgatgacatagactattcatgcttattcaagggtttagatagatctaagatagacaaaattaatgaattgattgatgccttgaatgataagaatgtgcttttagaaaagcaagaggatttgttgtatgaggaacatgacaaatttgtagaagcacaaaaatcacttgcattagagattaagagaaatgaaatgctttcttgtgagttgtctacatgtcatgattcaattgctagtttaaagagcaaaaatgatgatttaaatgctaaactagaaaaatctagtaaatcaacatcttgtgtagaacatgttgagatttgcactaggtgtaaagatttcgatgttgatgcctgtagtgatcatttagtttcaatttccaaactaactgaggaattggctagtctcaatgcccaacttaagactagcaagaatgaatttgataaactaaaatttgcaagggatgcctacacgatcggtagacacccctcaattaaggatggacttggcttcaagagggaagccaagaacttaacaagccataagactcccattcccgctaaggagaaagggaaggcccctatggctactagtgttaaaaagaaccatgcctttttgtatcatgatagaaaaaattctagaaatgcttttagaagttatgatgcttatgattcacatgcttatgattcttatgctatgactgcttctagttctcatgttgtgcatgatagaaatgttggtagaaggaatgttgttaatattcctaggaaagttaatgagccttctacaatataccatgttttgaatgcttcctttgcaatttatagaaaggatagaaaggtttatgcatccgggggttctagctggattattgatagcggatgcacaaaccatatgacgggggagaagaagatgttcacctcctacgtcaagaataatgattcccaagattcaattatattcggtgatgggaatcaaggcaaggtaaaaggattagttgagtccttgggatataatttgctatctgttagtcaattatgcaacatggggtataactgtctatttacaaatgaagatgtgtctgtctttagaagaagtgatggttcactagcttttaagggtgtattagacggcaaactttatttagttgattttgcaaaagaggaagccggtctagatgcatgcttaatagctaagactagcatgggctggctgtggcatcgccgcttagcacatgtggggatgaagaaccttcacaagcttctaaaaggagaacacgtgataggtttgactaacgtgcaattcgaaaaagatagaccttgtgcagcttgtcaagcaggtaaacaagtgggaggagcacatcacagcaagaatgtgatgaccacttcaagacccctggagctgctgcatatggacctcttcggacctgtcgcctatctgagcataggagggagtaagtatggtctagttattgttgatgacttttcccgcttcacttgggtgttctttttgcaggataagtctgaaacccaagggaccctcaagcgcttcctcaggagagctcaaaatgagtttgagctcaaggtgaagaagataagaagcgacaacgggtccgagttcaagaaccttcaagtggaggagttccttgaggaggaagggatcaagcatgagttctccgctccctacacaccacatcaaaatggtgtggtagagaggaagaacaggacgctaattgatatggcgaggactatgcttggagagttcaagacccccgagcgattttggtcggaagccgtgaacacggcttgccacgccatcaacagggtctaccttcaccgcctcctcaagaagacgtcgtatgagctactaaccggtaacaaacccaatgtatcgtactttcgtgtatttgggagcaagtgctacattctagtaaagaagggtagaaattctaaatttgctcccaaagcagtagaagggtttttgttaggttatgactcaaatacaaaggcgtatagagtcttcaacaaatcatcaggtttggttgaagtctctagcgacgttgtatttgatgagactaatggctctccaagagagcaagttgttgattgtgatgatgtagatgaagaagatgttccgacggcccctatacgaactatggcgattggagaaatgcggccacaggaacaagatgaacgagatgaaccatcttcctcaactatggtgctacccccaactcaagacgatgaacaggaggcgtgtgatcaagggggagcacaagatgatcatgtgatggaggaagatgcgcaaccggcacctccaacccaagttcgagcgatgattcaaagggatcatcccgtcgaccaaattctgggtgacattagcaagggagtaactactcgatctagattagttaatttttgtgagcattactcctttgtctcttctattgagcccttcagggtagaggaggccttgctagatccggactgggtgttggccatgcaggaggagctcaacaacttcaagcgcaatgaagtttggacactggtgcctcgtcccaagcaaaatgttgtgggaaccaagtgggtattccgcaacaaacaggacgagcacggggtggtgacgagaaacaaggctcgacttgtggcaaaaggttatgcccaagtcgcaggtttggatttcgaggagacttttgctcctgtggctaggctagaatcaattcgtatcttgctagcatatgccgctcaccattctttcaggttgtaccaaatggatgtgaagagcgctttcctcaacgggccaatcaaggaggaggtgtacgtggagcaaccccctggcttcgaggatgaacggtaccccgaccatgtgtgtaagctctctaaggcgctctatggacttaagcaagccccaagagcatggtatgaatgccttagagactttctaattgttaatgctttcaaggttgggaaagccgatccaactctttttactaagacttgcaatggtgatttgtttgtgtgccaaatttatgtcgatgacataatatttggttctactaaccaagagtcttgtgaagagtttagcagggtgatgacgcagaaattcgagatgtcgatgatgggcgagttgaactacttccttgggttccaagtgaagcaactcaaggatggcactttcatctcccaaacgaagtacacgcaagacttgctaaagaggtttgggatgaaggacgccaagcccgcaaagacgccgatgggaaccgacagacacacagacctcaacaaaggaggtaagtccgttgatcaaaaagcataccggtccatgataggttctttgctttatttatgtgctagtagaccggatattatgcttagcgtatgcatgtgtgctagatttcaatccaatcctaaggagtgtcacttagtggcggtgaagcgaattcttagatatttagttgctacgacttgcttcgggctctggtatccaaaggggtctacctttgacttagttggatactcagactccgactatgctggatgtaaggtcgataggaagagtacatcggggacgtgccaattcttaggaaggtccctggtgtcatggaattctaagaaacaaacttccgttgccctatccaccgctgaggccgagtatgttgccgcaggacagtgttgcgcgcaactactttggatgaggcaaaccctccgggactttggctacaatctgagcaaagtcccactcctatgtgataatgagagtgctatccgcatggcggaaaatcctgttgaacacagccgcaccaagcacatagacatccggcatcactttttgagagaccaccagcaaaagggagatatcgaagtgtttcatgttagcaccgagaactag

SEQ ID NO: 4648 - DNA, 1074 bp, Zea mays
  Clone ID: TF_ZM4398.C1.o6.fg
atgacgcccgaggagatacttggaaagttcgtaagcgggcgaatgatgatcaaggaggcaagatacgttgatgatgcgttaaatggcccaatccatgagcctcaagccattgctctcaaggcaacaagtagcagggaggcgctacctagcaaggtggtgcaaattgaggcggctgggctaaatgaggatgaaatggccctcatcatcaagcgcttcaagacggcgctcaaaggtcgcaaggagcatcccaacaaaagcaagacgaagggaaagcgctcctgcttcaagtgtggtaagattggtcattttatcgctaattgtcccgataatgatagtgaccaggaacaagagaagaagagggaaaagaagaaggcttacaagaaggctaagggagaggcacaccttggcaaggaatgggactcggattgttcgtcgtccgactccggcaacgaaggactcgccacctcagcctttaacaaatcgtctctcttccccaacgagcatcacacctgcctcatggcaaaggagaagaaggtttatgcatccgggggatcaagctggattatcgaccgcggatgcacaaaccacatgacgggggagaagaagatgttctcttcctacatcaagaacaaagattcccaagactcaatcatattcggtgacgggaatcaagacaaggataaatctaaaacccaagggaccctcaagcgcttcctaaggagagctcaaaatgagtttgagctcaaggtgaagaagataaggagcgacaacgggtccgagttcaagaaccttcaagtggaggagtaccttgaggaggaaggaatcaagcatgagttctccgctccgtacacaccacaacaaaatggtgtgatgaagaagacattccaacggtcgcaatacgtaccacggcgattggcgatgtgcgaccacaggaacaaaaggagcaagatcaaccttcttcctcaacaatggtgcatcccccaactcaagatgatgaacaggttcatcaataagaggcgcgtgatcaagggggagcacaagatgatcatgttatggaggaagaagcacaactga

SEQ ID NO: 4649 - DNA, 1549 bp, Zea mays
  Clone ID: TF_ZM4447.C1.o26.fg
atggatcctaaggggaagggtatcgcgatcaacgataaagagaaggaatccttcgtcaacgagccgaaggacgacaagcctaccgactccggctcgggccatagacggaaagaagggaagaagaagaagacgaggcgcatcaaggagatcgtctactacgacgacagcgatgagtctacttcctcccaaaaggacgacgaccacaacgactacgagagaaggaaatcggtcaattcgaacttttcttttgactactctcgtattcctcaaagtgcaaatgctcatttattatctattccacttggcaaacctcctcattttgatggagaggactacggattttggagtcacaaaatgcgtagtcacttgttctctctccatcctagtatatgggagattgtagagagtggaatgcactttgatagttcggatagtcccatgttcattaatgagcaaattcataagaatgcacaagctactactgttcttctagcttcattgtgcagggatgaatatcacaaagtacaccaaaatgtcgcccgaagaagtccttggaaaattcgtaagcgggcgaatgatgatcaaggaagcaagacaacgcttaagggtcgcaagggacagccaagcaagaccaaagccaaggggaagcgctcatgcttcaaatgcggtaagattggtcattttattgctaactgtcccgataatgaaagtgaccaggaacacgggagcaagagggaaaagaagaaaaattacaagaaggccaagggcgaggcacatctaggaaaggagtgggactcggattgctcctcctccgactccgacaatgaaggaatcgccgccaccgccttcaacaagtcatccctcttccgcaacgagcgtcacacatgccttatggcaagggagaagaaggtatgtagtcgaaactctacttatgcttcttcaagtgaggacgaatctagtgatgaggatgaaatagattattcatgtttatttaagggcctagatagaaccaaggtagataaaattaatgaattaattgatgccttgaatgataagaataggcttttagaaaaacaagaagatttgttgtatgaagaacatgacaaatttgtagaagcacaaaaatctcatgctttagaagttaaaagaaatgaaatgctttcttgtgaattatcttcttgccatgagacgatttctagcttaaggagcattaatgatgatttgaatgctaagatagaaatagctagtaaatcaacaacttgtgtagaaaatgttgttatttgcaatagatgtaaagactttgatattgatgcttgtagtgaacacatagcttctattgcaaagttaaatgatgaaatggctagtcttaatgcccaacttaaggctagcaaaagtgattttgataaactaaaatttgctagggatgcctacacgattggtagacacccctcaattaaggatgggcttggcttcaagagggaagccaagaacttaacaagccataaggctcccatctccgccaaggagaaagggaaggcccctatgacaa

SEQ ID NO: 4650 - DNA, 4053 bp, Zea mays
  Clone ID: TF_ZM4449.C5.o10.fg
atggatcctaagggaaaggggatggtggtcgacaacaacgagaaggagtctatcttcaacgagccgaagaatgacaaggacgagtacaataaggtgagcggcttggacaatgccaagcagatatgggacaccctcaagatttctcacgaggggaacgacatcaccatgctcactaaaatggagttggtggagggcgagcttggaaggtttgcgatgataaggggcgaggagccaacccaaacatacaaccggctcaagacccttatcaacaaaataaggagctatggaagcacgcgatggacggaccatgacgtcgtccgactattactaaggtcctttaccattcttgatcctcatttggtgaataatattcgtgagaatcccaggtacaccaaaatgtcgcccgaagaagtcctaggaaaattcgtcagcgggcaaatgatgattaaggaagcaaggtacgtggacgacgccttgaatggaccgatcaacgagccacaacctcttgctctcaaagcaacaagaagcaaggaggcactacctagcaaagtggcacaaattgaggcggccggacttaatgatgaagagatggctctcatcatcaaacgcttcaagacggtgctaaagggtcacaaggggcagccaagcaagaccaagacaaaggggaagcgctcatgcttcaagtgcggtaagattggtcattttatcgctaactgccccgataataatagtgaccaagaacaggaaaacaagagggaaaagaagaagaattacaagaaggcaaagggcgaggcgcatctaggcaaggaatgggactcggactgctcctcctccgactccgacaatgaaggactcgccgccaccgccttcaacaagtcatccctcttccccaacgaacgtcacacatgccttatggcaagggagaagaaggtgagtactcgagactccacttatgcttcttcaagtaatgatgagtctagtgatgatgatgacatagactattcatgcttattcaagggattggatagaaataaaattgataaaatcaacgaattgattgatgcattgaatgagaaggataaactcttagagaaacaagaggatttattgtatgaagagcatgataaatttgtagaagctcaaagatctcatgctctagaagttaaaagaaatgaaatgctttcttgtgaattatcttcttgccatgagacaatttctaaattaaggagcattaatgatgatttgaatgctaagttagagattgctagtaaatctacttcttgtgtagaaaatgttatgacatgcactaggtgtaaagatattaaccttgatgcttatggtgaacacctagcttgcatttctaaattaaatgaagaggtagctagtcttaatgcccaacttaagactagcaaaagtgattttgagaaactaaaatttgctagggatgcctacacggtcggtagacacccctcaattaaggatggacttggcttcaagagagaagtcaagaacttaacaagccataaggcttccatttccgccaaggagaaagggaaggcccctatggctagtagtgtgcaaaagaaccatgcgtttatataccatgacaggagacaatctagaaatgcttataggagttataatgcttatgatgattttgactctcatgccatgtttgcttctagttcttcctatatgcatggtagaaatatgtctagaaaaaatgctattcatcatatgcctagaaagaatgttattcatgctcctaggaaagtagtgaatgaaccttctacaatttattgtgctttaaatgcttcctttgctatttgtagaaaggataagaaaatagttgctaggaagttaggggcaaaatgcaagggagacaaaacttgcatttgggtccctaaggatatttgcactaaccttgtaggacccaacatgagttgggtctatgcatccgggggttcaagctggattatcgacagcggatgcacaaaccatatgacgggggagaagaagatgttcacctcctacgtcaagaataaggattcccaagattcaattatattcggtgatgggaatcaaggcaaggataagtctgaaacccaagggaccctcaagcgcttcctcaggagagctcaaaacgagtttgagctcaaggtgaagaagataaggagcgacaacgggtccgagttcaagaaccttcaagtggaggagttccttgaagaggaagggatcaagcacgagttctctgctccctacacaccacagcaaaatggtgtggtagagaggaagaacatgacgcttattgatatggcgaggacgatgctaggagaattcaagacccccgagtgcttttggtcggaagccgtgaacacggcttgccacgccatcaacaggatgaagaagatgttccgacggccgctatacgaaccatggcgattggagaagtgcggccacaggaacaagatgaacgagatcaaccttcttcctcaacaatggtgcattcccctactcaagacgatgaacagggtagaagaggccttgctagatccagactgggtgttggccatgcaagaggagctcaacaacttcaagaggaatgaagtttggacgctggtgcctcgtcctaagcaaaatgttgtgggaaccaagtgggtgttccgcaacaaacaagacgagcacggagtggtgacaaggaacaaggctcgacttgtggcaaaaggttatgcccaagtcgcaggtttggactttgaggagacttttgctcccgtggctaggctagagtccattcgtatcttgctagcatatgccgctcaccattctttcaggttgtaccaaatggatgtgaagagcgctttcctcaacgggccaataaaggaggaggtgtacgtggagcaaccccctggcttcgaggatgaacggtaccccgacgacgtgtgtaagctctctaaggcgctctatggacttaagcaagccccaagagcatggtatgaatgccttagagatttcttaattgctaatgctttcaaggttgggaaagccgatccaactcttttcactaagacatgtgatggtgatttgtttgtgtgccaaatttatgtcgatgacataatatttggttctactaataaaaaatcttgtgaagagtttagctgggtgatgacgcagaaattcgagatgtcaatgatgggcgagttgaactacttccttgggttccaagtgaagcaactcaaggacggcaccttcatctctcaaacaaagtacacgcaagacctgctgaagcggtttgggatgaaggacgccaagcccgcaaagactccgatgggaaccgacggacacaccgacctcaacaaaggaggtaaatccgttgatcaaaaagcataccggtcaatgatagggtctttactttacctatgtgctagtagaccggatattatgcttagcgtatgcatgtgtgctagatttcaatccgatcctaaggagtgtcacttagtggcagtgaagcgaatccttagatatttagttgctacgccttgcttcgggctctggtatccaaaggggtctacctttgacttgattggatattcagattccgactatgctggatgtaaggtcgataggaagagtacatcagggacgtgccaattcttaggaaggtccctggtgtcatggaattctaagaaacaaacctccgttgccctatccaccgctgaggccgagtatgttgccgcaggacagtgttgcgcgcaactactttggatgaggcaaaccctcagggactttggttacaatctgagcaaagtcccactcctatgtgataatgagagtgctatccgcatggcggaaaatcctgttgagcacagccgcacaaagcacatagacatccggcatcactttttgagagaccaccagcaaaaggaagatatcgaagtgtttcatgttagcaccgagaaccagctagccgatatctttaccaagcctctagatgagaagaccttttgcaggctgcgtagtgagctaaatgtcttagattcgcggaacttggattga

SEQ ID NO: 4651 - DNA, 1719 bp, Zea mays
  Clone ID: TF_ZM4449.C5.o3.fg
atggatcctaaagggaagggaatcgtgatcaacgacaaggagaaggagtctttcgtcaacgagccaagggatgacaagtccaacgactcgggctcgggccacagacgcaaagatgggaagaagaagaagacaagacgcatcaaggagatcgtctactacgacagcgatgagtccacttcctcccaaaaggacgacgaccacaacgaatacgagagaaagaaaccggtcaattcaaacttttcttttgattactctcgtattcctcaaagtactaatgctcatttattatctattccacttggtaaacctcctcattttgatggagaggactacggattttggagtcacaaaatgcgtagtcacttgttctctctccatcctagcatatgggagattgtagaaagtggaatgcactttgatagtacggatagtcccatgtttattaatgaacagattcataaaaatgcacaagctactactgtgttgctagcctctttgtgcagggacgagtaccataaggtgagcggcttggacaatgccaagcagatctgggacaccctcaagatctctcatgaggggaatgatgtcaccttgctcaccaagatggagttggtggagggcgagcttggacggttcgcaatgataaggggcgaggagccaactcaaacatacaaccggctcaagacccttatcaacaaaataaggagctacggaagcacgcgatggacggatcacgacgtcgtccgcctaatgctaaggtcctttaccgttcttgatcctcacttggtgaacaatattcgtgaaaatcctaggtacaccaagatgtcgcccgaagaagttctggggaagttcgtaagcgggcgaatgatgatcaaggaggcaagatatgtggacgacgcgttgaacggtcctattcatgagcctcaacccattgctctcaaggcaacgaggatcaaggaggcgctaccgagcaaggtggcacaagttgaggcggccgggctaaataatgagatggccctcatcattaagcgcttcaagacggcgcttaaaggtcgcaagggacagccaagcaagaccaagacaaaggagaagcgctcgtgcttcaaatgtggtaagattggtcatttcattgctaactgtcccgataatgaaagtgaccaggaaaaggggaacaaaagggagaagaagaagcattacaagaaggccaagggcgaggcacatatcggaaaggagtgggattcggattgctcctcctccgactccgacaatgagggactcgccgccaccgccttcaacaagtcatccctcttccccaacgagcgtcacacttgcctcatggcaagggagaagaaagtaagcactcatgatactagtacttatgcttcttcaagtgaggatgagtctagtgatgatgatgagatagattactcatgcttattcaaaggattagatagatctaaaattaataagattaatgagttgattgatgctttgaatgataagaatagattactagaaaaacaagaggatcttttatatgaggagcatgataaatttgttagtgcacaaaattctcttgctctagaaattaaaaggaatgaaatgctctctagtgaattatctacttgtcatgaatccatctctaaattaaaaagtgttaatgatgatttgaatgctaagttagaaatagctagtaaatcaacatcttgtgtagtgtaa

SEQ ID NO: 4652 - DNA, 5529 bp, Zea mays
  Clone ID: TF_ZM4451.C1.o17.fg
atggatcctaaagggaagggaatcgtgatcaacgacaaggagaaggagtccttcgtcaacgagccaagagatgataagtccaacgactcaggctcgggccacagacgcaaagatgggaagaagaagaagacaagacacatcaaggagatcgtctactacgacagcgatgagtctacttcctcccaaaaggacgacgaccacaacgaatacgagagaaagaaaccggtcaattcgaacttttcttttgattactctcgtattcctcaaagtactaatgctcatttattatctattccacttggtaaacctcctcattttgatggagaggactacagattttggagtcacaaaatgcgtagtcacttgttctctctccatcctagcatatgggagattgtagaaagtggaatgcactttgatagtacggatagtcccatgtttattaatgaacagattcataaaaatgcacaagctactactgtattgctagcctctttgtgcagggacgagtaccataaggtgagcggcttggacaatgccaagcagatctgggacaccctcaagatctctcatgaggggaatgatgtcaccttgctcaccaagatggagttggtggaaggcgagcttggacggttcgcaatgataaggggcgaggagccaactcaaacatacaaccggctcaagacccttatcaacaaaataaggagctacggaagcacacgatggacggatcacgacgtcgtccgcctaatgctaaggtcctttaccgttcttgatcctcatttggtgaacaatattcgtgaaaatcctaggtacaccaagatgtcgcccgaagaagttctggggaagttcgtaagcgggcgaatgatgatcaaggaggcaagatatgtggacgacgcgttgaacggtcctattcatgagcctcaacccaatgctctcaaggcaacgaggagtaaggaggcactaccgagcaaggtggcgcaagttgaggcggccgggctaaataatgaggagatggccctcatcattaagcgcttcaagacggcgcttaaaggtcgcaagggacagccaagcaagaccaagacaaaggagaagcgctcgtgcttcaaatgtggtaagattggtcatttcattgctaactgtcccgataatgaaagtgaccaggaaaaggggaacaaaagggagaagaagaagcattacaagaaggccaagggcgaggcacatatcagaaaggagtgggattcggattgttcttcctccgactccgacaatgaaggactcgccgccaccgccttcagcaagtcatccctcttccccaacgagcgtcacacttgcctcatggcaagggagaagaaagtaagcactcataatactagtacttatgcttcttcaagtgaggatgagtctagtgatgatgatgagatagattactcatgcttattcaagggattagatagatctaaaattaataagtttaatgagttgattgatgctttgaatgacaagaatagattactagaaaaacaagaggatcttttatatgaggagcatgataaatttgttagtgcacaaaattctcttgctctagaaattaaaaggaatgaaatgctctctagtgaattatctacttgtcatgaatccatctctaaattaaaaagtgttaatgttgatttgaatgctaagttagaaatagccagtaaatcaacatcttgtgtagaaattgttgaaacttgcaataggtgtaaagattttgacattgatggttgtagtgatcatttagtttcaatttccaaattaaatgaggaattggctagtcttaatgcccaacttaagactagcaagaatgaatttgataagctgaaatttgcaagggatgcctacacgattggtagacacccctcaattaaggatggacttggctacaagagggaagccaaggacttgacaagccataaggctcctatctccgccaaggagaaagggaaggctcctatggctagtagtactaaaaggaaccatgcttttatgtatcatgataggagacaaactagaaatgcttataggagttataatgcttatgatgattttgactctcatgccatgtttgcttctagttcttcctatatgcatggtagaaatatgtctaggagaaatgctattcatcatgtgcctagaaagaatattattcatgctcctaggaaaatagtgaatgaaccttctacaatttattgtgctttaaatgcttcctttgctatttgtagaaaggataggaaaatagttgctaggaagttaggggcaaaatgcaagggagacaaaacttgcatttgggtccctaaggatatttgcactaaccttgtaggacccaacatgagttgggtttatgcatccgggggttcaagctggattatcgacagcggatgcacaaaccatatgacgggggagaagaagatgttcacctcctacgtcaagaataaggattcccaagattcaattatattcggtgatgggaatcaaggcaaggtaaaagggttagttgagtctcttggttacaatttgctatctgttagtcaactatgcaatatgggatataattgtctttttacaaatgtagatgtgtctgtctttagaagaagtgatggttcactagcctttaagggtgtattagacggcaagctttacttagttgattttgcaaaagaagaggccggtctagatgcatgcttaattgctaagactagcatgggctggctgtggcatcgccgcttagcacatgtggggatgaagaaccttcacaagcttctaaagggagaacacgtgataggtttgactaacgtacaattcaaaaaagatagaccttgtgcagcttgtcaggcaggtaaacaggtgggaggagcgcatcacagcaagaatgtgatgaccacatcaagacccctggagctgctacatatggacctcttcggacccgtcgcctatctaagcataggaggaagtaagtatggtttagttattgttgatgacttttcccgcttcacttgggtgttctttttgcaggataagtctgaaacccaagggaccctcaagcgcttcctcaggagagctcaaaatgagtttgagctcaaggtgaagaagataaggagcgacaacaggtccgagttcaagaaccttcaagtggaggagttccttgaggaggaagggatcaagcacgagttctccgctccctacacaccacagcaaaatggtgtggtagagaggaagaacaggacgctaatcgatatggcgaggacgatgcttggagaattcaagacccccgagcgtttttggtcggaagccgtgaacacggcttgccacgccatcaacagggtctaccttcatcgcctcctcaagaagacttcgtatgagctactaaccggtaacaaacccaatgtatcttactttcgtgtatttgggagcaggtgctacattctagtaaagaagggtagaaattcaaaatttgctcccaaagctgtagaagggtttttgttaggttatgactcaaatacaaaggcgtatagagttttcaacaaatcatcgggtttggttgaagtctctagcgacgttgtatttgatgagactaatggctctccaagagagcaagttgttgattatgatgatgtagatgaagaagatgttccgacggctgctatacgaaccatggcgattggagaagtgcggccacaggaacaagatgaacgagatcaaccttcttcctcaacaacggtgcatcccccaactcaagacgttgaacaggttcttcaaaaggaggcgtgtgatcaagggggagcacaagatgatcacgtgatggaggaagaagtgcaaccggcacctccaacccaagttcgagcggtgattcaaagggatcatcccgtcgaccaaattttgggtgacattagcaagggagtaactactcgatctcgattagttaatttttgtgagcattactcctttgtctcttctattgagccttacagggtagaggaggccttgctagatccggattggatattggccatgcaggaggaactcaacaacttcaagcgcaatgaagtttggacactggtgcctcgtcccaagcaaaatgttgtgggaaccaagtgggtgttccgcaacaaacaggacgagcacggggtggtgacgaggaacaaggctcgacttgtggcaaaaggttatgcccaagtcgcaggtttggactttgaggagacttttgctcctgtggctaggctagaatcaattcgtatcttgctagcatatgccactcaccattctttcaggttgtaccaaatggatgtgaagagcgcgttcctcaacgggccgatcaaggaggaggtgtacgtagagcaaccccctggcttcgaggatgaacggtaccccgaccatgtgtgtaagctctctaaggcgctctatggacttaagcaagccccaagagcatggtatgaatgccttagagactttttaattgctaatgctttcaaggttgggaaagccgatccaactctttttactaagacttgcaatggtgatctttttgtgtgccaaatttatgtcgatgacataatatttggttctactaatcaaaagtcttgtgaagagtttagcaggctgatgacacagaaatttgagatgtcgatgatggccgagttgaactacttccttgggtttcaagtgaagcaactcaaggacggcaccttcatctcccaaacaaagtacacgcaagacttgctgaagcggtttgggatgaaggacgccaagcccgcaaaaactccgatggggaccgacggacacaccgacctcaacaaaggaggtaagtccgttgatcaaaaagcataccggtcaatgatagggtctttactttatttatgtgctagtagaccggatattatgcttagcgtatgcatgtgtgctagatttcaatccgatcctaaggaatgtcacttagtggcggtgaagcgaattcttagatatttggttgctacgccttgcttcgggctctggtatccaaaggggtctacctttgacttggttggatactcagattccgactatgctggatgtaaggtcgataggaagagtacatcagggacgtgccaattcttaggaaggtccctggtgtcgtggaactctaagaaacaaacctctgttgctctatccaccgctgaggccgagtatgttgccgcagggcagtgttgcgcgcaactactttggatgaggcaaacccttcgggactttggctacaatctgagcaaagtcccactcctatgtgacaatgagagtgctatccgcatggcggaaaatcctgttgaacacagccgcacaaagcacatagacatccgacatcactttttgagagaccaccagcaaaagggagatatcgaagtgtttcatgttagcaccgagaaccagctagccgatatctttaccaagcctctagacgagaagaccttttgcaggttgcgtagtgagctaaatgtcttagattcgcggaacttggattga

SEQ ID NO: 4653 - DNA, 3720 bp, Zea mays
  Clone ID: TF_ZM4455.C2.o3.fg
atggatcctaagggcaaggggatggtggtcaatgataaggagaaggagtcattcgtcaatgatccaaaggatgacaagcccactgactcgggcatgagtcacaaaagaaaagacgggaagaagaagaaaacgaggcgcatcaaggagatcgtctactacgacgacagcgacgagtcctcttcttctcaaaaggacgacgacaacgactacgagaaaaagaagacggttaattcaaatttttcctttgattattctcgtattccgcaaagttccaatactcattttctttccattccccttggtaaaccccctcactttgatggagaggactacgaattttggagtcacaaaatgcgtagccacttgttctctctccatccaagtatatgcgagatagtagaaaatggaatgcattttgatagtacggatagtcccatgttcatcaatgaacaaaaccataaaaatgctcaagctactactgtccttttagcatctttgtgcagggaagaatacaataaggtgagtggcttggacaatgccaagcagatctgggacaccctcaagatatcacatgagggaaatgacgtcaccatgctcaccaagatggagttggtggagggagaacttgggagatttgcaatgatcaggggagaggagccaaaccaaacgtacaaccggctcaagaccctcatcaacaaaataaggagctatggaagcacacgatggacggaccacgacgtcgtccgcctactgctaaggtcttttactgtccttgatccacatcttgtaaacaatattcgtgagaatcccaggtacaccaagatgtcgcccgaagaagtacttgggaagtttgtaagcgggcggatgatgatcaaggaggcaagatacgtcgacgatgcattgaatggcccaatccacgagcctcaaaccgtggctctcaaagaaacaaggagcaaggaggcgctacctagcaaggtggcgcaagttgatgcgaccgggcttaatgaggaagaaatggccctcatcatcaagctgttcaaaacggcgctaaagggtcgcaaggagcaccccaacaagaacaagacgaaggggaagcgctcctgcttcaaatgtggtaagattggtcattttatcgctaattgtcccgataataatagtgaccaggaacaagataagaagagggaaaagaagaaggcttacaggaaggctaagggcgaggcacaccttggcaaggagtgggactcggattgctcttcgtccgactccgacaacgaaggactcgctgcatcggccttcaacaaatcatctctcttccccaacgagcactattctagtttattcaaaggtttagacagaaataaaattgataagatcaataaattgattgatgctttgaatgataagaatagattgttagaaaagcaagaggatcttttgtatgaagaacatgataaatttgtagaggcacaaaaatctcttgctttagaagttaaaaggaatgaaatgctttcttgtgaactatctacatgccatgagtctatttctaacttaaagagtattaatgatgacttgaatgctaagttagaagtagcaaatagatctaactcttgtgtagaacatgttgtgatttgcaataggtgtaaagattttaatgttgatgcgtgtagtgaacatctagtctccattgcaaaactaaacgatgaagtggctagtcttaatgcccaacttaagactagcaaggatgaatttgacaaactaaaatttgcaagggatgcctacactattggtagacacccctcaattaaggacgggcttggcttcaaaagggaagccaagaacttaactagtcataaggctcccattcccgctaaggagaaagggaaggcccctatgactaatagttgtcaaaagaaccatgctttcatgtaccatgataggaaattttctagaaatgctcattatgataggagttttaatgcttacaattcaaatgcaatgattgcctcaagttcttcgattatgcataatagaaatttgactagaaaaaatgttatgcctagaagaaatgttgttcatgttcctagcaaagtaaacaatgaaccttctacaatttatcatgcttgcaatgcttcctttgcaatttgtagaaaggatagaaaggtgattgctaggaaattaggggcaaaatgcaagggagataaaacttgcatttgggtccctaaggatattgtcactaaccttgtaggacccaacaagagttgggtttatgcatccgggggatcaagctggattatcgacagcggatgcacaaaccacatgacgggggagaagaagatgttcacctcctacatcaaaaacaaagattcccaagactcaatcatattcggtgacaggaatcaaggcaaggtgaaagggttaggaaaaatagctatttcatccgagcactccatttccaatgtgtttttagttgagtcgcttggatataacttgttgtctgtgagtcagctttgtaatatgggatataactgcttattcacaaatgtagatgtgtctgtctttagaaggagtgatggttcattagcttttaagggtgtattagacgacaaactctacttagttgattttgcaaaagaggaggccggtctagatgcatgcctaattgctaagactagcatgggctggctgtggcatcgccgcttagcacatgtggggatgaagaaccttcacaaacttctaaagggagaacacgtgataggtctaacaaatgttacttttgaaaaggatagacctcgtgcagcttgtcaagcaggtaaacaggtgggaagctctcatcataccaaaaatgtgatgaccacatcaagacctttggagttgcttcatatggacctcttcggacccgtcgcctatctaagtataggaggaagtaagtatggtcttgttatagttgatgatttttcctgcttcacttgggtattctttttgcaggataagtctgaaacccaagggaccctcaagcgcttcctaaggagagctcaaaatgagtttgagctcaaggtgaagaagataaggagcgacaatgggtccgagttcaagaaccttcaagtggaggagtaccttgaggaggaaggaatcaagcacgagttctccgctccctacacaccacagcaaaatggtgtggtagagaggaagaacaggacgcttatagacatggcaaggacaatgcttggagagttcaagacgcccgagcggttttggtcggaagccgtgaacacgacttgtcacgccatgaaccgggtctaccttcatcgcctcctcaagaagacgtcatacgagctactaaccggtaacaaacccaatgtttcgtattttcgagtttttgggagtaaatgctacattctagtgaagaagggtaggaattccaaatttgcccccaaagctgtagaagggtttttgttaggttatgactcaaatacaaaggcgtatagggtcttcaacaaatcattgggtttggttgaagtctctagcgacgttgtatttgatgagactaatggctctccaagagagcaagttgttgatcttgatgatgtagatgaagaagacgttccaacggccgcaatacgcaccatggcgattggagatgtgcggccacaggaacaaaaggagcaagatcaaccttcttcctcaacaatggtgcatcccccaactcaagacgataaatag

SEQ ID NO: 4654 - DNA, 1881 bp, Zea mays
  Clone ID: TF_ZM4548.C4.o1.fg
atggatcctaaggggaagggaatcgtgatcaacaataaggagaaggagtccttcgtcaacgagccaaaggatgacaagtccaacgactcgggctcgggtcataaacgaaaagatgggaagaagaagaagacaaggcgcatcaaggagattgtctactacgacagcgacgaatcttcctcttcccaaaaggacgacgaccacaacgactacgagcaaaggaaaccggttaattctaacttttcctttgactactctcgtattccgcaaagttcaaattcacatttgctttccattccactcggcaagcccccacactttgatggggaggactacggattttggagccacaaaatgcgtagtcacctattctctctccatcctagtatatgggagattgtagatagtggaatgcactttaatagttcggatagtcctatattcattaatgagcaaatccataagaatgcacaagctactactgttctcttagcatctttgtgcagggaagaatacaataaggtgagcggcttggacaatgccaagcagatatgggacaccctcaagatctctcacgagggcaacgacgtcaccatgctcaccaagatggagttggtggagggcgaacttgggagattcgctatgataaggggggaggagccaacccaaacatacaaccggctcaaaacccttgtcaacaagataagaagctatggaagcacgcgatggacggaccacgacgtcgtccgcctaatgctaaggtcctttaccattcttgatcctcatttggtgaataatattcgtgagaatcccaggtacaccaaaatgtcgcccgaagaagttcttgggaagttcgtaagcgggcgaatgatgatcaaggaggcaagatacgtggacgacgcgttgaacggtcctatccatgagcctcaacccattgctctcaaggcaacaaggagcaaggaggcgctaccaagcaaggtggcgcaagttgaggcagccgggctaaataatgaggagatggccctcatcattaagcgcttcaagacggcgcttaaaggtcgcaagggacaaccaagcaagaccaagacaaaggagaagcgctcatgcttcaaatgtggtaagatcggtcatttcattgctaactgtcccgataatgaaagtgaccaggaaaaaggggacaagagggaaaagaagaagcattacaagaaggccaagggcgaggcgcatctaggcaaagagtgggactcggactgctcctcctccgactccgacaatgaaggactcgccgccaccgccttcaacaaatcaaccctcttccccaacgagcgtcacacatgccttatggcaagggagaagaaggtatgtactcgcaactctacctatgcttcttcaagtgaggacgaatctagtgatgaggatgaagtagattattcatgtttgttcaagggcttagatagatctaagatagacaaaattaatgaattaattgatgccttgaatgaaaataatatacttttagaaaagcaagaggatttgttatatgaagaacatgataagtttgtagaggctcaaaaatccctcgcattagaaattaagaggaatgaaatgcttgcttgtgaagtgtcaacatgccatgattctatttctaacttaaagagcataaacgatgatttaaatgctaaactagtagaagcaaataaatccaactcttgtgttgaatatgttgaaatttgcactaggtgtaaggatattgatattaatgcttgtagcgaacacttagtttctatttcaaaattgaatgatgaattagctagtcttaatgctcaacttaagactagcaagagtaattttgataaactaaaatttgctagggatgcctacacg

SEQ ID NO: 4655 - DNA, 5121 bp, Zea mays
  Clone ID: TF_ZM4580.C3.o9.fg
atggatcctaaagggaagggaatcgtgatcaacgacaaggagaaggagtccttcgtcaacgagccaagggatgacaagtccaacgactcgggccacagacgcaaagatgggaagaagaagaagacaagacgcatcaaggagatcgtctactacgacagcgatgagtctacttcctcccaaaaggacgacgaccacaacgaatacgagagaaagaaaccgattcataaaaatgcacaagctactactgtgttgctagcctctttgtgcagggacgagtaccataaggtgagcggcttggacaatgccaagcagatctgggacaccctcaagatctctcatgaggggaatgatgtcaccttgctcaccaagatggagttggtggagggcgagcttggacggttcgcaatgataaggggcgaggagccaactcaaacatacaaccggctcaagacccttatcaacaaaataaggagctacggaagcacgcgatggacggatcacgacgtcgtccgcctaatgctaaggtcctttaccgttcttgatcctcatttggtgaacaatattcgtgaaaatcctaggtacaccaagatgtcgcccgaagaagttctggggaagttcgtaagcgggcgaatgatgatcaaggaggcaagatatgtggacgacgcattgaacggtcctattcatgagcctcaacccattgctctcaaggcaacgaggagcaaggaggcgctaccgagcaaggtggcgcaagttgaggcggtcgggctaaataatgaggagatgacactcatcattaagcgcttcaagacggcgcttaaaggtcgcaagggacagccaagcaagaccaagactaaggagaagcgctcgtgcttcaaatgtggtaagattggtcatttcattgctaactgtcccgataatgaaagtgaccaggaaaaggggaacaaaagggagaagaagaagcattacaagaaggccaaggacgaggcacatatcggaaaggagtgggattcagattgctcctcctccgactccgacaatgaaggactcgccgccaccgccttcaacaagtcatccctcttccccaacgagcgtcacacttgcctcatggcaagggagaagaaagtaagcactcatgatactagtacttatgcttcttcaagtgaggatgagtctagtgatgatgatgagatagactactcatgcttattcaaaggattagatagatctaaaattaataagattaatgagttgattgatgctttgaatgacaagaatagattactagaaaaacaagaggatcttttatatgaggagcatgataaatttgttagtgcacaaaattctcttgctctagaaattaaaaggaatgaaatgctctccagtgaattatctacttgtcatgaatccatctctaaattaaaaagtgttaatgatgatttgaatgctaagttagaaatagctagtaaatcaacatcttgtgtagaaattgttgaaacttgcaataggtgtaaagattttgacattgatgcttgtagtgaacacctagtttcaatttccaaacttaatgatgaattggctagtcttaatgctcaacttaagactagcaagagtaattttgataagctaaaatttgcaagggatgcctacacaattggtagacacccctcaattaaggatggacttggctacaagaaggaagccaagaacttgacaagccataaggctcccatctccgccaaggagaaagggaaggtccctatggatagtagtgtgcaaaagaaccatgcctttatgtaccatgataggagacaatctagaaatgcttataggagatgtaacgcatatggtacttttgattctcatgacatgtttgcttctagttcttcctatgtgcatgatagaaatgttggtaggagaaatgttgttcataatatgcctaggagaaatgttgttaatgttcctaggaaagtttatgcatccgggggttcaagctggattatcgacagcggatgcacaaaccatatgacgggggagaagaagatgttcacctcctacgtcaagaataaggattcccaagattcaattatattcggtgataggaatcaaggcaaggtaaaagggttagttgagtctcttggttacaatttgctatttgttagtcaactatgcaatatgggatataattgtctttttacaaatgtagatgtgtctgtctttagaagaagtgatggttcactagcctttaagggtgtattagacgacaagctttacttagttgattttgcaaaagaagaggccggtctagatgcatgcttaattgctaagactagcatgggctggctgtggcatcgccgcttagcacatgtggggatgaagaaccttcacaagcttctaaagggagaacacgtgataggtttgactaacgtacaattcgaaaaagatagaccttgtgcagcttgtcaagcaggtaaacaggtgggaggagcgcatcacagcaagaatgtgatgaccacatcaagacccctggagctgctacatatggacctcttcggacccgtcgcctatctaagcataggaggaagtaagtatggtttagtcattgttgatgatttttcccgcttcacttgggtgttctttttgcaggataagtctgaaacccaagggaccctcaagcgcttcctcaggagagctcaaaatgagtttgagctcaaggtgaagaagataaggagcgacaacgggtccgagttcaagaaccttcaagtggaggagttccttgaggaggagggaatcaagcatgagttctccgctccctacacacctcagcaaaatggtgtggtagagaggaagaacaggacgctcattgatatggcaaggactatgcttggagaattcaagacccccgagtgtttttggtcggaagccgtgaacacggcttgccacgccatcaacagggtctatcttcaccgcctcctcaagaagacctcatacgagcttctaaccggtaacaaacccaatgtatcgtactttcgtgtatttgggagtaaatgctacattctagtgaagaagggtaggaattccaaatttgctcccaaagctgtagaagggtttttactaggttatgattcaaatacaaaggcgtataggttcttcaacaaatcatcgggtttggttgaagtctctagcgacgttgtatttgatgagactaatggctctccaagagagcaagttgttgatcttgatgacgtagacgaagaagatgttccgacggctgctatacgaaccatggcgattggtgatgtgcgaccacaggaacaagatgagcaagatcaaccttcttcctcaactatggtgcatcccccaactcaagacgatgaacaggttcatcaacaggaggcgtgtgatcaagggggagcacaagatgatcatgtgatgggggaagaagcgcaaccggcacctccaacccaagttcgagcgatgattcaaagggatcatcccgtcgaccaaattctgtgtgatattagcaagggagtaactactcggtctcgattagttaatttttgtgaacattactcctttgtctcttctattgagcctttcagggtagaagaggccttgctagatccggactgggtgttggccatgcaagaggagctcaacaacttcaagaggaatgaagtttggacgctggtgcctcgtcctaagcaaaatgttgtgggaaccaagtgggtgttccgcaacaaacaagacgagcacggagtggtgacaaggaacaaggctcgacttgtggcaaaaggttatgcccaagtcgcaggtttggactttgaggagacgtttgctcctgtggctaggctagaatcaattcgtatcttgctagcatatgccgctcaccattctttcaggttgtaccaaatggatgtgaagagcgctttcctcaatgggccaatcaaggaggaggtgtacgtggagcaaccccctggcttcgaggatgaacggtaccccgaccacgtgtgtaagctctctaaggcgctctatggacttaagcaagccccaagagcatggtatgaatgccttagagatttcttaattactaatgctttcaaggttgggaaagccgatccaactcttttcactaagacatgtaatggtgatttgtttgtatgccaaatttatgtcgatgacataatatttggttctactaataaaaagtcttgtgaagagtttaacagggtgatgacgcagaaattcgagatgtcgatgatggacgagttgaactacttccttgggtttcaagtgaagcaactcaaggacggcaccttcatctcccaaacaaagtacacacaagacttgctgaagcggtttgggatgaaggacgccaagcccgcaaagactccgatggggaccgacggacacaccgacctcaacaaaggaggtaagtccgttgatcaaaaggcataccggtcaatgatagggtcgttactttacttatgtgctagtagaccggatattatgcttagcgtatgcatgtgtgctagatttcaatccgatcctaaggagtgtcacttagtggcagtgcagcgaatccttagatatttagttgctacgccttgcttcgggctctggtatccaaaggggtctacctttgacttgattggatattcggactccgactatgctggatgtaaggtcgataggaagagtacatcggggacgtgccaattcttaggaaggtccctggtgtcatggaactctaagaaacaaacttccgttgccctatccacagctgaggccgagtatgttgccgcaggacagtgttgcgcgcaactactttggatgaggcaaaccctcagggactttggctacaatctgagcaaagtcccactcctatgtgataatgagagtgctatccgcatggcggaaaatcctgttgagcacagccgcacaaagcacatagacatccgacatcactttttgagagaccaccagcaaaagggagatattgaagtgtttcatgttagcaccgagaaccagctagccgatatctttaccaagcctctagacgagaagaccttttgcaggttgcgtagtgagctaaatgtcctagattcgcggaacttggattga

SEQ ID NO: 4656 - DNA, 2379 bp, Zea mays
  Clone ID: TF_ZM4589.C1.o1.fg
atggatcctaagggaaaggggacggtggtcaacaacaacgagaaggagtctatcttcaatgagccgaaagatgacaagcctacggactcgggctcgagccacaaaagaagagacgggaaaaagaagacaaggcgcatcaaggagatagtctactacgacagcgacgaatcttcctcttcccaaaagtacgacgacgactacgagaaaaagaaaacggtcaattcgaacttttcttttgattactctcgtattcctcaatgtgcatatgctcatttactatccattccacttggtaaacctcctcattttgatggagaggactacggattttggagtcacaagatgcgtagtcacttgttctctctccatcctagcatatgggagatagtagagagtggaatgaaatttgatagctcgaatagccctttgtttatcaatgaacaaattcataaaaatgcacaagctactaatgttcttctagcttcattgtgcagggatgaataccacaaagtgagcggcttggacaatgccaagcagatctgggacaccctcaagatctcacatgagggcaacgacgtcaccatgctcaccaagatgcagttggtagagggcgaacttgggagattcgctatgataaggggggaggagccaacccaaacatacaatcggctcaagacccttgtcaacaagataaggagctatggaagcacgcgatggacggaccacgacgtcgtccgcctaatgctaaggtcctttactgttcttgatcctcatcttgtgaacaatattcgtgagaatcctagcgggcgaatgatgatcaaggaggcgagatacgtggatgatgcattaaatggcccaattcaagagcctcaaactattgctctcaaagcaacgaggagcaaggaggcgctacctagcaaggtggcacaaattgaggcggccgagcttaatgatgaagaaatggccctcatcatcaagcgtttcaagacggcgctaaggggtcgcaaggagcatcccaacaagaccaagacaaaggggaagcgctcatgcttcaaatgtggtaagattggtcactttatcgctaattgtcccgataatgatagtgacctggaaaagaagagtggaaaatgggaaaagaagaagaattacaagaaggcaaagggcgaggcacatattggaaaggagtgggattcggattgctccacgtccgactccgacaacgaaggactcgccgccaccgccttcaacaagtcatccctttttccaaacgagcatcacacatgcctcatggctaaggagaagaaaggattagatagatctaaaattgataagattaatgagttgattgatgccttgaatgacaagaatagattactagaaaaacaagaggatcttttatatgaggagcgagataaatttgttagtgcacaaaattctcttgctctagaaattaaaaggaatgaaatgctctcttgtgaattatctacttgtcatgaatccatctctaatttaagaagtgttaatgatgatttgaatgctaagttagagatcgctagtaaatctaactcttgtgtagaaaatgttgtaacttgcactaggtgtaaagatattaacattgatgcttgtagtgaacacctagctcgcatttctaaattaaatgacgaggtagctagtcttaatgcccaacttaagactagcaagagtgattttaataaactaaaatttgctagggatgcctacacggttggtagacacccctcaattaaggatgggcttggtttcaagagggaagccaagaacttaacaagccataaggctcccattcccgccaaggagaaagggaaggcccctatggctagtagtgctaaaaagaaccatgcttttatgtatatgataggagacatgctagaaatgcaaatagaagttatgatgcttttgattcatatgtttatgattctcatgccatgtttgcttctagttcttcctataagcatgatagagatatgtctaggagaaatgttgttcacactgcgtaggagaaatgttgttaatgttcctaggaaagttaatggaccttctacaatatatcatgctttaaatgcttccattgctatttgtagaaaagacaagaagatagttgctagaaaattaggggcaaaatgcaagggagacaaaacttgcttttgggtccctaaggatatttgtgctaaccttgtaggacccaacatgagttgggtttatgcatccgggggttcaagctggattatcgacagcggatgcacaaaccatatgacgggggagaagaagatgttcacctcctacgtcaaaaacaaggattcccaagattcaataatattcggtgatgggaaccaaggcaag

SEQ ID NO: 4657 - DNA, 5031 bp, Zea mays
  Clone ID: TF_ZM4611.C1.o2.fg
atggatcctaggggcaaggggacagtggtcaacgataaggagaaggagtccttcgtcaacgagcctaaagatgacaagcctaccgactcgagctcgggccacaaacaaagagatgggaagaagaagaagaagacgaggcgcatcaaggagatcgtctactacgacgacaacgacgagtcctcttcttcccaaaaggacgacgacaacgtctacgagaataagaagacgattaattcaaacttctcttttgattattctcgtattcctcaaagtaccaatgctcatttactctccattccacttgcctcattgtgcagggacgagtatcataaggtgagcggcttggacaatgccaagcagatctgggacaccctcaagatctcacatgaggggaacgacgtcaccatactcaccaagatggagttggtggaaggcgaactcgggagattcgcgatgataagaggggaggagccaacccagacgtacaacaggctcaaaaccctcgtcaacaagataaggagctatggaagcacgcgatggacggaccacgacgttgtccgcctaatgctaaggtcctttaccgtccttgatccacatcttatgaacaatattcgtgagaatcctaggtacacgaagatgacgcccgaggagatccttggaaagttcgtaagcgggtggatgatgatcaaggaggctagatacgtcgatgatgcattaaatggtccaatccaagagcctcaaactattgctctcaaggcaacaaggagcaaggaggcactacctagcaaggtggcgcaagttgaggcggccgggcttaatgaggaagaaatgacccttatcatcaagcggttcaagacgacgctaaagggtcgcaaggagcaccccaacaagaacaagacgaaggggaagcgctcctgcttcaaatgtggtaagattggtcattttatcgcaaattgtcccgataatgatagtgaccaggaaaagaagagtggaaagtgggaaaagaagaagaactacaagaaggcgaagggcgaggcacatcttggaaaggagtgggattcagattgctcctcgtccgactccgacaacgaaggactcgccgccaccgccttcaacaagtcatccctcttccccaacgagcatcacacttgcctcatggcaagggaaaagaaggtaagcactcgtaatactagtacttatgcttcttcaagtgaggatgagtctagtgatgatgatgaaatagattattcatgtttattcaaaggcctagatagaaccaaggttgataaaattaatgaattaattgatgccttgaatgataagaatatgttattagaaaagcaagagaatcttttgtatgaagagcatgataaatttgttagtgcacaaagttctcttgctctagaagttaaaaggaatgaaatgctttcttgtgaactatctacttgtcatgaaaccatttctactctaaaaggtattaatgatgatttaaatgctaaactagaagtagcaaataaatctaactcttgtgtagaacatgttataatttgcaataggtgcaaagattttaatgttgatgcttgtagtgaacacctagcttgcatttctaaattaaatgatgaagtggctagtcttaatgctcaacttaagactagcaagagtgaatttgacaagctaaaatttgcaagggatgcctacacgattggtagacacccctcaattaaggatggtcttggcttcaagagggaagtcaagaacttaacaagccaaaaggcttccatctccgccaaggagaaagggaaggcccctatggctagtagtgctcaaaagaaccatgccttcatgtatcatgataggagacattctagaaatgactatagaagttataatgattttgattctcatgcaatggttgcttctagctcctctattatgcatgatagaaacttagctaggagaaatgttattaataacatgcctagaagaaatgttgttcatgtgcctaggaaaacaaatagtgaaccttctacaatttatcatgctttaaatgcttcctttgctatttgtagaaaggataggaagataattgctagaaaattaggggcaaaatgcaagggagataaaacctgcatttgggtccctaaggctatttgtactaaccttgtaggacccaacatgagttgggtttatgcatccgggggatcaagctggattatcgacagcggatgcacaaaccacatgacgggggaaaagatgatgttctcttcctacgtcaagaacaaggatccccaagattcaatcatattcggtgatgggaaccaaggcaaggttaaaggcttaggcaagattgcaatctcaaatgagcactccatttctaatgtattcttagttgagtcgcttggatataatttgctatccaccttgtgcagcttatcaagcagggaaacaggtgggaagctctcatcatgccaaaaatgtgatgacaacatcaagacccctggagttacttcatatggacctcttcggacccgtcgcctatctaagcataggaggaagataaatctgaaacccaagggaccctggcgcttcctaaggagagctcaaaacgagtttgagctcaaggtgaagaagataaggagcgacaatgggtctgaattcaagaaccttcaagtggaggagtatcttgaggaggaaggaatcaagcacgagttctccgctccctacgcaccacagcaaaatggtgtggtagagaggaagaacaggacgcttatagacatggcgaggacgatgcttggagcattcaagacactcgagtgcttctggtcggaagctgtgaacacggcttgccacgccatcaaccgggtctaccttcatcgcctcctcaagaagacttcatatgagctgctaaccggtaacaaacccaatgtttcgtatttccgagtttttgggagtaaatgctacattctagtgaagaaaggtaggaatttcaaatttgctcccaaagccgtagaagggtttttgttaggttatgactcaaatacaaaggcgtatagggtcttcaacaaatcatcgggtttggttgaagtctctagcgacgttgtatttgatgagactaatggctctccaagagagcaagttgttgatcttgatgatgtagatgaagaagatgttccaacgaccgcaatgcgcaccatggcgattggagatgtgaggccaatggaacaaaaggagcaagatcaaccctcttcctcaacaatggtgcatcccccaactcaagaagatgaacaggttcatcaagaggaggcgtgtgatcaagggggagcacaagatgatcatgtaatggaggaagaaacacaaccgacacctccaacccaagttcgagcgatgattcaaagggatcatcccgtcgaccagattttgggtgacattagcaagggagtaactactcgttctcatttagttaatttttgtgagcattactcttttgtctcttctattgagcctttcagggtagaggaggccttgctagatccagactgggtgttggccatgcaggaggagctcaacaacttcaagagaaatgaagtttgtacactggtgcctcgtcccaagcaaaatgttgtgggaaccaagtgggtgttccgcaacaaacaagacgagcacggagtggtgacaaggaacaaggcacgacttgtggcaaaaggttatgcccaagtcgcaggtttggactttgaggagacttttgctcctgtggctaggctagagtccattcgtattttgctagcatatgccgctcaccattctttcaggttgttccaaatggatgtgaagagcgctttcctcaacgggccaatcaaggaggaggtgtacgtagagcaaccccctggcttcgaggatgaacggtaccccgaccacgtgtgtaagctctctaaggcgctctatggacttaagaaagccccaagagcatggtatgaatgccttagagactttttaattgctaatgctttcaaggttgggaaagtcgatccaactctttttactaagacttgtgatggtgatctttttgtgtgccaaatttatgtcgatgacataatatttggttctactaaccaaaagtcttgtgaagattttagcagggtgatgactcaaaagtttgaaatgtcgatgatgggcgagctaagctatttccttgggttccaagtgaggcaactcaaggatgggaccttcatctcccaaacgaagtacacgcaagacttgatcaagcggtttgggatgaaggacgccaagccggcaaagactccaatgggaaccgacggatacaccgacctcaacaaaggaggtaagtccgttgatcaaaaggcatataggtctatgatagggtctttactttatttatgtgctagtagaccggatattatgcttagcgtatgcatgtgtgctagatttcaatccgatccaagggaatgtcacttagtggcggtgaagcgaattcttagatatttagtcgctacgccttgcttcgggatctggtatccaaaggggtctacctttgacttgattggatattcagactccgactatgctggatgtaaggtcgataggaagagtacatcggggacgtgccaattcttaggaaggtccctggtgtcatggagttttaagaaacaaacttccgttgccctatccaccactgaggccgagtacgttgccacaggacagtgttgcgcgcaactactttggatgaggcaaaccctcagggactttggctacaatctgagcaaagtcccactcctatgtgataatgagagtgctatccgcatggcggataatcctgttgaacacagccgcacaaagcacattgacatccggcatcactttttgagagaccaccagcaaaagggagatatcgaagtgtttcatgttagcaccgagaaccagctagccgatatctttaccaagcctctagatgagaagaccttttgcaggctgcgtagtgagctgaatgtcttagattcgcggaacctggattga

SEQ ID NO: 4658 - DNA, 4785 bp, Zea mays
  Clone ID: TF_ZM4612.C4.o3.fg
atggatcctaagggaaaggggatggtggtcgacaacaacgagaaggagtctatcttcaacgagccgaagaatgacaagtctaccgacttgggctcaagccacaagcgcaaagatgggaagaagaagaagacaaggcgcatcaaggagatcgtctactacgacagcgacgaatcctcttcttcccaaaaggacgacgacaacgactacaggaagactgtcaattcgaacttttcgtttgattattctcgtattccacataattcgaattcgcatttgctttccattcctcttggcaaacctccacactttgatggggaggactacggattttggagtcacaaaatgcgtagtcatttattctctctccatccaagcatatgggaaattgtagagaatggaatgaaatttgatagctcggatagccctatgtttgttaatgaacagattcataaaaatgcacaagctactactgtgttgctagcctctttgtgcagggacaagtacaataaggtgagcggcttggacaatgccaagcagatatgggacaccctcaagatttctcatgaggggaacgacatcaccatgctcactaaaatggagttggtggagggcgagcttggaaggtttgcgacgataaggggcgaggagccaacccaaacatacaaccggctcaagacccttatcaacaaaataatgagctatggaagcacgcgatggacggaccatgacgtcgtccgactattactaaggtcctttaccattcttgatcctcatttggtgaataatattcgtgagaatcccaggtacaccaaaatgtcgcccgaagaagtcctaggaaatttcgtcagcgggcgaatgatgattaaggaagcaagatacgtggacgacgccttgaatggaccgatcaacgagccgcaacctcttgctctcaaagcaacaagaagcaaggaggcgctacctagcaaggtggcacaaattgaggcggccggacttaatgatgaagagatggctctcatcatcaaacgcttcaagacggtgctaaagggtcacaaggggcagccaagcaagaccaagacaaaggggaagcgctcatgcttcaagtgcggtaagattggtcattttatcgctaactgccccgataatgatagtaaccaggaacaggaaaacaagagggaaaagaagaagaattacaagaaggcaaagggcgaggcgcatctaggcaaggagtgggactcggactgctcctcttccgactccgacaatgaaggactcgccgccaccgccttcaacaagtcatccctcttccccaacgagcgtcacacatgccttatggcaagggagaagaaggtgagtactcgagactccacttatgcttcttctagtgataatgagtctagtgatgatgatgacatagactattcatgcttattcaagggcttagatagatctaagatagataaaattaatgaattaatcgatgccttgaatgataagaataggcttttagaaaagcaagaggatttgttgtatgaagaacatgacaaatttgtagaagcacaaaaatcacttgcattagagattaaaagaaatgaaatgctttcttgtgaggtgtctacatgtcatgattcaatttctagtttaaagagcataaatgatgatttaaatgctaaactagaaagatctagtaaatcaacatcttgtgtagagcatgttgtgatttgcactaggtgtaaagattttgacattgatgcttgtagtgaacacctagtttcaatttcaaaacttaatgatgaattggctagtcttaatgcccaacttaagactagcaaaagtgaatttgacaagttaaaatttgcaagggatgcctatacaattggaagacatccctcaattaaggatgggcttggcttcaagagggaagccaagaacttaacaagccataagactcccatctccgccaaggagaaagggaaggcccctatggctagtagagacaaactagaaatgcttatagaagttataataaatgttgctaggagaaatgctattcatcatgtgcctagaaagaatgttctttatgctcctaggaaagtagtgaatgaaccttctacagtttattgtgctttaaatgcctcctttgcaatctgtagaaaggatagaaaggtttatgcatccgggggttcaagctggattatcgacagcggatgcacaaaccatatgacgggggagaagaagatgttcacctcctacgtcaagaataaggattcccaagattcaattatatttggtgatgggaatcaaggcaaggataagtctgaaacccaagggaccctcaagcgcttcctcaggagagctcaaaatgagtttgagctcaaggtgaagaagataaggagcgacaacgggtccgaattcaagaaccttcaagtggaggagttccttgaggaagaaggaatcaagcacgagttctccgctccctacacaccacaacaaaatggtgtggtagaaaggaagaacaggacgctcatcgatatggtgaggacgatgctaggagagttcaagacccccgagtgcttttggacggaagccgtgaacacggcttgccacgccatcaacagggtctaccttcatcgcctcctcaagaagacctcatatgagctactaaccggtaacaaacccaatgtatcttactttcgtgtatttgggagcaagtgctacattctagtaaagaagggtagaaattctaagtttgctcccaaagctgtagaagggtttttattaggttatgactcaaatacaaaggcgtatagagtcttcaacaaatcatcgggtttggttgaagtctctagcgacgttgtatttgatgagactaatggctctccaagagagcaagttgttgatcttgatgatgtagatgaagaagatgtttcgacggccgctatacgaaccatggcgattggtgatgtgcgaccacaggaacaagatgagcaagatcaaccttcttcctcaactatggtgcatcccccaactcaagacgatgaacaggttcatcaacaggaggcgtgtgatcaagggggagcacaagatgatcatgtgatggaggaagaagcggaaccagcacctccaacccaagttcgagcggtgattcaaagggatcatcccgtcgaccaaattctgggggatattagcaagggagtaactactcggtctcgattagttaatttttgtgaacattactcctttgtctcttctattgagcctttcagggtagaggaggccttgctagatccggattgggtattggccatgcaggaggaactcaacaacttcaagcgcaatgaagtttggacactggtgcctcgtcctaagcaaaatgttgtgggaaccaagtgggtgttccgcaacaaacaagacgagcacggagtggtgacgaggaacaagactcgacttgtggcaaaaggttatgcccaagtcgcaggtttggactttgaggagacttttgctcctgtggctaggctagagtccattcgtatcttgctagcatatgccgctcaccattctttcaggttgttccaaatggatgtgaagagcgctttcctcaacgggccaataaaggaggaggtgtacgtggagcaaccccctggcttcgaggacgaacggtaccccgaccacgtgtgtaagctctctaaggcgctctatggacttaagcaagccccaagagcatggtatgaatgccttagagatttcttaagtgctaatgctttcaaggttgggaaagccgatccaactcttttcactaagacatgtgatggtgatttgtttgtgtgccaaatttatgtcgatgacataatatttggttctactaataaaaagtcttgtgaagagtttagcagggtgatgacgcagaaattcgagatgtcaatgatgggcgaattgaactacttccttgggttccaagtgaagcaactcaaggacggcaccttcatctctcaaacgaagtacacacaagacctgctgaagcggtttgggatgaaggacgccaagcccgcaaagactccgatgggaaccgacggacacaccgacctcaacaaaggaggtaagtccgttgatcaaaaagcataccggtcaatgatagggtctttactttacttatgtgctagtagaccggatattatgcttagcgtatgcatgtgtgctagatttcaatccgatcctaaggagtgtcacttagtggcagtgaagcgaatccttagatatttagttgctacgccttgcttcgggctctggtatccaaaggggtctacctttgacttgattggatattcagactccgactatgctggatgtaaggtcgataggaagagtacatcagggacgtgccaattcttaggaaggtccctggtgtcatggaactctaagaaacaaacttccgttgccctatccaccgctgaggccgagtatgttgccgcaggacagtgttgcgcgcaactactttggatgaggcaaaccctcagggactttggctacaatctaagcaaagtcccactcctatgtgataatgagagtgctatccgcatggcggaaaatcctgttgagcacagtcgcacaaagcacatagacatccggcatcactttttgagagaccaccagcaaaagggagatatcgaagtgtttcatgttagcaccgagaaccagctagccgatatctttaccaagcctctagatgagaagaccttttgcaggctgcgtagtgagctaaatgtcttagattcgcggaacttggattga

SEQ ID NO: 4659 - DNA, 4548 bp, Zea mays
  Clone ID: TF_ZM4613.C2.o1.fg
atggatcctaggggcaaggggatggtggtcaatgataaggaaaaggagtccttcgtcaatgatccaaaagatgacaagcctactgactcgggctcaagccacaaaagaaaagacgggaagaataagaaaacaaggcgcatcaaggagatcgtctactacgacgacagcgacgagtcctcttcttcccaaaaggacgacgacaactacgagaaaaagaaaccggtcaattcaaacttttcttttgattattctcgtattccacaaaataaaaatgctcatttactctccattccacttgttggtggagggcgaacttgggagattcgcaatgatcaggggcgaggagccaacccaaacgtacaaccggctcaagaccctcgtcaacaaaataaggagctatggaagcatgcgttgaacggcccaatccacgagcctcaaactgttgctctcaaagcaacaaggagcaaggaagtgctacctagcaaggtggcacaagttgaggcggcgggactcaatgaggaagagatggccctcatcattaagtgtttcaagacggcgctaaggggtcgcaaggagcatccaaataagaccaagacaaaggggaagcgctcatgcttcaaatgtggtaagattggtcattttatcgctaactgtcccgataatgatagtgaccaggaacaagggaacaagagggaaaagaagaaggcttacaagaagactaagggcgaggcacaccttggaaaggagtgggactcggattgttcgtcgtccgactccgacaacgaaggactcgccgccaccgccttcaacaagtcggccctcttccccaacgagcatcacacctgcctcatggcaagggaaaagaagatagaactaaggttgataaaaattaatgaattaattgacgccttgaatgataaaaataggttattagaaaagcaagaggatcttttgtatgaagaacatgataagtttgtagaggcacaaaaatcccttgctttagaaataaaaaggaatgaaatgctttcttgtgaattgtctatatgccatgactctatttctagcttaaagagcataaatgatgatttaaatgctaagttagaaatagctaataaatcaacatcttgtgtagaacatgttgcaatttgcaataggtgtaaagattttaatgttgatgcttgtagtgaacatctagtttcaatttctaatttgaatgatgaagtggctagtcttaatgcccaacttaagactagcaagagtgaatttgacaaactgaaatttgcaagggatgcctacacgattggtagacacccctcaattaaggatggtcttggcttcaagagggaagtcaagaacttaacgagccataaggcatccatctccgccaaggagaaagggaaggcccctatggctagtagtgttcaaaagaaccatgctttcatgtatcatgataggagacattctaggaatgttgatagaagttatgatgcttttgattctcatgccatgattgcttctagttcttctattatgcatgatagaaatttggctaggaaaaatgttgttcatcatatgcctagaagaaatgctcatgtacctaggaaaacaagcaatgaaccttctacaatttatcatgctttaaatgcttcctttgctatttgtagaaaggataagaaggtggttgctagaaaattaggggcaaaatgcaagggagataaaacttgcatttgggtccctaagactatttgtttatgcatccggggctcaagctggattatcgacagcggatgcacaaaccacatgacgggggaaaagaggatgttctcttcctacgtcaagaacaaggatccccaagactcaatcatattcggtgatgggaaccaaggcaaggtgaaagggttaggaaaaattgctatttcatccgagcactctatttctaatgtgttcttagttgagtcacttggatataacttgttgtctgtgagtcaactttgtaatatgggatataacggtttattcacaaatgtagatgtgtctgtctttagaagaagtgatggttcattagcttttaagggtgtactagacgacaaactttatttagttgattttgcaaaagaggaggccggtctagatgcatgcttaattgctaagactagcatgggctggttgtggcatcgccgtttagcacatgtggggatgaagaaccttcacaagcttctaaagggagaacacgtgataggtctaactaatgtaactttcgaaaaagatagaccttgtgcagcttgtcaagcagataaacaggtgggaagctctcatcatgccaaaaatgtgatgacaacatcaagacccctggagttacttcatatggacctcttcggacccgtcgcctatctgagcataggaggaagtaagtatggtcttgttatagttgatgatttttcccgcttcacttgggtattctttttgcaggataaatctgaaacccaagggaccctcaagcgcttcctaaggagagcccaaaacgagtttgagctcaaagtgaagaagataaggagcgacaatgggtccgagttcaagaaccttcaagtggaggagtatcttgaggaggaaagaatcaagcatgagttctccgctccctacacaccacaacaaaatggtgtggtagagaggaagaacaggacactactagatatggcgaggacgatgcttagtgaattcaagacgcccgaacggttttggacggaagccgtcagcacggcttgccacgccataaaccgggtctaccttcatcgcctcctcaagaagacttcatatgagcttctaaccggtaacaaacccaatgtgtcttactttcgtgtatttgggagcaaatgttacattctagtgaagaaaggtaggaattctaagtttgctcccaaagctgtagaagggtttttgttaggttatgactcaaatacaaaggtgtatagggtcttcaacaaatcatcgggtttggttgaagtctctagcgacgttgtatttgatgagactaatggctctccaagagagcaagttgttgatcttgatgatgtagatgaagaagacgttccaacggccgcaatgcgcaccatggcgattggagatcctttcagggtagaagaggccttgctagatccgaattgggtgttggccatgcaagaggagctcaacaacttcaagagaaatgaagtttggacgctggtgcctcgtcccaagcaaaacgttgtgggaaccaagtgggtgttccgcaacaaacaagacgagacacggggtggtgacaaggaacaaggcacgacttgtggcaaaaggttgttccaaatggatgtgaagagcgctttcctcaacgggccagtcaaggaggaggtgtacgtggagcaaccccctggctttgaggatgaacggtaccccgaccacgtgtgtaagctctctaaggcgctctatggacttaagcaagccccaagagcatggtatgaatgccttagagactttttaattgctaatgctttcaaggttgggaaagccgatccaactatgtttactaagacttgtgatggtgatcttttcgtgtgccaaatttatgtcgatgacataatatttggttctactaaccaaaagtcttgtgaagagtttagcagggtgatgactcaaaagtttgagatgtcgatgatgggcgagttaagctatttccttgggttccaagtgaagcaactcaaggatgggaccttcatctcccaaacgaagtacacgcaagacttgatcaagcggtttgggatgaaggacgccaagcccgcaaagactccaatgggaaccgacggacacaccgacctcaacaaaggaggtaagtccgttgatcaaaaggcataccggtctatgatagggtctttactttatttatgtgctagtagaccggatattatgctcagtgtatgcatgtgtgctagatttcaatccgatccaagggagtgtcacttagtggccgtaaagcgaattcttagatatttagtcgctacgccttgcttcgggatctggtatccaaaggggtctacctttgacttgattggatattcagactccgactatgctggatgtaaggtcgataggaagagtacatcagggacgtgccaattcttaggaaggtccctagtgtcgtggagctctaagaaacaaacttccattgccctatccaccgctgaggccgggtatgttgctgcaggacagtgttgcgcgcaactactttggatgaggcaaaccctccgggactttggctacaatctgagcaaagtcccactcctgtgtgataatgagagtgctatccgcatggcggataatcctgttgaacacagccgcacaaagcacattgacatccggcatcactttttgagagaccaccagcaaaagggagatatcgaagtgtttcatgttagcaccgagaaccagctagccgatatctttaccaagcctctagatgagtcgaccttttgcaagctgcgtagtgagctaaatgtcttagattcgcgaaacctagattga

SEQ ID NO: 4660 - DNA, 4296 bp, Zea mays
  Clone ID: TF_ZM4621.C2.o2.fg
atggatcctaagggcaaggggatggtggtcaatgataaggaggagtccttcgtcaacgatccaaaagatgacaagcctactaactcgggctcgagccacaaaagaaaagacgggacgaagaagaaaacaaggcgcatcaaggagatcgtctactacgacgacagcgacgagtcctcttcttcccaaaaggacaacgacgacaacgactacgagaaaaagaagacagttaactctaatttttctttcgattactctcgtattcctcaaagtaccattgctcatttactctccattccacttgcatcattgtgcagggatgaataccataaggtgagcggcttgggtaacgccaagcagatctgggacaccctcaagatctcgcatgaggggaacgacgtcaccatgctcaccaagatggagttggtggaaggagaactaggaaggtccttcactgtccttgatccacatcttgtaaacaatattcgtgagaatcctaggtacaccaagatgacgcccgaggaaatacttgggaagttcgtaagcggacggatgatgatcaaggaggcaagatacgttgatgatgcgttgaatggcccaatccacgagcctcaaatcgttgctctcaaagcaacgaggggcaaggaagtgctacctagcaaggtggcacaagttgaggcggcggggctcaatgaggaagagatggccctcatcatcaagcgtttcaagacggcgctaaggggtcgcaaggagcatcccaacaaaagcaagacaaagggaaagcgctcctgcttcaagtgtggtaagattggtcattttatcgctaattgtcccgataatgatagtgaccaggaacaagagaagaagagggaaaagaagaagaattacaagaaggctaagggcgaggcacatcttggcaaggagtgggactcggattgctcgtcgtccgactccgacaacgaaggactcaccgcctcggccttcaacaaatcgtccctcttccccaacgagcatcacacatgcctcatggcaaaggagaagaaggtatgtactcgaaacaatactacttatgcttcttcaagtgaagatgaatctagtgatgatgaaatagactatgcatatttgttcaagggcttagatcgaactaagattgataaaatcaatgaattgattgatgccttgaatgataagaatagattgctagaaaagcaagaggatcttttgtatgaagaacatgataaagttgtagaggcacaaaaatctcttgctttagaagtcaaaaggaatgaaattctttcttgtgaactatctacttgccatgagaccatttctagtttaaaaagtattaatgatgacttgaatgctaaactagaaatagctaataaatcaacctcttgtgtagatcatgttgtaatttgcaataggtgtaaagactttaatgttgatgcttgtagtgaacacctagtttgcatttctaaattaagtgatgaagtggctagtcttaatgcccaacttaagactagcaaaagtgaatttgataaactaaaatttgcaagggatgcctacacgattggtagacacccctcaattaaggatgggcttggctttaagagggaagccaagagcttaacaagtcataaggctcccatctccgccaaggagaaagggaaggctcctatgactaatagtagtcaaaagaatcatgctttcatttatggtgataagagatattttagaaatgttcataggagttgtaatgattcaaatgctatgtttgcttcaagttcttcctatatgcatggtagagatatgcctaggagaaatgttcatgttcctaggaaaattaatgaaccttctacaatttatcatgcttgcaatgcttcctttgcaatttgtagaaaggataagaaggtttatgcatccgggggatcaagctggattatcgacagcggatgcacaaaccacatgacgggggagaagaagatgttcacctcctacgtcaagaacaaggattcccaagagtcaatcatattcggtgatgggaatcaaggcaaggtcaaaggactagggaagattgccatttcatccgagcactctatttctaatgtgtttttagttgagtcacttggatataacttattgtctgtaagtcagctttgtaatatgggatataattgcttattcacaaatgtagatgtgtctgtctttagaaggagtgatggttcattagcttttaagggtgtattagacggtaaactctacttagttgattttgcaaaagaggaggccggtctagatgcatgcttaattgctaagactagcatgggctggctgtggcatcgccgcttagcacatgtggggatgaagaaccttcacaaacttctaaagggagaacatgtaataggtctaacaaatgtaaccttcgaaaaagacagaccttgtgcagcttgtcaagcaggcaaacaggtgggaagctctcatcataccaaaaatgtgatgaccacatcaagaactttggagttgcttcatatggacctcttcggacccgtcgcctatctaagcataggaggaagtaagtatggtcttgttatagttgatgatttttcccgcttcacttgggtattctttttgcaggataaatctaaaacccaagggaccctcaagcgctttctaaagagagctcaaaatgagtttaagctcaagaaaaacggtgtggtagagaggaagaacaggacgctcatagacatggcgaggacaatgcttggagaattcaagacacccgagcggttttggtcggaagccatgaacacggcttgccacgccataaaccgggtgtaccttcatcgcctcctcaagaagacttcgtatgagcttctaaccggtaacaaacccaatgtttcgtactttcgtgtatttgggagcaaatgttacattctagtaaagaaaggtagaaattctaagtttgctcccaaagctgtagaagggtttttgttaggttatgactcaaatacaaaggcgtatagggtcttcaacaaatcatcgggtttggttgaagtctctagcgacgttgtatttgatgagactaatggctctccaagggagcaagttgttgatcttgatgatgtagatgaagaagaagttccaacggccactatacacaccatggcgattgtagaagtgaggccacaggaacaaaaggagcaagatcaaccttcttcctcaacaatggtgcatcccccaactcaagacgatgaacaggaagagctcaataacttcaagagaaatgaagtttggacaatggtgcctcgtcctaagcaaaacgttgtgggaaccaagtgggtgttccacaacaaacaggacgagcacggagtggtgacaaggaacaaggctcgacttgtggcaaaaggttatgcccaagtcacaggtttggactttgaggagacttttgctcctgtagctatgctagagtcaattcgcatgttgttagcctatgctactcaccattctttcagattgttccaaatggatgtgaagagcgctttcctaaacgggccaatcaaggaggaggtgtacgtggagcaaccccctggcttggaggatgaacggtaccccgaccacgtgtgtaagctctctaaggcactctatggacttaagcaagccccaagagcatggtatgaatgccttagagactttttaattgctaatgctttcaaggttggaaaagccgatccaactttattcactaagacttgtgatggtgatctttttgtgtgccaaatttatgtcgatgacataatatttggttctactaaccaaaagtcttgtgaagagtttagcagggtaatgactcagaaattcgagatgtcgatgatgggcgagttgaactacttccttaggttccaagtgaagcaactcaaggacgccaccttcatctcccaaacgaagtacacacaagacttgctaaagcggtttggaatgaaggacgccaagcccgcaaagacaccaatgggaaccgacggacatgtcgacctcaacaaaggaggtaagtccgttgatcaaaaggcatatcggtctatgatagggtctttactttatttatgtgctagtagaccggatattatgcttagcgtatgcatgtgtgctagatttcaatctgatccaaaggaatgtcacttagtggctgtgaagcgaattcttagatatttagtcgctacgccttgcttcgggatctggtatccaaaggggtctacctttgacttgattggatattcagactccgactatgctggatgtaagtga

SEQ ID NO: 4661 - DNA, 2032 bp, Zea mays
  Clone ID: TF_ZM4621.C6.o3.fg
atggatcctaagggcaaggggatggtggtcaatgataaggaaaaggagtccttcgtcaacgatccaaaagatgacaagcctactgactcgggctcgagccacaaaagaaaagacgggaagaagaagaaaacaaggcgcatcaaggagatcgtctactacgacgacagcgacgagtcctcttcttcccaaaaggacaacgacgacaacgactatgagaaaaagaagacggttaactctaatttttctttcgattactctcgtattcctcaaagtaccaatgctcatttactctccattccacttggtaaacctcctcactttgatggagagggctacggattttggagtcacaaaatgcatagtcacttgttctctctccatccaagcatatgggagatagtagaaagtggaatgaaatttgatagtactgatagtcccatatttatcaatgagcaaattcacaaaaatgcacaagcttctactgttcttctagcatcattgtgcagggatgaataccataaggtgagcggcttggataacgccaagcagatctgggacaccctcaagatctcgcatgaggggaacgacgtcaccatgcacaccaagatggagttggtggaaggcgaactaggaaggttcgcaatgatcagaggagaggagccaacccaaacgtacaatcggctcaagaccctcgtcaaccaaataaggagctatggaagcacgcgatggacggaccacgatgtcgtccgcctaatgctaaggtccttcactgtccttgatccacatcttgtaaacaatattcgtgagaatcctaggtacaccaagatgacgcccgaggaaatacttgggaagttcgtaagcggacggatgatgatcaaggaggcaagatacgttgatgatgcgttgaatggcccaatccacgagcctcaaaccgttgctctcaaagcaacgaggggcaaggaagtgctacctagcaaggtggcacaagttgaggcgatggggctcaatgaggaagagatggccctcatcatcaagtgtttcaagacggcgctaaggggtcgcaaggagcatcccaacaaaagcaagacaaagggaaagcgctcctgcttcaagtgtggtaagattggtcattttatcgctaattgtcccgataatgataatgaccaggaacaagagaagaagagggaaaagaagaataattacaagaaggctaagggcgaggcacatcttggcaaggagtgggactcggattgctcgtcgtccgactccgacaacgaaggactcaccgcctcggccttcaacaaatcgtccctcttccccaacgagcatcacacatgcctcatggcaaaggagaagaaggtatgtactcgaaacaatactacttatgcttcttcaagtgaagatgaatctagtgatgatgaaatagactatgcatatttgttcaagggcttagatcgaactaagattgataaaatcaatgaattgattgatgccttgaatgataagaatagattgctagaaaagcaagaggatcttttgtatgaagaacatgataaagttgtagaggcacaaaaatctcttgctttagaagtcaaaaggaatgaaatgctttcttgtgaactatctacttgccatgagaccatttctagtttaaaaagtattaatgatgacttgaatgctaaactagaaatagctaataaatcaacctcttgtgtaaatcatgttgtaatttgcaataggtgtaaagactttaatgttgatgcttgtagtgaacacctagtttgcatttctaaattaagtgatgaagtggctagtcttaatgcccaacttaagactagcaaaagtgaatttgataaactaaaatttgcaagggatgcctacacgattggtagacacccctcaattaaggatgggcttggctttaagagggaagccaagagcttaacaagtcataaggctcccatctcctccaaggagaaagggaaggctcctatgactaatagtagtcaaaagaatcatgctttcatttatg

SEQ ID NO: 4662 - DNA, 927 bp, Zea mays
  Clone ID: TF_ZM4638.C8.o1.fg
atgatgatcaaggaggcaagatacgtcgatgatgcattgaatgacccaatccacgagcctcaaaccgtggctctcaaagcaacgaggagcaaggaggcgctacctagcaaggtggcgcaagttgaggcggccgggcttaacgaagaagaaatggccctcatcatcaagcggttcaagacaacactaaaaggtcgcaaggagcatcccaacaagaacaagacgaaggggaagcgctcatgtttcaaatgtggtaagattggtcattttatcgctaattgtcccgataatgatagtgaccaggaacaagagaagaagagggaaaagaagaagtcttacaagaaggctaagggcgaggcacaccttggcaaggagtgggactcggattgttcgtcgtctgactccgacaatgaaggactcgccgcctcagccttcaacaagacgtccctcttccccaacgagcatcacacatgcctaatggcaaaggagaagaaggatagattgttagaaaagcaagaggatcttttgtatgaagaacatgataaatttgtagaggcacaaaactctcttgctttagaagttaaaaggaatgaaatgctttcatgtgaattgtctacatgccatgaatctatctctagcctaaaaggtgttaatgatgatttgaatgctaagttagaaatagctagtaaatcaacctctcgtgaagaacatgttatgatttgcaataggtgcaaagattttaatgttgatgcttgtagtgaacacctagtttgcatttctaaactaaatgatgaagtggctagtcttaatgctcaacttaagactagcaaaaatgattttgataaactaaaatttgcaagggatgcctacacggttggtacccctcaattaaggatgggcttggtttcaagagggaagccaagaacttaa

SEQ ID NO: 4663 - DNA, 5034 bp, Zea mays
  Clone ID: TF_ZM4679.C2.o9.fg
atggatcctaagggaaaggggatgatgatcaacgacaaggagaaggagtccttcctcaatgagccaaaagacgacaagcccactgactcgagctcaagtcacaagaagaaggatgggaagaagaagaggcgcatcaagaagatagtctactacgacagtgacgagtcctcttcttcccaaaaagacgacgacgacgagaaaaagaaaacggtcaactcaaacttttcttttggttattctcgtattccgcaaaattccaatgctcatttgctttccattcctcttggtaaacctccacactttgatggagaggactacggattttggagtcacaaaatgcgtagccatttgttctctcttcatccaagtatatgggagatagtagaaaatggaatgcaatttgatagtatggataatcccatgtttatcaatgaacaaattcataaaaatgcacaagctaccactattcttttagcatccttgtgcagggaagagtatcataaggttggcggcttggataatgccaagcaaatttgggacatcctcaagatctcacatgaggggaacgacgccaccatgatcaccaagatggagttggtggaaggcgaactaagaaggttcacaatgatcaggggggaggagccaactcaaacgcacaacaggctcaagaccctggtcaacaaaatcaggagctatggaagcacgagatggcggaccacgacgtcgtacaccaagatgacgcccgaggaaatactcggagagtttgtaagcgggcgaatgatgatcaaggaggcaagatatgttgatgaggcattgaatggcccaatgccgatccacgagcctcaaactgttgctctcaaagcaacaagcagcagggaggggctacctagcaaggtggcgcaagttgaggcggccgagctaaataaggatgaaatggccctcatcatcaagcgcttcaagacggcgctcaaaggtcgcaaagagcatcccaacaagagcaagacgaagggaaagcgctcctgcttcaagtgtggtaagattggtcactttattgctaactgtcccgataatgatagtgaccaggaacaaggaaagaatgggaagagagagaaaaagaaggtctcaagaaggctaagggcaaggcacaccttggaaaagaatgggactcggattgttcttcgtccgactccgacgacgaaggactcgccgccacggccttcatcaaatcgtctctcttccccaacgagcatcacacttgcctcatggcaaaggagaagaagatgtaaggattttaatgttgatgcatgtgttgagcaccttacttctattacaaaattaaatggtgaagtggctagtcttaatgcccaacttaagactagcaaaaatgactttgataaattaaatattgctacggatgcctacactgttggtagacacccctcaattaaggatgaacttggctttaagagcggatgcacaaaccacatgacgggggagaacaagatgttcacctcctacgtcaagaacaaagattcccaagattcaatcatatttggtgacgggagtcaaggcaaggttaaaggactaggaaagatagctatttcatccgagcattccatatctaatgtgtttttggttgaatcgctcagaaggagtgatggttcattagcttttaagggtgtactagacggcaaactctatttagttgacttttcgaaggaggaggccaatctagatgcatgcttaatcgctaagactagcatgggctggctgtggcatcgccgtctagcacatgtgcggatgaagaaccttcacaaacttctaaagggagaacatgtgttaggtctaacaaatgtaactttcgaaaaagatagaccttgtgcagcttgtcaagcaggtaaacaggtgggaagctctcatcatagcaaaaacgtgatgaccacatcaagacctttggagctacttcacatggacctcttcggacccgtcgcctacctcagcatcgagggaagtaagtatggtcttgttattgttgatgatttttcccgcttcacttgggtattctttttgcaggataaaacagaaacccatgggacactaaagcgcttcctaaggagagctcaaaacgaatttgagctcaaggtgaaaaagataaggagcgacaacgggtccgaattcaagaatcttcaagtggaggagtaccttgaggaggaaggagttaagcacgagttctccgctccctacacaccacaacaaaacggtgtggtagagaggaagaacaggacgcttttagacatggcaaggacgatgctcagtgaattcaagacgcccgaacggttttggacggaagctgtgaacactgcttgtcatgccataaaccgggtttatcttcatcgcctcctcaagaagacgtcgtacgaactcctaactgtgaagaaaggtaggaattccaaatttgctcccaaagctgtagaagggtttttgttaggttatgactcaaatacaaaggcgtatagagtcttcaacaaatcatcgggtttggttgaagtctctagcaacgttgtatttgatgagactaatggctctccaagagagcaaattgatcttgatgatgtagatgaagaagatgttccaacggccgcaatacgcaccatggcgattggagatgtgcgaccacaggaacaaaaggagcaagatcaaccttcttcctcaacaatggtgcaccctccaactcaagatgatgaacaggttcatcaagaagaggcgtgtgatcaagggggagcacaagatgatcatgttatggaggaagaagcaccacaggctcctccaactcaagtccgagcgacgattcaaaggaatcatcccgtcgaccagatattgggtgatataagcaagggagtaactactcgctctagattagctaatttttatgagcattactcgtttgtctcttctattgaacctttcagggtagaagaggccttgctagatccggactgggtgttggccatgcaggaagagctcaacaacttcaagcgaaatgaagtttggacccttgtgccacgtccaaagcaaaacattgtgggaaccaagtgggtgttccgcaacaaacaggacgagcacggggtggagacaaggaacaaagctagacttgtggcaaaaggttatgcccaagtcgcaggtttggactttgaggagacttttgctcctgtggctagggtagaatctattcgtattttgttagcctatgccgctcaccattctttcaagttgttccaaatggatgtgaagagcgctttcctcaacgggccaatcaaggaggacgtgtatgtagagcaaccccctggctttgaggatgaacggtaccccgaccacgtgtgtaagctctctaaggcgctctatggacttaagcaagccccaagagcatggtatgaatgccttagagactttctaattgctaatgctttcaaggttgggaaagccgatccaactttattcactaagacttgtgatggtgacttatttgtatgccaaatttatgtcgatgacataatatttggttctactaaccaaaagtcttgtgaagagtttagcagggtgatgactcaaaaatttgagatgtcgatgacgggcgagttgaactacttccttgggttccaagtgaagcaactcaaggatggcaccttcatctcccaaacgaagtacacacatgatttgatcaagcggtttgggatgaaggacgccaagctcgcaaagactccaatgggaaccgacagacatgtcgacctcaacaaaggaggtaagtccgttgatcaaaaggcataccggtctattataggttctttgctttatttatgtgctagtagaccggatattatgctaagcgtatgcatgtgtgctagatttcaatccgacccaagggagtgtcaccttgtggccgttaagcgaattcttagatatttagttgctacgccttgcttcgggatctggtatccaaaggggtcaacctttgaattaattggatattcggactctgattatgctggatgcaaggttgataggaagagtacatcagggaagtgccaattcttaggaaggtccctggtgtcttggagttataagaaacaaacttctgttgccctatccaccgctgaggccgagtatgttgccgcaggacagtgttgcgtgcaactactttgcatgaggcaaaccctccgggactttggctacaatctgagcaaagtcccacttctatgttataatgagagtgcaatccgcatggcggacaatcctgttgaacacagccgcactaagcacatagacattcggcatcactttttgagagaccaccagcaaaagggagatatcaaagtgttttatgttagcaccgagaaccagctagccgatatctttaccaagcctttagatgagaagaccttttgtaggctgcgtattaggttgggacaagaggctaccgtatgcaaaattctcctacaacaacagctatcaagccagtctgaagatgtcaccattcgaaacgctctatgggaggcattgcagaactccattgcattgggaccaacccgaagaagggaactcagtttcgaagtgggagactatgtctacttgaaagtgtcacccatcagaggaaccaaaaggtttggagtcaaaggcaagctagcccctcgctatattggcccgtaccagattcaggcaagacgtggagaagtggcttatcaactcagcttaccagagaacctgtctgcagtgcatgatgtgtttcatgtgtctcagttgaagaaatgcttgagagtgccagaagagaagttgccaacggaagaccttgaagttcaagaagatctgacttatattgagaagccaacgcagattctggagacagcaaatcgggtcactaggaggaacaccatcaggatgtgcaaagtcaaatggggccatcactcagaagaagcaacctgggaaagagaagatgatctgagagcccagtaccctgaactctttgctagccagccctga

SEQ ID NO: 4664 - DNA, 2976 bp, Zea mays
  Clone ID: TF_ZM4679.C4.o4.fg
atgcatcctaagggaaaggggatggtgatcaacgacaaggagaaggagtccttcatcaatgaaccaaaagacgacaagcccactgactcgggctcaagtcataagaagaaggatgggaagaagaagaggcgcatcatgaagatagtctactacaatagcgacgagtcctcttcttcccaaagagacgacgacgacgagaaaaagaaaatggtcaactcaaacttttctttttattattctcgcattccgcaaaattcgaatgctcatttgctttccattcctcttggtaaacccccacactttgatggagaggactacggattttggagtcacaaaatgtgtagccacttgttctctcttcatccaagtatatgggagatagtagagaatggaatgcaatttgatagtacggataatcccatgtttatcaatgaacacaaaaatgcacaagctaccactgttctattagcatccttgtgcagggaagagtaccataaggtgagcggcttggataacgccaagaaaatttgggacaccctcaagagctcacatgaggggaatgacgtcaccatgatcaccaagatggagtttgtggaaggcgaactaggaaggttcgcaatgatcaggggggaggagccaactcaaacgtacaataggctcaagaccctggtcaacaaaatcaggagctatggaagcacgagatggacggaccacgatgtcgtccggcttatgctaaggtccttcactgtccttgatcctcatcttgttaactctatccatgaaaatcctaggtacaccaagatgacgcccaaggaaatactcagaaagtttgtaagcgggcgaatgatgatcaaggaggcaagatatgttgatgaggcgtttaatggcccaatgccgatccacgagcctcaaaccattgctctcaaagcaacaagtagcagggaggcgctacctagcaaggtggcgcaagttgaggcggtcaggctaaatgaggaagaaatggccctcatcatcaagcgcttcaagacagcgctcaaaggtcgcaaggagcatcccaacaagagcaagacgaagggaaagcgctcctgcttcaagtgtggtaagattggtcactttattgctaactgtcctgataatgatagtgaccaggaacaaggaaagactggaaagagagagaacaagaaggtttacaagaaggctaagggcgaggcacaccttggaaaagaatgggactcggattgttcttcgtccgactccgacgacgaaggactcgccgccacggcctttaacaaatcgtctctcttccccaacgagcatcacacttgcctcatggcaaaggagaagaaggtaagcactcgaaatactattgcatatgcttcttcaagtgatggtgaatctagtgatgatgaagtagactacgcaagtttattcaaaggcttagatagaactaaaattgataagatcaatgaattaattgatgcgttgaatgagaagaatagattgctagaaaaacaagaggatcttttatatgaagagcatgataaatttgtaaatgtgcaaaagtctcttgctttagaagtcaaaagaaatgaaatgctttcaagtgaattatctacttgtcatgagtcaatttctagtctaaagagtgtcaatgatgacttaaatgctaagctagaagtagcaaataaatctagctcatgtattgaacatgtagtaatttgtaacaggtgtaaggattttaatgttgatgcatgtgttgagcaccttacttctattgcaaaattaaatggtgaagtggctagtcttaatgcccaacttaagactagcaaaaatgactttgataaactaaaatttgcaagggatgcctacactattggtagacacccctcaattaaggatgggcttggctttaaaagggaagccaagaacttaacaagccaaagagctcccattttcaacaaggaaaagggaaaggctcctatggctaatagtagtcaaaagaatcatgcatttatttatgatagaaaattttctagaaatgcttatcataataggagttgtaatgcttatgattcacatgccatgattgcttcaagttcttcctttgtgcatggtagagatatgcctaggagaaatgttgttaatgtgcctaggaaaatgcataatgaaaatgctactgatattcatgcctacaactctgattttgtactcacatgtaaaaatgagaaagtggttgctaggaaattaggggccaaatgtaagggagacaaggcatgcatttgggtccctaaggctattgttactaaccttgtttatgcatccgggggctcaagctggattatcgacatcggatgcacaaaccacatgacgggggagaagaagatgttcacctcctacgtcaagaacaaagattcccaagattcaatcatattcggtgacgggaatcaaggcaaggttaaaggactaggaaaaattgctatttcatccgagcattccatctctaatgtgtttttagttgaatcggtcgggtataacttgttgtccgttagtcaactctgtagtatgggttacatttgtttatttaacaatgtagatgtgtccgtctttagaaggtgtgatggttcattagcttttaagggtgtactagacggcaaactttatttagttgatttttcgaaagaagaggccggtctagatgcatgcttaattgctaagactagcatgggctggctgtggcatcgtcgtctagcacatgttgggatgaagaaccttcataagcttctaaagggggagcatgtgttaggtctaaaaaatgtatctttcgaaaaagatagaccttgtgcagcttgtcaagcaggtaaacaggtggggagtactcatcatagcaaaaatgtgatgaccacatcaagacccctggagatgctgcatatggacctcttcggacctgtcgcctacctcagcatcgggggaagataa

SEQ ID NO: 4665 - DNA, 1660 bp, Zea mays
  Clone ID: TF_ZM4681.C2.o6.fg
atggatcctaagggcaaggggattgtgatcaatgacaaggagaaggagtcattcatcaatgagcccaaggatgacaagcctaccgactcgggctcgggccacaaacgcaaagatgggaagaagaagaagacaagacgcatcaaggagattgtctactacgacgacaacgatgagtccacttcctcccaaaaggacaacgacgacaacgactacgagagaaggaaaccgattcatagaaatgcacaagctactactgtgttgctagcctccttgtgcagggacgagtaccataaggtgagcggcttggacaatgccaagcagatctgggacaccctcaagatctctcatgaggggaacgacgtcaccttactcaccaaaatggagttggtggagggcgagcttggaagatttgcaatgataaggggcgaggagccaacccaaacatacaaccggctcaagacccttatcaacaaaataaggagctacggaagcacgcgatggacggatcacgacatcgtccgcctaatgctaaggtcttttactgtacttgatccacatttggtgaacaatattcgtgaaaatcctaggtacaccaagatgtcacccgaagaagtccttggaaagttcgtaagcgggagaatgatgatcaaggaggcaaggtacgtggacgacgcgttgaacggtccaacccatgagcctcaacccattgctctcaaggcaacgaggagcaaggagacgctacctagcaaggtggcacaagttgaggcggccgggctcaatgatgaagagatggccctcatcatcaagcgcttcaagacggcgctaaagggtcgcaagggacagccaagcaagaccaagacaaagaggaagcgttcatgcttcaaatgcggtaagattggtcattttattgctaactgtcccgataatgaaagtgaccaggaacaagggagcaagagggagaagaagaaggcatacaagaaagctaagggcgaggcacatcttggaaaggagtgggactcggactgttcgtcatccgactccgaaaatgaaggactcgccgccaccgccttcaacaagtcatccctcttccccaacgagcgtcacacatgcctcatggcaaaggagaagaaggtatgtactcgagacagtactacttatgattcttctagtgatgatgaatctagtgatgaagaaatagattactctagtttgttcaaaggattggatagaactaaagtagataagattaatgaattgattgatgccttgaatgaaaaggatagactcttagaaaaacaagaggaccttttatatgaagagcatgacaaatttgtagaggcacaaaaatcttatgctttagaagttaaaagaaatgaaatgctttcttatgaactatcttcttaccatgagacaatttctagcttaaggagcatgaatgatgatttgaatgctaagttagagatagctagtaaatctaactcttgtgtagaacatgttatgatttgcaagaggtgtaaagattttgacattgatgcttgtagtgaacacctagtgtcaatttctaaattgaatgatgaagtggctagtcttagtgcccaacttaagactagcaaaaacgaatttgataagttaaaatttgcaagggatgcctacacgattg

SEQ ID NO: 4666 - DNA, 4953 bp, Zea mays
  Clone ID: TF_ZM4685.C2.o11.fg
atggatcctaagggcaaggggatggtggtcaatgataaggagaaggagtccttcgtcaatgatccaaaggatgacaagcctactgactcaggctcgggccacaaaagaaaagacgggaggaagaagaagacaaggcgcatcaaggagatagtctactacgacagcaacgaatcttcctcttcccaaaaggacgacgacaatgactacaagaaaaagaagacggttaattcaaacttttcctttgattattctcgtattccgcaaagttccaatgctcacttgctttccattccccttggtaaacctccccactttgatggagaggactacagattttggagtcacaaaatgcgtagccacttgttctctctccatccaagtatatgggagatagtagaaaatggaatgcactttgatagtacagatagtcccatgttcattaatgagcaaattcacaaaaatgcacaagctactactgttcttctagcttcattgtgcagggatgaataccataaagtgagcggcttggacaacgccaagcagatttgggacaccctcaaaatctcacatgaggggaacgacgtcaccatgctcaccaagatggagttggtggagggcaaacttgggagattcgcaatgatcaggggcgaggagccaacccaaatgtacaaccggctcaagaccctcgtcaacaaaataaggagctatggaagcacgcgatggacggaccacgacgtcgtccgcctaatgctaaggtcttttactgtccttgatccacatcttgtgaacaatattcgtgagaatcctaggtacaccaagatgacgcccgaagagatacttggaaagtttgtaagcgggcggatgatgatcaaggaggcaagatacgttgacgatgcgttgaacggtccaattcacgagcctcaaaccgttgctctcaaagcaacaaggagcaaggaggcgctacctagcaaggtggcacaagttgaggcagctggacttaatgatgaagaaatgaccctcatcatcaagcgctttaagacgatgctaaggggtcgcaaggagcatcccaacaagaccaagacaaaggcgaagcgctcatgcttcaaatgtggtaagattggtcattttatcgctaattgtcccgataatgatagtgaccaggaacaagggaacaagagggaaaagaagaaggcttacaagaaagctaatggcgaggcacaccttggaaaggagtgggactcggattgttcgtcgtccgactccgacaacgaaggactcgccgccaccgccttacaacaagtcggccctcttccccaacgagcatcacacctgcctcatggcaagggaaaagaagaacatgttgtagtttgcaataggtgtaaagattttaatgttgacgcttgtagtaaacacctagtttcaatttctaaattgaatgatgaagtggctagtcttaatgcccaacttaagactagcaagagtgaatttgacaaactaaagtttgcaagggatgcctacacaattggtagacacccctcaattaaggatggtcttggcttcaagagggaagtcaagaacttaacaagccataaggcttccatctccgccaaggagaaagggaaggcccctatggctagtagtactcaaaagaaccatgctttcatgtatcatgataggagacattctaggaatgcttttagaagttatgatgcttttgattctcatgccacgattgcttctagctcttctattatgcatgatagaaatttggctaggaaaaatgttgtttatcatatgcctagaagaaatattgttcatgttcctaggaaagtaatgaatgaaccttctacaatttattatgcttgcaatgcttcctttgctatttgtagaaaggataagaagattatcgacagcggatgcacaaaccacatgacgggggaaaagaggatgttctcctcctacgtcaagaacaaggatcctcaagattcgatcatattcggtgatgggaaccaaggcaaggtgaaagggttaggaaaaattgctatttcatccgagcactctatttctaatgtgttcttagttgagtcgcttggatataacttgttgtctgtgagtcaactttgtaatatgggatataactatttattcacaaatgtagatgtgtctgtctttagaagaagtgatggttcattagcttttaagggtgtactagacgacaaactttatttagttgattttgcaaaagaggaggtcggtctagatgcatgcttaattgctaagactagcatggactggctgtggcatcgccgtttagcacatgtggggatgaagaaccttcacaagcttctaaagggagaacacgtgataggtctaactaatgtaactttcgaaaaagttagaccttgtgcagcctgtcaagcaggtaaacaggtgggaagctctcatcatgccaaaaatgtgatgacaacatcaagacccctggagttacttcatatggacctcttcggacccgtcgcctatctaagcataggaggaaggaccctcaagcgcttcctaagtagagcccaaaacgagtttgagctcaaagtgaagaagataaggagcgacaatgggtccgaattcaagaaccttcaagtggaggagtatcttgaggaggaaggaatcaagcacgagttctccgctccctacacaccacagcaaaatggtgtggtagagaggaagaacaggacactactagacatggcaaggacgatgcttggtgaattcaagacgcccgaacggttttggacggaagccgtaagcacggcttgccacgctataaaccgggtctaccttcatcgcctcctcaagaagacttcatatgagcttaactgcaaatgttacattctagtgaagaagggtaggaattctaagtttgctcccaaagctgtagaagggtttttgttaggttatgactcaaatacaaaggcgtatagggtcttcaacaaatcatcgggtttggttgaagtctctagagacattgtatttgatgagactaatggctctccaagagagcaagttgttgatcttgatgatgtagatgaagaagatgttccgatggccgcaatacgtaccatggcgattggtgatgtacgaccacaggaacaaaatgagcaagatcaaccttcttcctcaacaatggtgcatcccccaactcaagacgatgaacaggttcatcaagaagaggcgtgtgatcaagggggagcacaagatgttcatgtgatagaggaagaagcacaaccaacacctccaactcaagttcgagcgacgattcaaaggaatcatcccatcgaccagattttgggtgacattagcaagggagtaactactcgctctagattagttaatttttgtgagcattactcttttgtctcttctattgagcctttcagggtagaagaggccttgctagatccggactgggtgttggccatgcaggaagagctctataacttcaaaagaaatgaagtttggacgctggtgcctcgtcccaagcaaaatgttgtgggaaccaagtgggtgttccgcaacaaacaggacgagcacgggatggtgacgaggaacaaggctcgacttgtggcaaaaggttatgcccaagttgcaggtttggactttgaggagacatttgctcctgtggctaggctagagtccattcgtattttgctagcatatgccgctcaccattctttcaggttgttccaaatggatgtgaagagcgctttcctcaacgggccaatcaaggaggaggtatacgtggagcaaccccctggcttcaaggatgaacggtaccccgaccacgtgtgtaagctctctaaggcgctctatggacttaagcaagccccaagagcatggtatgaatgccttagagactttttaattgctaatgatttcaaggttgggaaagccgatccaactctttttactaagacttgtaatggtgatctttttgtgtgccaaatttatgtcgacgtcataatatttggttctactaaccaaaagtcttgtgaagagtttagcagggtgatgactcaaaagtttgagatgtcgatgatgggcgagttaagctatttccttgggttccaagtgaagcaactcaaggatgggaccttcatatcccaaacgaagtacacgcaagacttgatcaagcggtttgggatgaaggacgccaagcccgcaaaaactccaatgggaaccgacggacacaccaacctcaacaaaggaggtaagtccgttgatcaaaaggcataccagtctatgatagggtctttactttatttatgtgctagtagactggatattatgcttagtgtatgcatgcgtgctagatttcaatccgatccaagggagtgtcacttagtggccgtgaagcgaattcttagatatttagtcgctacgccttgcttcgggatctggtatccaaaggggtctacctttaacttgattggatattcagactccgactatgctggatgtaaggtcgataggaagagtacatcggggacgtgccaattcttaggaaggtccctggtgtcgtggagttctaagaaacaaacctccgttgccctatccaccgctgaggccgagtatgttgccgcaggacagtgttgcgcgcaactactttggataaggcaaaccctcagggactttggctacaatctgagcaaagtcccactcctatgtgataatgagagtgttatccacatggcggataatcctgttgaacacagccgcacaaagcacatagacatccggcatcactttttgagagaccaccagcaaaagggagatatcgaagtgttttatgttagcaccgagaaccagctagccgatatctttaccaagcctctagatgagtcgaccttttgtaggttgcgtagtgagctaaatgtcttagattcgcggaacctggattga

SEQ ID NO: 4667 - DNA, 2946 bp, Zea mays
  Clone ID: TF_ZM4687.C1.o5.fg
atggatcctaagggcatggggatggtggtcaatgataaggaggagtccttcgtcaatgatccaaaggatgacaagcctactgactcaggctcgggccacaaaagaaaagacgggaggaagaagaatataaggcgcatcaaggagatagtctactacgacagcgacgaatcttcttcttcccaaaaggacgacgacaacgactatgagaaaaagaagacggttaactcaaacttttcctttgattattctcgtattccgcaaagttccaatgctcatttgctttccattcccctcgctactactgttcttctagcttcattgtgcagggatgaataccataaggtgagcggcttggataacgccaaggagatttgggacaccctcaaaatctcacatgaggggaacgacgtcaccatgctcaccaagatggagttggtggagggcgaacttgggagattcgcaatgattaggggcgaggagccaacccaaacgtacaaccggctcaagaccctcgtcaacaaaataaggagctatggaagcacgcgatggacggaccacgacgtcgtccgcctaatgctaaggtattttactatccttgatccacatcttgtgaacaatattcgtgagaatcctaggtacaccaagatgacgcccgaggagatacttggaaagtttgtaagcgagcggatgatgatcaaggaggcaagatacgttgacgatgcgttgaacggcccaatccacgagcctcaaaccgttgctctcaaagcaatgaggagcaaggaagtgctacctagcaaggtggcacaagttgaggcggcgggactcaatgaggaagagaaggccctcatcattaagcgtttcaagacggcgctaaggggtcgcaaggagcatcccaacaagaccaagacaaaggggaagcgctcatgctttaaatgtggtaagattggtcattttatcgctaattgtcccgataatgatagtgaccaggaacaagggaacaagagggaaaagaagaaggcttacaagaaggctaagggcgaggcacaccttggaaaggagtgggactcggattgttcgtcgtccgactccgacaaacgaaggactcgccgccaccgccttcaacaagtcggccctcttccccaacgagcatcacacctgcctcatggcaagggaaaagaagaatctagagatgacgaaatagactattcatgtttattcaagggcctagatagaactaaggttgataagattaatgaattaattgatgcattgaatgataagaataggttattagaaaagcaagaggatctcttgtatgaagaacatgataagtttgtagaggcacaaaaatctcttgctttagaaattaaaaggaatgaaatgctttcttatgaattgtctacatgccatgactctatttctagcttaaagagcataaatgatgatttgaatgctaagttagaaatagctaataaatcaacatcttgtgtagaacatgttgcaatttgcaataggtgtaaagattttaatattgatgcttgtagtgaacatctagtttcaatttctaatttgaatgatgaagtggctagtcttaatgcccaacttaagactagcaaaagtgaatttgacaaactaaaatttgcaagggatgcctacacgattggtagacacccctcaattaaggatggtcttggcttcaagagggaagtcaagaacttaacaagccataaggcttccatctccatcaaggagaaagggaaggcccctatggctagtagtgctcaaaagaaccatgctttcatgtatcatgataagagacattctaggaatgtttatagaagttatgttgcttttgattctcatgccatgattgcttctagttcttctattatgcatgatagaaatttggctaggaaaaatgctatgcctagaagaaatgttgttcatgttcctaggaaagtaaactatgaatcttctacaaattttcatacttgcaatgcttccttcactatttgtagaaaggataagaaggtgattgctaggaagttatgggaaagatgcaagggagataaaacttgcatttgggtccctaagacaattgtcactaaccttgtaggacccaacaagagttggctttgtaacatgggatataactgcttattcacaaatgtagatgtgtctgtctttagaaggagtgatggttcattagcttttaagggtgtattagacggcaaactctatttagttgattttgcaaaagaggaggccggtctagatgcatgcttaatcgctaagactagcatgggctggctgtggcatcgccgcttagcacatgtggggatgaagaaccttcacaaacttctaaagggagaacatgtgataggtctaacaaatgttactttcgaaaaagatagaccttgtgcagcttgtcaagcagggaaacaggtgggaagctctcatcataccaaaaatgtgatgacaacatcaagacctttggagttacttcatatggacctcttcggacccgtcacctacctaagcttaggaggaagtaagtatggtcttgttatagttgatgatttttcccacttcacttgggtattctttttgcaggataaatctgaaactcaagggaccctcaagcgcttcctaaggagagctcaaaatgagtttgagctcaaggtgaagaagataaggagcgacaacgggtccgagttcaagaaccttcaagtagaggagtaccttgaggaggaagggatcaagcatgagttctccgctccctacacaccacagcaaaacggtgtggtagagaggaagaataggacgctcatagacatggcgaggacaatgcttggagctgtaacacctcaagtgttaccatggctagagcacaccttggtactgaggactgtgatcacatgtggtagaaacttaaggagaacataa

SEQ ID NO: 4668 - DNA, 4986 bp, Zea mays
  Clone ID: TF_ZM4707.C2.o4.fg
atggatcctaagggaaaggggatggtggtcgacaacaacgagaaggagtctatcttcaacgagccgaagaatgacaagtctaccgacttgggttcaagccacaagcgtaaagatgggaagaagaagaagacaaggcgcatcaaggagatcgtctactacgacagcgacgaatcctcttcttcccaaaaggacgacgaccacaacgactacgagaaaaggaaaccggttaattcgaacttttcttttgactactctcgtattccgcaaagttcaaattcgcatttgcttcccattccacttggcaagccccctcactttgatggagaggactacggattttggagccacaaaatgcgtactcacttgttctctctccatcctagcatatgggagattgtagagagtggaatgcaatttgatagctcggatagccctatgtttataaatgaacagattcataaaaatgcacaagctactactgtgttgctagcctctttgtgcagggacgagtacaataaagtgagcggcttggacaatgccaagcagatatgggacaccctaaagatttctcacgaagggaacgacatcaccatgctcactaaaatggagttggtggagggcgagcttggaaggtttgcgatgataaggggcgaggagccaactcaaacatacaaccggctcaagacccttatcaacaaaataaggagctatggaagcacgagatggacggaccatgacgtcgtccgactattactaaggtcctttaccattcttgatcctcatttggtgaataatattcgtgagaatcccaggtacaccaaaatgtcgcccgaagaagtcctaggaaaattcgtcagcgggcgaatgatgatcaaggaagcaaggtacgtggacgacgccttgaatggaccgatcaacgagccgcaaccttttgctctcaaagcaacaagaagcaaggaggcgctacctagcaaggtggcacaaattgaggcggccggacttaatgatgaagagatggctctcatcattaaacgcttcaagacggtactaaagggtcacaaggggcagccaagcaagaccaagacaaaggggaagcgctcatgcttcaagtgcggtaagattggtcattttatcgctaactgccccgataatgatagtgaccaggaacagggaaataagagggaaaagaagaagaattacaagaaggcaaagggcgaggcgcatctaggcaaggagtgggactcggactgctcctcttccgactccgacaatgaaggactcgccgccaccgccttcaacaaatcaaccctcttcccaaacgagcgtcacacatgccttatggcaagagagaagaaggtatgtactcggaactctacctatgcttcttcaagtgaggacgaatctagtgatgaggatgaagtagattactcgtgtttgtttaaaggcctagatagaaccaaggtagacaaaattaatgaattgattgatgccttgaatgagaagaacatacttttagaaaagcaagaggatttgttgtatgaagaacatgataaatttgtagaagctcaaagatctcatgctctagaagttaaaagaaatgaaatgctttcttgtgaattatcttcttgccatgatacaatttttaaattaagaagcattaatgatgatttgaatgctaagttagaaattgctagtaaatccacctcttgtatagaaaatgttgtaacgtgcactaggtgtaaagatattaacattgatgcctatagtgaacacctagcttgcatttctaaattaaacgaagaggtagctagtcttaatgcccaacttaagactagcaaaagtgattttgagaaactaaaatttgctagggatgcctacacggttggtagacacccctcaattaaggatgggcttggcttcaagagggaagccaagaacttaacaagccataaggctcccatctccgccaaggagaaagggaaggcccctatggcaagtagcattaaaaggaatcatgcttttatatatcatgataggagacaaactagaaatgcttataggagttataatgcatatgatgattttaactctcatgccatgtttgcttctagttcttcctttatgcatggtagaaatatgtctaagaaaaatgctatgcctagaaagaatgttactcatgctcctaggaaagtagtgaatgaaccttctacaatttattgtgctttaaatgcttcctttgctatttgtagaaaggataagaaaattgttgctagaaaattaggggcaaaatgcaaggaagacaaaacttgcatttgggtccctaaggatatttgcactaaccttgtaggacccaacatgagttgggtttatgcatccgggggttcaagctggattatcgacagcggatgcacaaaccatatgacgggggagaagaagatgttcacctcctacgtcaagaataaggattcccaagattcaattgtattcgatgatgggaatcaaggcaaggataagtctgaaacccaagggaccctcaagcgcttcctcaggagggctcaaaatgagtttgagcttaaggtgaagaagataaggagcgacaacgggtccgagttcaagaaccttcaagtggaggaattccttgaggaggaaggaatcaagcacgagttctccgctccctacacaccacagcaaaatggtgtggtagagaggaagaacaggtcgctcatcgatatggcgaggacgatgctaggagagttcaagacccccgagtgcttttggacggaagccgtgaacacggcttgccatgccatcaacagggtctaccttcaccgcctcctcaagaagacttcgtatgagctgctaaccggtaacaaacccaatgtatcttactttcgtgtatttgggagcaagtgctacattctagtgaagaaaggtagaaattctaagtttgctcccaaagcagtagaagggtttttattaggttatgactcaaatacaaaggcgtatagagtcttcaacaaatcatcgggtttggttgaagtctctagcgacgttgtatttgatgagactaatggctctccaagagagcaagttgttgattgtgatgatgtagatgaagaagatgttccaacggccgcgatacgaaccatggcgattggtgatgtgcgaccacaggaacacttggagcaagctcaaccttcctcctcaaccatggtgcatcccccaacccaagatgacgaacaggtacctcaagtggaggcgtgtgatcaagggggagcacaagatgatcatgtgatggaggaagaagcgcaaccggcacctccaacccaagttcgagcgatgattcaaagggatcatcccgtcgaccaaattctgggtgacattagcaagggagtaactactcgatctcgattagttaatttttgtgagcattactcctttgtctcttctattgagcctttcagggtagaggaggccttgctagatccggactgggtgttggccatgcaggaggagctcaacaacttcaagaggaatgaagtttggacactggtgcctcgtccgaagcaaaatgttgtgggaaccaagtgggtgttccgcaacaaacaggacgagcacggggtggtgacgagaaacaaggctcgacttgtggcaaaaggttatgcccaagtcgcaggtttggatttcgaggagacttttgctcctgtggctaggctagaatcaattcgtatcttgctagcatatgccgctcatcattctttcaggttgtaccaaatggatgtgaagagcgctttcctcaatgggccaatcaaggaggaggtgtacgtggagcaaccccctggcttcgaggatgaacggtaccccgaccatgtgtgtaagctctctaaggcgctctatggacttaagcaagccccaagagcatggtatgaatgccttagagactttctaattgttaatgctttcaaggttgggaaagccgatccaactctttttacaaagacatgtgatggtgatttgtttgtgtgccaaatttatgtcgatgacataatatttggttctactaaccaaaagtcttgtgaagagtttagcagggtgatgacgcagaaattcgagatgtcgatgatgggcgagttgaaatacttccttgggttccaagtgaagcaactcaaggacggcaccttcatctcccaaatgaagtacacgcaagatttgctaaagcggtttgggatgaaggacgccaagcccgcaaagactccgatgggaaccgacggacacaccgacctcaacaaaggaggtaagtccgttgatcaaaaagcataccggtccatgataggttctttgctttatttatgtgctagtagaccggatattatgcttagcgtatgcatgtgtgctagatttcaatccgatcctaaggaatgtcacttagtggcggtgaagcgaatccttagatatttagttgctacgccttgcttcgggctctggtatccaaaggggtctacctttgacttggttggatactcagactccgactatgctggatgtaaggtcgataggaagagtacatcggggacgtgccaattcttaggaaggtccctggtgtcgtggaattctaagaaacaaacctccgttgccctatccaccgctgaggccgagtacgttgccgcaggacagtgttgcgcgcaactactttggatgaggcaaaccctcagggactttggctacaatctgagcaaagtcccactcctatgtgacaatgagagtgctatccgcatggcggaaaatcctgttgaacacagtcgcacaaagcacatagacatccggcatcactttttaagagaccaccagcaaaagggggatatcgaagtgtttcatgttagcaccgagaaccagctagccgatatctttaccaagcctctagatgagaagaccttttgcaggctgcgcagtgagctaaatgtcttagattcgcggaacttggattga

SEQ ID NO: 4669 - DNA, 855 bp, Zea mays
  Clone ID: TF_ZM4711.C1.o5.fg
atggatcctaagggaaaggggatggtgatcaacgacaaggagaaggagtccttcatcaatgagccaaaagacgacaagcccactgactcgggctcaagtcacaagaagaaggatgggaagaagaagaggcacatcaagaagatagtctactacgacagcgacgaggaagagtatcataaggtgggcggcttggataatgccaagcaaatttgggacaccctcaagatctcacatgaggggaacgacgccaccatgatcaccaagatggagttggtggaaggcgaactaggaaggtacaccaagatgacgcccgaggaaatactcggaaagtttgtaagcgagcgaatgatgatcaaggaggcaagatatgttgatgaggcgttgaatgacccaatgcctatccacgagcctcaaaccgttgctctcaaagcaacaagcagcagggaggggctacctagcaaggtggcacaagttgaggctgccagactaaatgaggatgaaatggccctcatcatcaagcgcttcaagatggcgctcaaaggtcgcaaggagcatcccaacaagagcaagacgaagggaaagcgctcctgcttcaagtgtggtaagattggtcactttattgctaactgtcccgataatgatagtgaccaggaacaaggaaagaatgggaagagagagaacaagaaggtttacaagaaggctaagggcgaagcacatcttggaaaagaatgggactcggattgttcttcgtccgactccgacgacgaaggactcgccgccacggccttcaacaaatcgtctctcttccccaacgagcatcacacctgcctcatggcaaaggagaagaagatctga

SEQ ID NO: 4670 - DNA, 4824 bp, Zea mays
  Clone ID: TF_ZM4714.C5.o4.fg
atggatcctaaagggaagggaatcgtgatcaacgacaaggagaaggagttcttcgtcaacgagccaagggatgacaagtccaacgactcgggctcgggccacagccgcaaagatgggaagaagaagaagacaagacgcatcaaggagatcgtctactacgacagcgatgagtctacttcctcccaaaaggacgacgaccacaacgaatacgagagaaagaaaccggtcaattcgaacttttcttttgattactctcgtattcctcaaagtactaatgctcatttattatctattccacttggtaaacctcctcattttgatggagaggactacggattttggagtcacaaaatgcgtagtcacttgttctctctccatcctagcatatgggagattgtagaaagtggaatgcactttgatagtacggatagtcccatgtttattaatgaacagattcataaaaatgcacaagctactactgtgttgctagcctctttgtgcagggacgagtaccataaggtgagcggcttggacaatgccaagcagatctgggacaccctcaagatctctcatgaggggaatgatgtcaccttgctcaccaagatggagttggtggagggcgagcttggacggttcgcaatgataaggggcgaggagccaactcaaacatacaaccggctcaagacccttatcaacaaaataaggagctacggaagcacgcgatggacggatcacgacgtcgttcgcctaatgctaaggtcctttactgttcttgatcctcatttggtgaacaatattcgtgaaaatcctaggtacaccaagatgtcgcccgaagaagttctggggaagttcgtaagcgggcgaatgatgatcaaggaggcaagatatgtggacgacgcgttgaacgatcctattcatgagtctcaacccattgctctcaaggcaacgaggagcaaggaggcgctaccgagcaaggtggcgcaagttgaggcggccgggctaaataatgaggagatggccctcatcattaagcgcttcaagacggtgcttaaaggtcgcaagggacagccaagcaagaccaagacaaaggagaagcgctcgtgcttcaaatgtggtaagattggtcatttcattgctaactgtcccgataatgaaagtgaccaggaaaaggggaacaaaagggagaagaagaagcattacaagaaggccaagggcgaggcacatatcggaaaggagtgggattcagattgctcctcctccgactccgacaatgaaggactcgccgccaccgccttcaacaagtcatccctcttccccaacgagcgtcacacttgcctcatggcaagggagaagaaagtaagcactcatgatactagtacttatgcttcttcaagtgaggatgagtctagtgatgatgatgagatagattactcatgcttattcaagggattagatagatctaaaattaataagattaatgagttgattgatgctttgaattacaagaatagattactagaagaacaagaggatcttttatatgaggagcatgataaatttgttagtgcacaaaattctcttgctctagaaatcaaaaggaatgaaatgctctctagtgaattatctacttgtcatgaatccatctctaaattaaaaagtgttaatgatgatttgaatgctaagttagaaatagctagtaaatcaacatcttgtgtagaaattgttgaaacttgcaataggtgtaaagattttgacattgatgcttgtagtgaacacctagtttcaatttccaaacttaatgatgaattggctagtcttaatgctcaacttaagactagcaagagtaattttgataagctaaaatttgcaagggatgcctacacaattggtagacacccctcaattaaggatggacttggctacaagaaggaagccaagaacttgacaagacataaggctcccatctccgccaaggagaaagggaaggcccctatggctagtagtgtgcaaaagaaccatgcctttatgtaccatgataggagagaatctagaaatgcttataggagatgtaacgcatatgatgcttttgattctcatgacatgtttgcttctagttcttcttatgtgcatgatagaaatgttggtaggagaaatgttgttcataatatgcctaggagaaatgttgttaatgttcctaggaaagtttatgcatccgggggttcaagctggattatcgacagcggatgcacaaaccatatgacgggggagaagaagatgttcacctcctacgtcaagaataaggattcccaagattcaattatattcggtgatgggaatcaaggcaaggataagtctgaaacccaagggaccctcaagcgcttcctcaggagagctcaaaatgagtttgagctcaaggtgaagaagataaggagcgacaacgggtccgagttcaagaaccttcaagtggaggagttccttgaggaggaaaggatcaagcacgagttctccgctccctacacaccacagcaaaatggtgtggtagagaggaagaacaggacgctaatcgatatggcgaggacgatgcttggagaattcaagacccccgagcgtttttggtcggaagccgtgaacacggcttgccacgccatcaacagggtctaccttcatcgcctcctcaagaagacttcgtatgagctactaaccgataacaaacccaatgtatcttactttcgtgtatttgggagcaggtgctacattctagtgaagaagggtagaaattctaaatttgctcccaaagctgtagaagggtttttgttaggttatgactcaaatacaaaggcgtatagagtcttcaacaaatcatcgggttttgttgaagtctctagcgacgttgtatttgatgagactaatggctctccaagagagcaagttgttgattgtgatgatgtagatgaagaagatgttccgacggccgctatacgaaccatggcgattggagaagtgcggccacaggaacaagatgaacgagatcaaccttcatcctcaacaacggtgcatcccccaactcaagacgatgaacaggttcatcaaaaggaggcgtgtgatcaagggggagcacaagatgatcacgtgatggaggaagaagcgcaaccggcacctccaacccaagttcgagcggtgattcaaagggatcatcccgtcgaccaaattttgggtgacattagcaagggagtaactactcgatctcgattagttaatttttgtgagcattactcctttgtctcttctattgagcctttcagggtagaggaggccttgctagatccggattgggtattggccatgcaggaggaactcaacaacttcaagcgcaatgaagtttggacactggtgcctcgtcccaagcaaaatgttgtgggaaccaagtgggtgttccgcaacaaacaggacgagcacggggtggtgacgaggaacaaggctcgacttgtggcaaaaggttatgcccaagtcgcaggtttggactttgaggagacgtttgctcctgtggctaggctagaatcaattcgtatcttgctagcatatgccgctcaccattctttcaggttgtaccaaatggatgtgaagagcgctttcctcaatgggccaatcaaggaggaggtgtacgtggagcaaccccctggcttcgaggatgaacggtaccccgaccacgtgtgtaagctctctaaggcgctctatggacttaagcaagccccaagagcatggtatgaatgccttagagacttcttaattgctaatgctttcaaggttgggaaagccgatccaactctttttactaagacttgcgactgtgatctttttgtgtgccaaatttatgccgatgacataatatttggttctactaaccaaaagtcttgtgaagagtttagcagggttatgatgcagaaattcgagatgtcgatgatgggcgagttgaactacttccttgggtttcaagtgaagcaactcaaggacggcaccttcatctcccaaacaaagtacacgcaagacttgctaaagcggtttgggatgaaggacgccaagcccgcaaagactcctatggggaccgacggacacaccgacctcaacaaaggaggtaagtccgttgatcaaaaagcataccggtcaatgatagggtctttactttatttatgtgctagtagaccggatattatgcttagcgtatgcatgtgtgctagatttcaatccgatcctaaggagtgtcacttagtggcggtgaagcgaattcttagatatttggttgctacgccttgcttcgggctctggtatccaaaggggtctacctttgacttggttggatactcagattccgactatgctggatgtaaggtcgataggaagagtacatcaaggatgtgccaattcttaggaaggtccctggtgtcgtggaactctaagaaacaaacctccgttgccctatccaccgctgaggccgagtatgttgccgcagggcagtgttgcgcacaactactttggatgaggcaaactcttcgggactttggctacaatctgagcaaagtcccactcctatgtgacaatgagagtgctatccgtatggcggaaaatcctgttgaacacagccgcacaaagcacattgacatccggcatcactttttgagagaccaccagcaaaagggagatatcgaagtgtttcatgttagcaccgagaaccagctagccgatatctttaccaagcctctagatgagaagaccttttgcaggctgcgtagtgagctaaatgtcttagattcgcggaacttggattga

SEQ ID NO: 4671 - DNA, 4974 bp, Zea mays
  Clone ID: TF_ZM4715.C2.o2.fg
atggatcctaagggcaaggggatggtggtcaatgataaggagaaggagtccttcgtcaatgacccaaaggagaacaagcctactgactcgggctcgagccgcaaaagaaaagatggaaggaagaagaaaacaaggcgcatcaaagagatagtctactacgacagcgacggatcctcttcttcccaaaaggacgacgacaacgactacgagaaaaagaagacggttaattcaaacttctcttttgattattctcgtattcctcaaagtaccaatgctcatttactctccattccacttgatggagttggtggaaggcgaactcgggagattcgcgatgataagaggggaggagcaacccagacatacaacaggctcaagaccctcgtcaacaagataaggagctatggaagcacgcgatggacggaccacgacgtcgtccgcctaatgctaaggtcctttattgtacttgatccacatctggtaaacaatattcgtgaaaatcctaggtacaccaagatgtcgcccgaagaaatccttgggaaatttgtaagcggacggatgatgatcaaggaggcgagatacgtggatgatgcattgaatggcccaatccacgagcctcaaaccgttgctctcaaagcgacaaggagcaaggaggcactacctagcaaggtggcgcaaattgaggcggtcgggcttaatgaggaagaaatgacccttatcatcaagcggttcaagacggcgctaaagggtcgcaaggagcaccccaacaagaacaagacgaaggggaagcgctcctgcttcaaatgtggtaagattggtcattttatcgctaattgtcccgataatgatagtgaccaggaaaagaagagtggaaagtgggaaaagaagaactacaagaaggcgaagggcgaagcacatcttggaaaggacgaggatgaatctagtgatgatgatgaaatagaatattcatgcttattcaagggcttagatagaactaagattgataagattaacgaattgattgatgctttgaatgataagaatagattactagaaaaacaagagaaccttttatatgaagagcatgataaatttgttagtgcacaaaattctcttgctttagaagttaaaaggaatgaaatgctttcttgtgaactatctacttgtcatgaaaccatttctactttaaaaggtgttaatgatgatttaaatgctaaagtagaagtagcaaataaatctaactcttgtgtagaacatgttatgatttgcaataagtgcaaagattttaatgttgatgcttgtagtgaacacctagtttgcatatctaaattaaatgatgaagtggctagtcttaatgcccaacttaagactagcaagagtgaatttgacaagctaaaatttgcaagggatgcctacacgattggtagacacccctcaattaaggatggtattggcttcaagagggaagtcaagaacttaacaagccataaggcttccatctccgccaaggagaaagggaaggcccttatggctagtagtgctcaaaagaaccatgccttcatgtaccatgataggagacattctagaaatgtttatagaagttatgatgcttttgattctcatgccatggttgcttctagttcttctattatgcatgatagaaatttagctcggaaaaatgctatgcctagaaaaaatattgttcatgttcctaggaaattaatgaatgaaccttctacaatttattatgctttaaatgcttcctttgctatttgtagaaaggataagaaagtagtggctagaaaattaggggcaaaatgcaagggagataaaacttgcatttgggtccctaaagctatttgtactaaccttgtaggacccaacatgagttgggtttatgcatccgggggctcaagctggattatcgacagcggatgcacaaaccacatgacgggggaaaagaggatgttctcttcctacgtcaagaacaaggatccccaagattcaaccatattcggtgatgggaaccaaggcaaggtgaaagggttaggaaaaattgctatttcttccgagcactctatttctaatgtattcttagttgagtcgcttggatataatttgttatccgtaagtcaatcatgtaatatggggtataattgtctattcacaaatgtagatgtgtctgtctttaaaagaagtgatggttcattagcttttaaaggtgtattagacgacaaactctatttagttgattttgcaaaagaggaggccgatctagatgcatgcttaattgctaagactagcatgggctggctgtggcatcgccgcttagcacatgtggggatgaagaaccttcacaagcttctaaagggagaacacgtgataggtctaactaatgttactttcgaaaaagatagaccttgtgcagcttgtcaagcagggaaacaggtgggaagctctcatcatgccaaaaatgtgatgacaacatcaagacccctggagttacttcatatggacctcttcggacccgtcgcctatctaagcataggaggaagtaagtatggtcttgttataattgatgatctttcccgcttcacttgggtattctttttgcaggataaatctgaaacccaagcgaccctcaagcgcttcctaagaagagctcaaaatgagtttgagctcaaggtgaagaagataaggagcgacaatgggtccgaattcaagaacattcaagtggaggagtatcttgaggaggaaggaatcaagcacgagttctccgctccctacacaccacaacaaaatggtgtggtagagaggaagaacaggacgctcatagacatggcgaggatgatgcttggagagttcaagacccccgagcgtttttggtcggaagccgtgaacacggcttgccacgccatcaaccgggtctaccttcatcgcctcctcaagaagacttcgtatgagctactaaccatttttgggagtaaatgctacattctagtgaagaagggtagaaattccaaatttgctcccaaagcggtagaagggtttttgttaggttatgactcaaatacaaaggcgtatagggtcttcaacaaatcatcgggtttggttgaagtctctagcgacgttgtatttgatgagactaatggctctccaagagagcaagttgttgatcttgatgatgtagatgaagaagacgtgccaacggccgcaatacgcaccatggcgattggagatgtgcggccacaggagcaaaatgcgcgagatcaaccttcttcctcaacaatggtgcatcctccaactcaagacgatgaacaggttcatcaagaggagacgtgtgatcaagggggagcacaaaatgatcatgtaatggaggaagaagcacaacaggcacctccaactcaagtccgagcggtgattcaaagggatcatcccgtcgaccagattttgggtgacattagcaagggagtaactactcgatctcgattagttaatatttgtgagcattactcctttgtctcttctattgagcctttcagggtagaggaggccttgctagatccggactgggtgttggccatgcaagaggagctcaataacttcaagagaaatgaagtttggacactggtgcctcgtcccaagcaaaatgttgtgggaacaaagtgggtgttccgcaacaaacaagacgagcacggggtggtgacaaggaacaaggcacgacttgtggcaaaaggttatgcccaagtcgcaggtttggactttgaggagacttttgctcctgtggctaggctagagtccattcgtatattgctagcatatgccgctcaccattctttcaggttgttccaaatggatgtcaagagcgctttcctcaacgggccaatcaaggaggaggtgtacgtggagcaaccccctggcttcgaggatgaacggtaccccggccacgaatgtaagctctctaaggcgctctatggacttaagcaagctccaagagcatggtatgaatgccttagagattttttaattgctaatgcttttaaggttgggaaagtcgatccaactctatttactaagacttgtgatggtgatctttttgcgtgccaaatttatgtcgatgacataatatttggttctactaaccaaaagtcttgtgaagagtttagcagggtgatgactcaaaagtttgagatgtcgatgatgggcgagctaagctacttccttgggttccaagtgaagcaactcaaggatgggaccttcatctcccaaatgaagtacacgcaagacttgatcaaacggtttgggatgaaggacgccaagcccgcaaagactccaatgggaaccgacggacacaccgacctcaacaaaggaggtaagtccgttgatcaaaaggcataccggtctatgatagggtctttactttatttatgtgctagtagaccggatattatgcttagcgtatgtatgtgtgctagatttcaatccgatccaagggagtgtcacttagtggctgtgaagcgaattcttagatatttagtcgctacgccttgcttcgggatctggtacccaaaggggtctacctttgacttgattggatattcagactctgactatgttggatgtaaggtcgataggaagagtacatcggggacgtgccaatacttaggaaggtccctggtgtcatggagttctaagaaacaaacctctgttgccctatccaccgctgagaccgagtatgttgcagcaggacagtgttgcgcgcaactactttggatgaggcaaacccttagggactttggctacaatctaagcaaagtcccactcctatgtgataatgagagtgctatccgcatagcggataatcctgttgaacacagccgcacaaagcacatagacatccggcatcattttttgagagaccaccagcaaaaggggatatcgaagtgtttcatgttagcaccgagaaccagctag

SEQ ID NO: 4672 - DNA, 5052 bp, Zea mays
  Clone ID: TF_ZM4783.C4.o4.fg
atggatcctaagggaaaggggatggtggtcaacgacaatgagaaggagtccatcttcaacgagccaagggatgacaaagccaatgactctggctcgagtcaaaataagaaggatggaaagaagaagaggcgtatcaagaagattgtctactacgacagcgacgaatcttcctcttctcaaaaggatgacgaatacgaggagaaaaagaaaatggttaactcgaacttttctttcgattattctcgtattccgcataattccaatgctcatttgctttccattccacttggtaaacctccccactttgatggagaggactacggattttggagtcacaaaatgcgtagccacttgttctctcttcatccaagtatatgggagatagtagaaaatggaatgcgatttgatagttcggataactccatgtttatcaatgaacaaatccataaaaatgcacaagctactactgttcttttagcatccttgtgcagggaagagtacaataaagtgagcggcttggacaacgccaagcagatttgggacaccctcaagatctcgcatgaggggaacgacgccaccatgctcactaagatggagttggtggaaggcgaactaggaaggttcgcgatgatgaagggagaggagccaactcaaacgtacaataggctcaagaccctggtcaacaagataagaagctatggaagcatgagatggacggaccacgacgtcgtccgacttatgctaaggtccttcactgtccttgatcctcatcttgtaaactatattcgtgagaatcctaggtacatcaagatgacgcccgagaaaatactcagaaagttcgtaagcgggcgaatgatgatcaaggaggcaagatatgttgatgatgcattgaatggcccaatgccgatctacgagcctcaaactgttgctctcaaagcaacaagtagcagggagacgctacctagcaaggtggcgcaagttgaggcggccgggctgaatgaggacgaaatggccctcatcatcaagcgcttcaagacggcgctcaaaggtcatagggagcatccaaacaagagcaagacaaagggaaagcgctcctgcttcaagtgtggtaagattggtcactttattgctaactgtcccgataatgatagtgaccaggaacaaggaaagaccggaaagtgggaaaagaagaagacctacaaaaaggcgaagggcgaggcacaccttggaaaggagtgggatctggattgctcctcatccgactccgacaacgaaggactcaccgccacagccttcaacaagtcatctctcttccccaacgagcatcacacctacctcatggcaaaggagaagaaggtaagtactcgaagtacccatacatatgcttcttcaagtgatgatgaagtagactacgcaagcttattcaaaggtttagatagaactaaaattgataagatcaatgaattaattgatgcttcgaatgagaagaatagattgttagaaaagcaagaggatcttttatatgaagagcatgataaatttgttagtgcgcaaaattctcttgctctagaagttaaaagaaatgaaatgctttcatgtgaactatctacatgccatgaatctatttctagcttaaagagtattaatgatgatttaaatactaagttagaaatagctaataaatcaagctctcttgtagaacatgttgtgatttgcaataggtgtaaggattttaatgttgatgcttgtagtgaacacttaatttccatttttaaattaaatgatgaagtggctagtcttaatgcccaacttaagactagcaagaatgattttgataaactaaaatttgcaagggatgcctacactattggtagacacccctcgattaaggatggtcttggctttcaaagggaaaccaagaacttaacaggccaaagagctcctattttcaacaaggaaaaagggaaggctcctatggctagtagtaatcaaaagaatcatgcatttatttatgataggaaattttctagaaatgttcatcatgataggagttgtaatgcttataattcaaatgtcatgattgcttcaagttcttcctttatgcatagtagagatatgcctaggaaaaatgtcattcatcatatgcctaggagaaaagttgttaatcatatgcctaggaaagtgtataatggagttaccactgtctttcatgcttgcaatactaagtttattctttcatgtaaaaatgaaaaagtaattgctaaaaaggtgggggccaaatgcaagggagacaagacttgcatttgggtccctaaggctatagtaactaaccttgtaggacccaacaagagttggattatcgacagcggatgcacaaaccacatgacgggggagaaaaagatgttcacctcctacgtcaagaacaaagattcccaagattcaatcatattcggtgacgggaaacaaggcaaggttaaaggactaggaaagattgctatttcatccgagcactccatttctaatgtgtttttagttgagtcgctcgggtataacttgttgtccattagtcaactatgtaatatgggttataattgcttatttacaaatgtagatgtgtctgtctttagaaggagcgatggttcattagcttttaagggtgtactagacgacaaactctatttagttgattttgcaaaggaagaggccggtctagatgcatgcttaattgctaatactagcatgggctggctgtggcatcgcagtcttgctcatgtggggatgaagaaccttcacaaacttctaaagggagaacatgtgttaggtctaacaaatgtgactttcgaaaaagatagaccttgtgcagcttgtcaagcaggtaaacaagtgggaaatgcacatcacaacaagaacgtgatgaccacatcaagacccctggagttgctgcatatggacctcttcggacccgtcgcctacctcagcatcgggggaagtaagtatggtcttgttatagttgatgatttttcccgcttcacttgggtattctttttgcaggataagtctgaaacccaagggacccttaagcgcttcctaaggagagctcaaaacgagtttgagctcaaggtgaaaaagataagaagcgacaatgggtccgagttcaagaaccttcaagtggaggagtaccttgaggaggaaggaatcaagcacgagttctccgctccctacacaccacagcaaaatggtgtggtagagaggaagaataggacactcatagacatggcgaggacgatgcttggagagttcaagacggtcgagcggttttggtcggaagctgtgaacacggcttgccatgccataaaccgggtctaccttcatctactcctcaagaagacttcgtatgagcttctaaccagtaacaaacccaacgtttcatactttcgtgtatttgggagtaaatgttatattctagtgaagaaaggtaggaattccaaatttgctcccaaagctgtagaagggtttttgttaggttatgactcaaatacaaaggcgtatagagtcttcaacaaatcatcgagtttggttgaagtctctagcaacattgtatttgatgagattaatggctctccaagagagcaagttgatattgatgatgtagatgaagaagatgttccaacggccgcaatacgcaccatggcgattggagatgtgcgaccacaggaacaaaaggagcaagatcaaccttcttcctcaacaatggtgcatcccccaactcaagatgatgaacaggttcatcacgaagagacggtagaagaggccttgctagatccggactgggtgttggccatgcaggaagagctcaacaacttcaagcgaaatgaagtttggacactggtgcctcgtcccaagcaaaatgttgtgggaaccaagtgggtgttccgcaacaaacaagacgagcacggggtggtgacaaggaacaaggcacgacttgtggcaaaaggttatgcccaagtcgcaggtttggactttcaggagacttttgctcctgtggctaggctagagtctatttgcatattgttagcctatgccactcaccattctttcaggttgttccaaatggatgtgaagagcgctttcctcaacgggccaatcaaggaggaggtgtacgtagagcaaccccctggctttgaggatgaacggtaccccgaccatgtgtgtaagctctctaaggcgctctatggacttaagcaagccccaagagcatggtatgaatgccttagagactttttaattgctaatgctttcaaggttgggaaagccgatccaactttattcactaagacatgtgatggcgatttatttgtgtgccaaatttatgtcgatgacataatatttggttctactaaccaaaagtcttgtgaagagtttagcagggtgatgactcaaaaatttgagatgtcgatgatgggcgagttgaactacttcctcgggttccaagtgaagcaactcaaggacgacaccttcatttcccaaacgaagtacacgcaagacttgatcaagcgttttgggatgaaggatgccaagcccgcaaagactccaatgggaaccgatggacatgtcgacctcaacaaaggagggtcaacctttgacttaattggatactcagactccgattatgctggatgcaaggttgataggaagagtacatcagggacgtgccaattcttaggaaggtccctggacagtgttgcgcggcaactactttggatgaggcaaaccctccgggactttggctacaatctgagcaaagtcccactcctatgtgataatgagagtgctatccgcatggcggacaatcctgttgaacacagccgcactaagcacatagacatccgacatcactttttgagagaccaccagcaaaagggagatatcgaagtgttttatgttagcaccgagaaccagctagccgatatctttaccaagcctttagatgagaagaccttttgtaggctgcgtagtgagctaaatgtcttagattcgcagaacttggattga

SEQ ID NO: 4673 - DNA, 4989 bp, Zea mays
  Clone ID: TF_ZM4840.C3.o2.fg
atggatcctaaggggaagggaatcgtgatcaacgacaaggagaaggaatccttcgtcaacgagcccaaagaagacaagcctaccgactctggctcgggccatagacggagggaagggaagaagaagaagacaaggcgcatcaaggagatcgtctactacgacgacagcgacgaatcttcctcttcccaaaaggacgacgaccacaacgactacgagcaaaggaaaccggttaattctaacttttcctttgactactctcgtattccgcaaagttcaaattcacatttgctttccattccactcggcaagcccccacactttgatggagaggactacggattttggagccacaaaatgcgtagtcacctattttctctccatcctagtatatgggagattgtagatagtggaatgcactttaatagttcggatagtcctatattcattaatgagcaaatccataagaatgcacaagctactactgttcttctagcttcattgtgcagggatgaatataacaaagtgagtggcttagataacgccaagcaaatctgggataccctcaagatctctcatgagggaaatgacgctaccttgctcaccaaaatggagttggtggagggcgagcttggacggttcgcgatgataaggggcgaggagccaactcaaacatacaaccggctcaagacccttatcaacaaaataaggagctacggaagcacgcgatggacggaccacgacgtcgtccgactaatgctaaggtcctttaccgttcttgatcctcatttggtgaataatattcgtgagaatcccaggtacaccaaaatgtcgcccgaagaagtcttaggaaaattcgtcagcgggcgaatgatgatcaaggaggcaaggtacgtggacgacgccttgaatggaccgatcaacgaaccacaaccttttgctctcaaagcaacaagaagtaaggaggcgctacctagcaaggtggcacaaattgaggcggtaggacttaatgatgaagagatggctctcatcatcaaacgcttcaagacggtgctgaagggtcacaaggggcagccaagcaagaccaagacgaaggggaagcgctcatgcttcaagtgcggtaagattggtcattttattgctaactgccccgataatgatagtgaccaggaaaagggaaacaagagggaaaagaagaagcattacaagaaagcaaagggcgaggcacatctaggcaaggagtgggactcggattgctcctcttccgactccgacaatgaaggactcgccgccaccgccttcaacaaatcaaccctcttccccaacgagcgtcacacatgccttatggcaagggagaagaaggtatgtactcgcaactctacctatgcttcttcaagtgaggacgaatctagtgatgatgatgaagtagattattcatgtttgttcaagggcttagatagatctaagatagacaaaattaatgaattaattgatgccttgaatgaaaagaatatacttttagaaaagcaagaggatttgttatatgaagaacatgataagtttgtagaggcacaaaaatcccttgcattagaaattaagagaaatgaaatgcttgcttgtgaagtgtcaacatgccatgattctatttctaacttaaagagcataaacgatgatttaaatgctaaactagtagaagcaaataaatccaactcgtgtgttgaatatgttgaaatttgcactaggtgtaaggatattgatattaatgcttgtagcgaacacttagtttctatttcaaaattgaatgatgaattagctagtcttaatgctcaacttaagactagcaagagtaattttgataaactaaaatttgctagggatgcctacacggttggtagacacccctcaattaaggatgggcttggcttcaagagagaagtcaagaacttgacaagccataaggctcctatctccgccaaggagaaagggaaggctcctatggctagtagcactaaaaagaaccatgcttttttgtatcatgatagaagtgcttataggggttataatgcttatgatgattgtgatgctcatagttcttcctttatgcatggtagaaatatgtctaggaaaaatgctatgcctagaaagaatgttattcatgctcctaggaaagtagtgaatgaaccttctacaatttattgtgctttaaatgcttcctttgttatttgtagaaaggataagaaaattgttgctaggaagttaggggcaaaatgcaagggagacaaaacttgcatttgggtccctaaggatatttgcactaaccttgtaggacccaacatgagttgggtttatgcatccgggggttcaagctggattatcgacagcggatgcacaaaccatatgacgggggagaagaagatgttcacctcctacgtcaagaataaggattcccaagattcaatcatattcggtgatgggaatcaaggcaagatagaccttgtgcagcttgtcaagcaggataagtctgaaacccaagggaccctcaagcgcttcctcaggagagctcaaaatgagtttgagctcaaggtgaagaagataaggagcgacaacgggtccgagtttaagaaccttcaagtggaggagttccttgaagaggaagggatcaagcacgagttctccgctccctacacaccacagcaaaatggtgtggtagagaggaagaacaggacgctcatcgacatggcgaggacgatgctaggagagttcaagacccccgagtacttttggacggaagccgtaaacacggcttgccacgccatcaacagggtctaccttcatcgcctcctcaagaagacgtcgtatgagctactaaccggtaacaaacccaatgtatcctactttcgtgtatttgggagcaagtgctacattctagtgaagaagggtagaaattcaaaatttgctcccaaagctgtagaagggtttttgttaggttatgactcaaatacaaaggcgtatagagtcttcaacaaatcatcaggtttggttgaagtctctagtgacgttgtatttgatgagactaatggctctccaagagagcaagttgttgattgtgatgatgtagatgaagaagatgttccaacggccgcaatacgaaccatggcgattggagacgttcggccacaggaacaagatgaacgagatcaaccttcttcctcaactatggtgcatcccccaactcaatacattgaacaggttcatcaacaggaggcgtgtgatcaagggggagcacaagatgatcatatgatggaggaagaagcgcaaccggcacctccaacccaagttcgagcggtgattcaaagggatcatcccgtcgaccaaattctgggtgacattagcaagggagtaactactcggtctcgattagttaatttttgtgaacattactcctttgtctcttctattgagcctttcagggtagaggaggccttgctagatccggactgggtgttggccatgcaggaggagcttaacaacttcaagcgcaatgaagtttggacactggtgcctcgtccgaagcaaaatgttgtgggaaccaagtgggtgttccgcaacaaacaggacgagcacggggtggtgacgaggaacaaggctcgacttgtggcaaaaggttatgcccaagtcgcaggtttggactttgaggagacgtttgctcctgtggctaggctagaatcaattcgtatcttgctagcatatgccgctcaccattctttcaggttgtaccaaatggatgtgaagagcgctttcctcaacgggccaatcaaggaggaggtgtacgtggagcaaccccctggcttcgaggatgaacggtaccccgaccatgtgtgtaaactctctaaggcgctctatggacttaagcaagccccaagagcatggtatgaatgccttagagactttttaattgctaatgctttcaaggttgggaaagccgatccaactctttttacaaagacatgtgatggtgatttgtttgtgtgccaaatttatgtcgatgacataatatttggttctactaaccaaaagtcttgtgaagagtttagcagggtgatgacgcagaaattcgagatgtcgatgatgggcgagttgaactacttccttgggttccaagtgaagcaactcaaggacggcaccttcatctcccaaacgaagtacacgcaagatctgctaaagcggtttgggatgaaggacgccaagcccgcaaagactccgatggggaccgacggacacaccgacctcaacaaaggaggtaagtccgttgatcaaaaagcataccggtcaatgataggttctttgctttacttatgtgctagtagaccggatattatgcttagcgtatgcatgtgtgctagatttcaatccgatcctaaggagtgtcacttagtggcggtgaagcgaattcttagatatttggttgctacgccttgcttcgggctctggtatccaaaggggtctacctttgacttagttggatactcagactccgactatgctggatgtaaggtcgataggaagagtacatcggggacgtgccaattcttaggaaggtccctggtgtcatggaactctaagaaacaaacatccgttgccctatccaccgctgaggccgagtacgttgccgcaggtcagtgttgcgcgcagctactttggatgaggcaaaccctccgggactttggctacaatctgagcaaagtcccactcctatgtgacaatgagagtgctatccgcatggcggagaatcctgttgagcacagccgcacaaagcacatagacatccggcatcactttttgagagaccaccagcaaaagggagatatcgaagtgtttcatgttagcaccgagaaccagctagccgatatcttcactaagcctctagatgagaagaccttttgcaagttgcgtagtgagcttaatgtcttagattcgcggaacctggattga

SEQ ID NO: 4674 - DNA, 4872 bp, Zea mays
  Clone ID: TF_ZM4869.C1.o9.fg
atggatcctaaagggaagggaatcgtgatcaacgacaaggagaaggagtccttcgtcaacgagccaagggatgacaagtccaacgactcgggctcgggccacagacgcaaagatgggaagaagaagaagacaagacgcatcaaggagatcgtctactacgacagcgatgagtctacttcctcccaaaaggacgacgaccacaacgaatacgagaaaaagaaaccggtcaattcgaacttttcttttgattactctcgtattcctcaaagtactaatgctcatttattatctattccacttggtaaacctcctcattttgatggagaggactacggattttggagtcacaaaatgcgtagtcacttgttctctctccatcctagcatatgggagattgtagaaagtggaatgcactttgatagtacggatagtcccatgtttattaatgaacagattcataaaaatgcacaagctactactgtgttgctagcctctttgtgcagggacgagtaccataaggtgagcggcttggacaatgccaagcagatctgggacaccctcaagatctctcatgaggggaacgatgtcaccttactcaccaagatggagttggtggagggcgagctaggacggttcgcaatgataaggggcgaggagccaactcaaacatacaaccggctcaagacccttatcaacaaaataaggatctacggaagcacgcgatggacggatcacgacgtcgtccgcctaatgctaaggtcctttaccgttcttgatcctcatttggtgaacaatattcgtgaaaatcctaggtacaccaagatgtcgcccgaagaagttctggggaagttcgtaagcgggcgaatgatgatcaaggaggcaagatatgtggacgacgcgttgaacggtcctattcatgagcctcaacccattgctctcaaggcaacgaggagcaaggaggcgctaccgagcaaggtggcgcaagttgaggcggccgggctaaataatgaggagatggccctcatcattaagcgcttcaagacggcgcttaaaggtcgcaagggacagccaagcaagaccaagacaaaggagaagcgctcgtgcttcaaatgtggtaagattggtcatttcattgctaactgtcccgataatgaaagtgaccaggaaaaggggaacaaaagggagaagaagaagcattacaagaaggccaagggcgaggcacatatcggaaaggagtgggattcggattgctcctcctccgactccgacaatgaaggactcgccgccaccgccttcaacaagtcatccctcttccccaacgagcgtcacacatgccttatggcaagggagaagaaggaaatagattactctagtttgttcaagggattggatagaactaaagtagaaaagattaatgaattgattgatgccttgaatgaaaaggatagactcttagaaaaacaagaggatcttttatatgaagagcatgacaaatttgtagaggcacaaaaatcttatgctttagaagttaaaagaaatgaagtgctttctagtgaattatcttcttgtcatgaaaccattgctactttaaaaggtgttaataatgatttaaatgctaaactagaagtggctagtaaatctaactcttgtgtagaacatgttatggtttgcactaggtgtaaagattttaatgttgatgcttgtagtgaacacctagtttcaatttctaaattgaatgatgaagtggctagtcttaatgcccaacttaagactagcaaaagcgaatttaataaattaaaatttgcaagggatgcctatacgattggtagacatccctcaattaaggatggacttggcttcaagagggaagccaagaacttaacaagccataaggctcccattcccgccaaggagaaagggaaggcccctatggctggtagtgctaaaaagaaccatgcttttatgtatcatgataggagacatactagaaatgcaaatagaagttataatgtttttgattcatatgtttatgattctcatgacatgtttgcttctagttctttctatgtgcatgataggaatgttggtaggagaaatgttgttcataatatgcctaggagaaatgttgttaatgttcctaggaaagttaatgagccttctacaatatatcatgctttgaatgcttcctttgcaatttgtagaaaggatagaaaggtgattgctaggaagttaggggcaaaatgcaagggtgataaaacttgcatttggatccctaaggaaattgtgactaaccttgtaggacccaacaagagttgggtttatgcatccgggggttcaagctggattattgacagcggatgcacaaaccatatgacgggggagaagaagatgttcacctcctacgtcaagaataaggattcccaagattcaataatattcggtgatgggaatcaaggcaaggtaaaagggttagatgtgtctgtctttagaagaagtgatgattcactagcttttaagggtgtattagacggcaaactttatttagttgattttgaaaaagaggaggataagtctgaaacccaagggaccctcaagcgcttcctcaggagagctcaaaatgagtttgagctcaaggtgaaaaagataaggagcgacaacgggtccgaattcaagaaccttcaagtggaagagttccttgaggaggaagggatcaagcacgagttctccgctccctacacaccacaacaaaatggtgtggttgagaggaagaacaggacgctaatcgatatggcaaggacgatgcttggagaattcaagacccccgagcgtttctggtcagaagccgtgaacacggcttgccacaccatcaacagggtctaccttcatcgcctcctcaagaagacttcgtatgagctactaaccggtaacaaacccaatgtatcttactttcgtgtatttgggagcaagtgctacattctagtaaagaagggtagaaattctaagtttgctcctaaagctgtagaagggtttttgttaggttatgactcaaatacaaaggcatatagagtcttcaacaaatcatcgggtttggttgaagtctctagcgatgttgtatttgatgagactaatggctctccaagagagcaagttgttgattgtgatgatgtagatgaagaagatgttccgacggctgctatacgaaccatggcgattggagaagtgcggccacaggaacaagataaacgagatcatccttcttcctcaacaacggtgcctcccccaactcaagacgatgaacaggttcatcaacaggaggcgtgtgatcaagggggagcacaagatgatcatgtgatggaggaagaagcgcaaccggcacctccaacccaagttcgagcgatgattcaaaggaatcatcccgtcgatcaaattctgggtgatattagcaagggagtaacaactcgatctcgattagttaatttttgtgagcattactcctttgtctcttctattgagcctttcagggtagaggaggccttgctagatccggactgggtggtggccatgcaggaggagctcaacaatttcaagcgcaatgaagtttggacactggtgcctcatcccaagcaaaatgttgtgggaaccaagtgggtgttccgcaacaaacaagacgagcacggggtggtgacaaggaacaaggctagacttgtggcaaaaggttatgcccaagtcacaggtttggactttgaggagacttttgctcctgtggctaggctagaatcaattcgtatcttgctagcatatgctgctcaccattctttcaggttgtaccaaatggatgtgaagagcgctttcctcaatgggccgatcaaagaggaggtgtacgtagagcaaccccctggcttcgaggatgaacggtaccccgaccatgtgtgtaagctctctaaggcgctctatggacttaagcaagccccaagagcatggtatgaatgccttagagactttctaattgttaatgctttcaaggttgggaaagccgatccaactctttttactaagacatgtgatggtgatttgtttgtgtgccaaatttatgtcgatgacataatatttggttctactaaccaaaagtcttgtgaagagtttagcagggtgatgacgcagaaattcgagatgtcgatgatgggcgagttgaactatttccttgggttccaagtgaagcaactcaaggacggcaccttcatctcccaaacaaagtacacgcaagatctgctaaagcgatttgggatgaaggacgccaagcccgcaaagactccgatggggaccgacggacacaccgacctcaacaaaggaggtaagtccgttgatcaaaaagcataccggtcaatgatagggtctttactttatttatgtgctagtagaccggatattatgcttagcgtatgcatgtgtgctagatttcattccgatcctaaggagtgtcacttagtggcggtgaagcgaattcttagatatttggtcgctacaccttgcttcgggatctggtatccaaaggggtctaactttgacttgattgggtactcagattccgactatgctggctgtaaggtcgataggaagagtacatcggggacgtgccaattgttaggaaggtccctggtgtcatggaactctaagaaacaaacctccgttgccctatccaccgctgaggccgagtacgttgccgtaggacagtgttgcgcacaactactttggatgaggcaaacccttcgggactttggctacaatctgagcaaagtcccactcctatgtgataatgagagtgtatccgcatggcggaaaatcctgttgagcacagccgcacaaagcacatag

SEQ ID NO: 4675 - DNA, 3072 bp, Zea mays
  Clone ID: TF_ZM4878.C20.o2.fg
atggatcctaagggaaaggggatagtggtcaacaacgagaaggagtctatcttcaacgagccgaaggatgacaagcctaccgactcgggttcaagccacaagcgcaaagacgggaagaagaagaagacaaggcgcatcaaggagatcgtctactacgacagcgacgaatcttcctcttcccaaaaggacgacgacgactacgagaaaaagaaaacggtcaattcaaacttttcttttgattactctcgtattcctcaaagtacaaatgctcatttattatctgttccacttggtaaacctcctcattttgatggagaagactacggattttggaatcacaaaatgcgtagtcacttgttctctctccatcctagcatatgggagattgtagagagtggaatgcactttgatagtacggaaagtcccatgtttattaatgagcaaatccataaaaatgcacaagctactactgttcttctagcttcattgtgcagggatgaataccacaaagtgagcggcttggataacgccaagcagatctgggacaccctcaagatttcacatgagggaaacgacgtcaccttgctcactaagatggagttggtagagggcgagcttggacgattcgcgatgataaggggcgaggagccgacacaaacatacaaccggctcaagacccttatcaacaaaataaggagctacggaagcacgcgatggacggaccacgacgtcgtccgattgatgctaaggtcctttaccgttcttgatcctcacttggtgaataacattcgtgagaatcccaggtacaccaaaatgtcgcccgaagaagtccttggaaaattcgtaagcgggcgaatgatgatcaaggaagcgaggtacgtggacgacgctctaaacggtccaatcaatgagcctcaacccgttgctctcaaggcaacaaggagcaaggaggcgttacccagcaaggtagcacaaattgaggccgccagacttaatgatgaagagatggccctcatcatcaagagattcaagacagcgcttaagggtcgcaagggacagccaagcaagaccaaagccaaggggaagcgctcatgtttcaaatgcggtaagattggtcattttattgctaactgtcccgataatgaaagtgaccaggaacacgggagcaagagggaaaagaagaaaaattacaagaaggccaagggcgagacacatctaggaaaggagtgggactcggattgctcctcctccgactccgacaatgaaggactcgccgccaccgccttcaacaagtcatctctcttccccaacgagcgtcacacatgccttatggcaagggagaagaaggtatgtagtcgaaactctacttatgcttcttcaagtgaggacgaatctagtgatgaggatgaaatagattattcatgtttatttaagggcctagatagaaccaaggtagataaaattaatgaattaattgatgccttgaatgataagaataggcttttagaaaaacaagaagatttgttgtatgaagaacatgataaatgtgtagaagcacaaaaatctcatgctttagaagttaaaagaaatgaaatgctttcttgtgaattatcttcttgccatgagacaatttctagcttaaggagcattaatgatgatttgaatgctaagatagaaatagctagtaaatcaacaacttgtgtagaaaatgttgttatttgcaatagatgtaaagactttgatattgatgcttgtaatgaacacatagcttctattgcaaagttaaatgatgaaatggctagtcttaatgcccaacttaaggctagcaaaagtgattttgataaactaaaatttgctagggatgcctacacgattggtagacacccctcaattaaggatgggcttggcttcaagagggaagccaagaacttaacaagccataaggctcccatcttcgccaaggagaaagggaaggcccccatggcaagtagtactaaaaagaaccatgcttttatgtacaatgatagaagacagtctcataggagttgtaatacttttgattcacatgcctatgactcttatgcaataaaggataggaagatagttgctaggaaattaggggcaaaatgcaagggtgataaagcttgcatttgggtccctaaggaaattgtgactaaccttgtaggacccaacaagagttgggtttatgcatccgggggctcaagctggattatcgacagcggatgcacaaaccatatgacgggggagaaggagatgttcacctcctacgtcaagaataaggattcccaagattcaatcatattcggtgatgggaaccaaggcaaggtgaaaggtttaggcaagattgcaatatccaatgagcactctatctctaatgtgtttttagttgagtctcttggatataatttactatctgtcagtcaattatgtaatatggggtataattgtctatttacaaatgtagatgtgtctgtctttagaagaagtgatggttcactagcatttaagggtgtgctagacggcaaactttatttagttgattttgcaaaagaggaggccggtctagatgcatgcttaatcgctaagactagcatgggctggctgtggcatcgccgcttagcacatgtggggatgaagaaccttcacaagcttctaaagggggaacacgtgataggtttgactaacgtgcaattcgaaaaagatagaccttgtgcagcgtgtcaagcaggtaaacaagtgggaggagcacatcacagcaagagtgtgatgaccacttcaagacctctggagctgctgcatatggacctcttcggacccgtcacctatctgagcataggaggaagtaagtatggtttagttattgtggatgacttttcccgcttcacttgggtgttctttttgcaggataagtctgaaacccaagggaccctcaagcgcttcctaaagagagctcaaaatgagtttgagctcaaggtgaagaagataaggagcgacaacgggtccgagttcaagaaccttcaagtggaggagtttcttgaggaggaagggtga

SEQ ID NO: 4676 - DNA, 4809 bp, Zea mays
  Clone ID: TF_ZM4879.C3.o2.fg
atggatcctaagggaaaggggatggtggtcgacaacaacgagaaggagtctatcttcaacgagccgaagaatgacaagtctaccgacttgggctcaagccacaagcgcaaagatgggaagaagaagaagacaaggcgcatcaaggagatcgtctactacgacagcgacgaatcctcttcttcccaaaaggacgacgacaacgactacaggaagacggtcaattcgaacttttcatttgattattctcgtatgccacatagttcgaattcacatttgctttccattcctcttggcaaacctccacactttgatggggaagactacggattttggagtcacaaaatgcgtagtcacttattctctctccatccaagcatatgggagattgtagagaatggaatgaaatttgatagttcggatagtcccatgttcattaatgagcaaattcataagaatgcacaagctactactgttctattagcatccttgtgcagggaagagtacaataaggtgagcggcttggacaatgccaagcagatatgggataccctcaagatctctcacgaggggaacgacatcaccatgcttactaagatggagttggtggagggtgagcttggaagatttgcgatgataaggggcgaggagccaacccaaacatacaaccggctcaagacccttatcaacaaaataaggagctatggaagcacgcgatggacggaccagacgtacaccaaaatgtcgcccgaagaagtcctaggaaaattcgtcagcgggcgaatgatgattaaggaagcgaggtacgtggacgacgccttgaatggaccgatcaacgagccacaacctcttgctctcaaagcaacaagaagcaaggaggcgctacctagcaaggtggcacaaattgaggcggccggacttaatgatgaagagatggctctcatcatcaaacgcttcaagatggtgctaaagggtcacaaggggcagccaagcaagaccaagacaaaggggaagcgctcatgcttcaagtgcggtaagattggtcattttatcgctaactgccccgataatgatagtgaccaggaacagggaaacaagagggaaaagaagaagaattacaagaagaccaagggcgaggcacatcttggaaaggaatgggattcggattgctcctcttccgactccgacaacgagggactcgccgccaccgccttcaacaaatcaaccctcttccccaacgagcgtcacacatgccttatggcaagggagaagaaggtatgtactcggaactctacctatgcttcttcaagtgaggacgaatctagtgatgaggatgaagtagattactcatgtttgtttaagggcctagatagaaccaaggtagacaaaattaatgaattgattgatgccttgaatgataagaatatgcttttagaaaagcaagaagatttgttgtatgaagaacatgataaatttgtagaagctcaaagatctcatgctctagaagttaaaagaaatgaaatgctttcttgtgaaatatcttcttgccatgagacaatttctaaattaaggagcattaatgatgatttgaatgctaagttagagatcgctagtaaatctaccacttgtgtagaaaatgttataatgtgcactaggtgtaaagatattaaccttgatgcttatagtgaacacctagcttgcatttctaaattaaatgaagaggtagctagtcttaatgcccaacttaagactagcaaaagtgattttgagaaactaaaatttgctagggatgcctacacggttggtagacacccctcaattaaggatggacttggcttcaagagagaagccaagaacttaacaagccataaggctcccattcccgccaaggagaaagggaaggcccctatggctagtagtgtgcaaaataaccatgcgtttatataccatgacaggagacaatctagaaatgcttataggaattgtaatgcatatgatgctattaattctcatgccatgtttgcttctagttcttcttatgtgcatgatagaaatgtttgtaggagaaatgttgttcataatatgcctaggagaaatggtgttaatgttcctaggaaagctaatgaaccttctacaatatatcatgctttaaatgcttcatttgctatttgtagaaaagataggaagatagttgctagaaaattaggggcaagatgcaagggagacaaaacttgcatttgggtccctaaggatatttgtgctaaccttgtaggacccaacatgagttgggtttatgcatccgggggttcaagctggattatcgacagcggatgcacaaaccatatgacgggggagaagaagatgttcacctcctacgtcaagaataaggattcccaagattcaattatattcggtgatgggaatcaaggcaaggataagtctgagacccaaggaaccctcaagcgcttcctaaggagagctcaaaacgagtttgagctcaaggtgaagaagataaggagcgacaacggatccgaattcaagaaccttcaagtggaagagttccttgaggaagaaggaatcaagcacgagttttccgctccctacacaccacaacaaaatggtgtggtagagaggaagaacaagacgctcatcgatatggcgaggacgatgctaggagagttcaagacccccgagtgcttttggacggaagccgtgaacacggcttgccacgccatcaacagggtctaccttcatcgcctcctcaagaagacatcgtatgagctactaaccggtaacaaacccaatgtatcttactttcgtgtatttgggagcaagtgctacattctagtgaagaagggtagaaattctaagtttgctcccaaagctgtagaagggtttttgttaggttatgattcaaatacaaaggcgtatagggtcttcaacaaatcatctggtttggttgaagtctcttgcgacgttgtatttgatgagactaatggctctccaagagagcaagttgttgatcttgatgatgtagatgaagaagatgttccaacggccgcgatacgcaccatgacgattggagatgtccggcctcgggaacaattagagcaagatcaaccgtcttcctcaactatggtgcatcccccaactcaagacgatgaacaggttcatcaacaggaggcgtgtgatcaagggggagcacaagatgatcatgtgatggaggaagaagcggaaccggcacctccaacccaagttcgagcaatgattcaaagggatcatcccgtcgacctaattctgggtgacattagcaagggagtaactactcggtctcgattagttaatttttgtgaacattactcctttgtctcttctattgagcctttcagggtagaagaggccttgctagatccggactgggtgttggccatgcaagaggagctcaacaacttcaagaggaatgaatgggtgttccgcaacaaacaagacgagcacggagtggtgacaaggaacaaggctcgacttgtggcaaaaggttatgcccaagtcgcaggtttggactttgaggagacttttgctcctgtggctaggctagagtccattcgtatcttgctagcatatgccgctcaccattctttcaggttgttccaaatggatgtgaagagcgctttcctcaacgggccaatcaaggaggaggtgtacgtggagcaaccccctggcttcgaggatgaacgataccccgaccacgtgtgtaagctctctaaggcgctctatggacttaagcaagccccaagagcatggtatgaatgccttagagatttcttaattgctaatgctttcaaggttgggaaagtcgatccaactcttttcactaagacatgtgatggtgatttgtttgtgtgccaaatttatgtcgatgacataatatttggttctactaataaaaagtcttgtgaagagtttagcagggtgatgacgcagaaattcgagatgtcaatgatgggcgagttgaactacttccttgggttccaagtgaagcaactcaaggacgacaccttcatctctcaaacgaagtacacgcaagacctgctgaagcggtttgggatgaaggacgccaagcccgcaaagacgccgatggggaccgacggacacaccgacctcaacaaaggaggtaagtccgttgatcaaaaggcataccggtcaatgatagggtcattactttacttatgtgctagtagaccggatattatgcttagcgtatgcatgtgtgctagatttcaatccgatcctaaggagtgtcacttagtggcagtgaagcgaatccttagatatttagttgctacgccttgcttcgggctctggtatccaaaggggtctacctttgacttgattggatattcagactccgattatgctggatgtaaggtcgataggaagagtacatcggggacgtgccaattcttaggaaggtccctggtgtcatggaactctaagaaacaaacttccgttgccctatccaccgctgaggccgagtatgttgccgcaggacagtgttgcgcgcaactactttggatgaggcaaaccctcagggactttggctacaatctgagcaaagtcccactcctatgtgataatgagagtgctatccgcatggcggaaaatcctgttgagcacagccgcacaaagcacatagacatccggcatcactttttgagagaccaccagcaaaagggagatatcgaagtgtttcatgttagcaccgagaaccagctagccgatatctttaccaagcctctagatgagaagatgtag

SEQ ID NO: 4677 - DNA, 4668 bp, Zea mays
  Clone ID: TF_ZM4879.C4.o2.fg
atggatcctaaggggaagggaatcgtgatcaacgacaaggagaaggagtccttcgtcaacgagcccaaagatgacaagcctaccgactccggctcgggtcatagacgaaaggaagggaagaagaagaagacaaggcgcatcaaggagatcgtctactacgacgacagcgatgagtctacttcttcccaaaaggacgacgacaacgactacaggaagacggtcaattcgaacttttcatttgattattctcgtattccacatagttcgaattcgcatttgctttccattcctcttggcaaacctccacacttcgatggggaggactacggattttggagtcacaaaatgcgtagtcacttattctctctccatccaagcatatgggagattatagagaatggaatgaaatttgatagctcggatagccctatgcttataaatgaacaaatccatagaaatgcacaagctactactgttctcttagcatctttgtgcagggaagagtacaataaggtgagcggcttggacaatgccaagcagatatgggacaccctcaagatctctcacgagggcaacgacgtcaccatgctcaccaagatggaattggtggagggcgaacttgggagattcgctatgataaggggggaggagccaacccaaacatacaaccggctcaagacccttgtcaacaagataaggagctatggaagcacgcgatggacggatcacgacgtcgtccgcctaatgctaaggtccttcaccgttcttgatcctcatctcgtaaacaatattcgtgagaatcccaggtacacgacgatgacgcccgaggaggtactcggaaaattcgtaagcaggcggatgatgatcaaggaggcgagatacgtcgacgacgcgttgaacggtccaatccacgagcctcaacccattgctctcaaggcaacgaggagcaaggaagcgctaccaagcaaggtggcgcaagttgaggtggccgggctaaataatgaggagatggccctcatcattaagcgcttcaagacggcgcttaaaggtcgcaagggacagccaagcaagaccaagactaaggagaagcgctcgtgcttcaaatgtggtaagattggtcatttcattgctaactgtcccgataatgaaagtgaccaggaaaaggggaacaaaagggagaagaagaagcattacaagaaggccaagggcgaggcacatatcggaaaggagtgggattcagattgctcctcctccgactccgacaatgaaggactcgccgccaccgccttcaacaagtcatccctcttccccaacgagcgtcacacttgcctcatggcaagggagaagaaagtaagcactcatgatactagtacttatgcttcttcaaaacatgttacaatctgtaggaggtgtaaagatttcgatgttgatgcttgtagtgatcatttagtttcaatttccaaattaaatgaggaattggctagtcttaatgcccaacttaagactagcaagaatgaatttgataagctgaaatttgcaagggatgcctacacgattggtagacacccctcaattaaggatggacttggctacaagagggaagccaaggacttgacaagccataaggctcctatctccgccaaggagaaagggaaggctcctatggctagtagtactaaaaggaaccatgcttttatgtatcatgataagagacaaactagaaatgcttataggagttataatgcttatgatgattttgactctcatgccatgtttgcttctagttcttcctatatgcatggtagaaatatgtctaggagaaatgctattcatcatgtgcctagaaagaatattattcatgctcctaggaaagtagtgaatgaaccttctacaatttattgtgctttaaatgcttcctttgctatttgtagaaaggataggaaaatagttgctaggaagttaggggcaaaatgcaagggagacaaaacttgcatttgggtccctaaggatatttgcactaaccttgtaggacccaacaagagttgggtttatgcatccgggggctcaagctggattatcgacagcggatgcacaaaccatatgacgggggagaagaagatgttcacctcctacgtcaagaataaggattcccaagattcaataatattcggtgatgggaaccaaggcaaggataagtctgaaacccaagggaccctcaagcgcttcctcaggagagctcaaaatgagtttgagctcaaggtgaagaagataaggagcgacaacgggtccgagttcaagaaccttcaagtggaggagttccttgaggaggaagggatcaagcacgagttctccgctccctacacaccacaacaaaatggtgtggtagagaggaagaacagggcgctaatcgatatggcgaggacgatgcttggagaattcaagacccccgagcgtttttggtcggaagccgtaaacacggcttgccacgccatcaacagggtctaccttcatcgcctcctcaagaagacttcatatgagctgctaaccggtaacaaacccaatgtatcttacttttgtgtatttgggagcaaatgctacattctagtgaagaagggtagaaattctaagtttgctcccaaagctgtagaagggtttttattaggttatgactcaaatacaaaggcgtatagagtcttcaacaaatcatcgggtttggttgaagtctctagcgacgttgtatttgatgagactaatggctctccaagagagcaagttgttgatcttgatgatgtagatgaagaagatgttccgacggccgctatacgaaccatggcgattggagaagttcggccacaggaacaagatgaacgagatcaaccttcttcctcaactatggtgcatcccccaactcaagacgatgaacatgttcatcaacaggaggcgtgtgatcaagggggagcacaagatgatcacgtgatggaggaagaagcgcaaccggcacctccaacccaagttcgagcggtgattcaaagggatcatcccgtcgaccaaattttgggtgacattagcaagggagtaactactcgatctcgattagttaatttttgtgagcattactcctttgtctcttctattgagcctttcagggtagaggaggccttgctagatccggattgggtattggccatgcaggaggaactcaacaacttcaagcgcaatgaagtttggacactggtgcctcgtcccaagcaaaatgttgtgggaaccaagtgggtgttccgcaacaaacaggacgagcacggggtggtgacgaggaacaaggctcgacttgtggcaaaaggttatgcccaagtcgcacgtttggactttgaggagatgtttgctcctgtggctaggctagaatcaatccgtatcttgctagcatatgccgctcaccattctttcaggttgtaccaaatggatgtgaagagcgccttcctcaacgggccaatcaaggaggaggtgtacgtggagcaaccccctggctttgaggatgaacggtaccccgaccatgtgtgtaagctctctaaggcactctatggacttaagcaagccccaagagcatggtatgaatgccttagagacttcttaattgctaatgctttcaaggttgggaaggccgatccaactcttttcactaagacttgtgacggtgatctttttgtgtgccaaatttatgtcgatgacataatatttggttctactaataaaaagtcttgtgaagagtttagcagggtgatgacgcagaaattcgagatgtcaatgatgggcgagttgaactacttccttgggttccaagtgaagcaactcaaggatggcaccttcatctctcaaacgaagtacacgcaagacttgctaaagtggtttggaatgaaggacaccaagcccgcaaagactccgatgggaaccgacggacacaccgacctcaacaaaggaggtaagtccgttgatcaaaaagcataccggtcaatgataggatcgttactttacttatgtgctagtagaccggatattatgcttagcgtatgcatgtgtgctagatttcaatccgatcctaaggagtgtcactcagtggcagtgaagcgaatccttagatatttagttgctacgccttgcttcgggctctggtatccaaaggggtctacctttgacttgattggatattcagactccgactatgctggatgtaaggtcgataggaagagtacatcggggacgtgccaattcttaggaaggtccctggtgtcatggaactctaagaaacaaacttctgttgccctatccaccgctgaggccgagtatgttgtcgcaggacagtgttgcgcgcaactactttggatgaggcaaaccctcagggactttggctacaatctgagcaaagtcccactcctatgtgataatgagagtgctatccgcatggcggaaaatcctgttgagcacagccgcacaaagcacatagacatccggcatcactttctgagagaccaccagcaaaagggagatatcgaagtgtttcatgttagcaccgagaaccagctagccgatatctttaccaagcctctagacgagaagaccttttgcaggctgcgtagtgagctaaatgtcttagattcgcggaacttggattga

SEQ ID NO: 4678 - DNA, 1873 bp, Zea mays
  Clone ID: TF_ZM4884.C14.o1.fg
atggatcctaaggggaagggaatcgtgatcaacgacaaggaaaaggagtccttcgtcaacgagccaaaagatgacaaatccaatgactctggctcgggccacaagcacaaagatgggaagaagaagaagacaaggcgcatcaaggagatcgtctactacgacagcgacgaatcctcttcttctcaaaaggacgacgacaacgactacaggaagacggtcaattcgaacttttcatttgattattctcgtattccacatagttcgaattcgcatttgctttccattcctctcggcaaacctccacactttgatggggaggactacggattttggagtcacaaaatgcgtagtcatttattctctctccatccaagcatatgggagatcgtagagaatggaatgaaatttgatagctcggatagccctatgtttattaatgaacaaattcataaaaatgcacaagctactactgtgttgctagcctctttgtgcagggacgagtacaataaggtgagctgcttggacaatgccaagcagatatgggacaccctcaagatttctcacgaggggaacgacatcaccatgctcaccaaaatggagttggtggagggcgagcttggaaggtttgcaatgataaggggcgaggagccaacccaaacatacaaccggctcaagacccttatcaacaaaataaggagctacggaagcacgcgatggacggatcacgacggcgtccgcctaatgctaaggtcattcaccgttcttgatccttatctcgtgaacaatattcgtgagaatcccaggtacacgaagatgacgcccgaggaggtactcggaaaattcgtaagcgggcggatgatgatcaaggaggcaagatacgtggacgacgccttaaatggaccgatcaacgagcatcaaccccttgctctcaaggcaacaagaagcaaggaggcgctacctagcaaggtggcacaaattgaggcggccggacttaatgatgaagagatggctctcatcatcaaacgcttcaagacggtgctaaaaggtcacaaggggcagccaagcaagaccaagacaaaggggaagcgctcatgcttcaagtgcggtaagattggtcattttatcgctaactgccccgataacgatagtgaccaggaacaggggaacaagagggaaaagaagaagaattacaagaaggccaagggcgaggcacacatcggaaaggagtgggattcggattgctcctccgactccgacaatgaaggactcgccgccaccgccttcaacaagtcatccctcttccccaacgagcgtcacacatgccttatggcaagggagaagaaggtgagtactcgagactccacttatgcttcttctagtgataatgagtctagtgatgatgatgacatagactattcatgcttattcaagggcttagatagatctaagatagacaaaataaatgaattgattgatgccttgaatgataagaatgtgcttttagaaaggcaagaggatttgttgtatgaagaacatgacaagtttgtagaagcacaaaaatcacttgcattagagattaagagaaatgaaatgctttcttgtgaattgtctacatgtcatgattcaattgctagtttaaagagcataaatgatgatttaaatactaaactagaaaaatctagtaaatcaacatcttgtgtagaacatgttgagatttgcactaggtgtaaagatttcgatgttgatgcctgtagcgatcatttagtttcaatttccaaactaactgaggaattggctagtcttaatgcccaacttaagactagcaagaatgaatttgataaactaaaatttgcaagggatgcctacacgatcg

SEQ ID NO: 4679 - DNA, 4929 bp, Zea mays
  Clone ID: TF_ZM4892.C2.o7.fg
atggatcctaaggggaagggaattgtgatcaacgacaaggagaaggagtccttcgtcaatgagccaagggatgacaagtccaacaactcgggctcgggccacaagcgaaaagatgggaagaagaagaagacaagacgcatcaaggagatcgtctactacgacagcgatgagtcctcttcttcccaaaaggacgacgacaacgactacaggaagacggtcaattcgaacttctcatttgattattcgcgtattccacatagttcgaattcgcatttgctttccattcctcttggcaaacctccacactttgatggggaggactacggattttggagtcacaaaatgcgtagtcacttattctctctccatccaagcatatgggagatagtagagaatggaatgaaatttgatagctcggatagccctatgcttataaatgaacaaattcatagaaatgcacaagctactactgttctcttagcatctttgtgcagggaagagtacaataaggtgagcggcttggacaatgccaagcagatatgggacaccctcaagatctctcacgaggggaacgacatcaccatgctcaccaagatggagttggtggagggcgagcttggacgattcgccatgataaggggagaagagccaactcaaacttacaaccggctcaagacccttatcaacaaaataaggagctacggaagcacgcgttggacggatcacgacgtcgtccgcctaatgctcaggtcctttaccgttcttgatcctcatctcgtgaacaatattcgtgagaatcccaggtacacgatgatgacgcccgaggaagtacttggaaaattcgtgagcgggcggatgatgatcaaggaggcaagatacgtcgacgacgcgttgaacggtccactccacgagcctcaacccattgctctaaaggcaacaaggaacaaggagtcgctacctagcaaggtggcgcaagttgaggcggccgggctcaatgatgaagagatggctctcatcatcaagagattcaagacggtgctgaagggtcacaaggggcagccaagcaagaacaagacaaaggggaaacgctcatgcttcaagtgcggtaagattggtcattttatcgctaactgccccgataacgatagtgaccaggaacagggaaacaagagggaaaagaagaagaattacaagaaggccaagggcgaggcgcatctaggcaaggagtgggattcggattgctcctcctccgactccgacaatgagggactcgccgccactgccttcaacaaatcggccctcttccccaacgagcatcacacttgcctcatggcaagggaaaagaagactagcaaaagtgattttgaaaaactaaaatttgctagggatgcctacacggttggtagacacccctcaattaaggatgggcttggcttcaagagggaagccaagaacttaacaagccataaggctcccattcccgccaaggagaaagggaaggcccctatggctagtagtgcaaaaaggaaccatgcctttatgtatcatgataggagacatgctagaaatgcttgtaatgattttgattcatatgtttatgattctcatgccatgtttgctcctagttcttcatatgtgtatgatagaaatgttactaggagaaatgttgttcctaaaaagaatgttattcatgctcctaggaaagtagcaaatgaaccttctaccatttattatacttgcaatgctccctttgctatttgtagaaaggacaagaaggtttatgcatccgggggttcaagctggattatcgacagcggatgcacaaaccatatgacgggggagaagaagatgttcacctcctacgtcaagaataaagattcccaagattcaattatattcggtgatgggaatcaaggcaaggtaaaaggtttagtagagtctcttggatataacttgctatctgttagtcaattatgcaatatggggtataactgtctattcacaaatatagatgtgtctgtctttagaaggtgtgatggttcactagcatttaagggtgtattagacggcaaactttacttagttgattttgcaaaagaggaggccggtctagatgcatgcttaattgctaagactagcatgggctggctgtggcatcgccgcttagcacatgtggggatgaagaaccttcacaagcttctaaagggagaacatgtaataggtctaactaatgttcaattcgaaaaagatagaccttgtgcagcttgtcaagcagggaaacaagtgggaggctctcatcacaccaaaaatgtgatgacgacatcaagacccttggagatgctgcatatggacctcttcggacccgtcgcctatctgagcataggaggaagtaagtatggtctagttattgtagatgatttttcccgcttcacttgggtgttctttttgcaggaaaaatccgaaacccaagggaccctcaaacgcttcctcaggagagctcaaaatgagtttgagctcaaagtgaagaagataaggagcgacaacgggtccgagttcaagaaccttcaagtggaggagttccttgaagaggaagggatcaagcacgagttctccgctccctacacaccacagcaaaatggtgtggtagagaggaagaacaggacgctcatcgacatggcgaggacgatgctaggagagttcaagacccctgagtgcttttggacggaagccgtgaacacggcttgccacgccatcaacagggtctaccttcatcgcatcctcaagaatacgtcgtatgagctactaaccggtaacaaacccaatgtatcgtactttcgtgtatttgggagtaagtgctacattctagtaaagaagggtagaaattctaagtttgctcccaaagctgtagaagggtttttattaggttatgactcaaatacaaaggcgtatagagtcttcaacaaatcatcgggtttggttgaagtctctggcgacgttgtatttgatgagactaatggctctccaagagagcaagtggttgattgtgatgatgtagatgaagaagacattccaacggccgcaatacgcaccatggcaattggagaagtgcggccacaggaacaagatgaacgagaacaaccttctccctcaactatggtgcatcccccaactcaagacgatgaacaggttcatcaacaggaggtgtgtgatcaagggggagcacaagatgatcatgtgttggaggaagaagcgcaaccggcacctccaacccaagttcgtgcgatgattcaaagagatcatcccgtcgaccaaattttgggtgacatcagcaagggagtaactactcgatctcgattagttaatttttgtgagcattactcctttgtctcttctattgagcctttcagggtagaagaggccttgctagatccggactgggtgttggccatgcaagaggagctcaacaacttcaagaggaatgaagtttggacactggtgcctcgtcccaagcagaatgttgtgggaaccaagtgggtgttccgcaacaaacaggacgagcgcggggtggtaacgagaaacaaggctcgacttgtggcaaaaggttatgcccaagtcgcaggtttggatttcgaggagacttttgctcctgtggctaggctagaatcaattcgtatcttgctagcatatgccgctcaccattctttcaggttgtaccaaatggatgtgaagagcgctttcctcaacgggcctataaaggaggaggtgtacgtagagcaaccccctggcttcgaggatgaacggtaccccgaccacgtgtgtaagctctctaaggcgctctatggacttaagcaagccccaagagcatggtatgaatgccttagagatttcttaattgctaatgcgttcaaggttgggaaagccgatccaactcttttcactaagacatgtgatggtgatttgtttgtgtgccaaatttatgtcgatgacataatatttggttctactaatcaaaagtcttgtgaagagtttagcagggtgatgacgcagaaattcgagatgtcgatgatgggcgagttgaactacttccttgggttccaagtgaagcaactcaaggacggcactttcatctcccaaacgaagtatacgcaagatctgctaaagcggtttgggatgaaggacgccaagcccgcaaagactccgatgggaaccgacggacacaccgacctcaacaaaggaggtaagtccgttgatcaaaaagcataccggtcaatgatagggtctttactttatttatgtgctagtagaccggatattatgcttagcgtatgcatgtgtgctagatttcaatccgatcctaaggagtgtcacttagtggcggtgaagcggattcttagatatttggttgctacgccttgcttcgggctctggtatccaaaggggtctacctttgacttggttggatactcagactccgactatgctggatgtaaggtcgataggaagagtacatcggggacgtgccaattcttaggaaggtccctggtgtcgtggaactctaagaaacaaacttctgttgccctatccaccgctgaggccgagtatgttgccgcaggacagtgttgcgcgcaactactttggatgaggcaaaccctcagggactttggctacaatctgagcaaagtcccactcctatgtgataatgagagtgctatccgtatggcggaaaatcctgttgagcacagccgcacaaagcacatagacatccggcatcactttttgagagaccaccagcaaaagggagatatcgaagtgtttcatgttagcaccgagaaccagctagccgatatctttaccaagcctctagatgagaagaccttttgcaggctgcgtagtgagctaaatgtcttagattcgcggaacttggattga

SEQ ID NO: 4680 - DNA, 1999 bp, Zea mays
  Clone ID: TF_ZM4893.C6.o7.fg
atggatcctaaagggaagggaatcgtgatcaacgacaaggagaaggagtccttcgtcaacgagccaagggatgacaagtccaacgactcgggctcgggccacagacgcaaagatgggaagaagaagaagacaagacgcatcaaggagatcgtctactacgacagcgatgagtctacttcctcccaaaaggacgacgaccacaacgaatacgagagaaagaaaccggtcaattcgaacttttcttttgattactctcgtattcctcaaagtactaatgctcatttattatctattccacttggtaaacctcctcattttgatggagaggactacggattttggagtcacaaaatgtgtagtcacttgttctctctccatcctagcatatgggagattgtagaaagtggaatgcactttgatagtacggatagtcccatgtttattaatgaacagattcataaaaatgcacaagctactactgtgttgctagcctctttgtgcagggacgagtaccataaggtgagcggcttggacaatgccaagcagatctgggacaccctcaagatctctcatgaggggaatgatgtcaccttgctcaccaagatggagttggtggagggcgagcttggacggttcgcaatgataaggggcgaggagccaactcaaacatacaaccggctcaagacccttatcaacaaaataaggagctacggaagcacgcgatggacggatcacgacgtcgtccgcctaatgctaaggtcctttaccgttcttgatcctcatttggtgaacaatattcgtgaaaatcctaggtacaccaagatgacgcccgaagaagttctggggaagttcgtaagcgggcgaatgatgatcaaggaggcaagatatgtggacgacgcgttgaacggtcctattcatgagcctcaacccattgctctcaaggcaacgaggagcaaggaggcgctgccgagcaaggtggtgcaagttgaggcggccgggctaaataatgaggagatggctctcatcattaagcgcttcaagatggcgcttaagggtcacaaggggcagccaagcaagaccaagacaaaggggaagcgctcatgcttcaagtgcggtaagattggtcattttatcgctaactgccccgataacgatagtgaccaggaacagggaaacaagagggaaaagaagaagaattacaagaaggccaagggcgaggcacatatcggaaaggagtgggattcagattgctcctcctccgactccgacaatgaaggactcgccgccaccgccttcaacaagtcatccctcttccccaacgagcgtcacacttgcctcatggcaagggagaagaaagtaagcactcatgatactagtacttatgcttcttcaagtgaggatgaatctagtgctgaggatgaagtagattattcatgtttgtttaagggcctagatagaaccaaggtagacaaaattaatgaattgattgatgccttgaatgataagaatatgcttttagaaaagcaagaggatttgttgtatgaagaacatgataaatttgtagaagcacaaaaatctcatgctctagaagttaaaagaaatgaaatgctttcttgtgaattatcttcttgccatgagacaatttctaaattaaggagcattaatgatgatttgaatgctaagctagagattgctagtaaatctacctcttgtgtagaaaatgttgtaacgtgtactaggtgtaaagatattaacattgatgcttatagtgaacacctagcttgcatttctaaattaaatgaagaggtagctagtcttagtgcccaacttgagactagcaaaagtgattttgagaaattaaaattcgctagggatgcctacacggttggtagacacccctcaattaaggatgggcttggcttcaagagggaagtcaagaacttaacaagccataaggctcccatctccgccaaagagaaagggaaggcccctatggcta

SEQ ID NO: 4681 - DNA, 4968 bp, Zea mays
  Clone ID: TF_ZM4904.C1.o5.fg
atggatcctaagggaaaggggatagtgatcaatgacaaggaggagtccttcatcaatgagccgaaagacgacaagcccactgactcaggctcaagtcataagaagaaggatgggaagaagaagaggcgcatcaagaagatcgtctactacgacgacagcgacaagtcctcttcttcccaaaaggacaacgacgacaacgactacgagaaaaagaagacggttaactcgaacttttcttttgattactcttgtattccgcatagttcaaatgcacatttgctttccattcctcttggcaaacctccacactttgatggagaggactacagattttggagtcacaaaatgcgtagtcacttgttctctctccatccaagtatatgggagatagtagaaaatggaatgcaatttgatagcacggatagtcccctattcatcaatgagcagattcataaaaatgcacaagctactactgtgttgttagcctcattgtgcaaggatgaataccataaggtgagtggcttggataacgccaagcagatttgggacaccctcaggatctctcatgagggaaatgacgtcaccatgctcaccaagatggagttggtggagggcaaacttgggagattcgcaatgatcaggggggaggagccaacccaaacatacaacaggctcaagaccctcgtcaacaaaataaggagctatggaagcacgcgatggacggaccacgacgtcgtccgcctaatgctaaggtctttcactgtccttgatccacatcttgtaaacaatattcgtgaaaatcctaggtacaccaagatgtcgcccgaagaaatacttggaaagttcgtaagcgggcggatgatgatcaaggaggcaaggtacgtcgatgaggcgttgaatggtccaattcatgagcctcaagccattgctctcaaggcaacaaatagcaaggaggcgctacctagcaaggtggcacaagttgaggcggcggggctcaatgaggaagaaatggccctcatcatcaagcgcttaaagacgacgctaaagggtcgcaaggagcatcccaaaaagaccaagacgaagggaaagcgctcctgcttcaagtgtggtaagattggtcactttattgctaactgtcccgataatgatagtgaccaggaacaaggaaagaatgggaaaagagagaacaagaaggtttacaagaaggctaaaggcgaggcacaccttggaaaggagtgggattcggattgctcttcgtccgactccgacgacgaaggactcgccgccaccgccttcaacaaatcgtctctcttccccaacgagcatcacacctgcctcatggcaaaggagaagaaggtaagcactcgaaatgctattacttatgcctcttctagtgatgatgaatctagtgatgatgaaatagactatgctagtttgttcaagggcttagatagaactaaaatcgataagatcaatgaattgattgatgctttgaatgataagaatagattgttagaaaagcaagaggatcttttgtatgaagaacatgataaatttgtagaggcacaaaaatctcttgctttagaagttaaaaggaatgaaatgctttcttgtgaactatctacttgccatgagaccatttctagtttaaaaagtgttaatgatgatttaaatgctaaactagaagtagcaaatagatctaactcttgtgtagaacatgttgtgatttgcaatagggatgcctatacgatcggtagacacccctcaattaaggatggacttggctttaagagggaagccaagaacttaacaagtcataaggctcccatctccgccaaggagaaagggaaggctcctatgactaatagtagtcaaaagaatcatgctttcatttatggtgataagagatattctagaaatgctcatagaagttgtaatgcttatgattcaaatgtcatgtttgcttcaagttcttccattatgcatgatagaaattttgctaggaaaaatgttgttcatcatatgcctagaagaaatgttgttcatgtacctaggaaagtttatgcatcagggggatcaagctggattatcgaaagcggatgcacaaaccacatgacgggggagaagaagatgttcacctcctacgtcaagaacaaagattcccaagactcaatcatattcggtgacgagaatcaaggcaaggttaaaggactaggaaaaatagcaatttcttccgagcattctatctctaatgtgtttctagttgaatcgcttggatataatttgttgtccattagtcaattatgtaatatgggatataattgcttattcaccaatgtagatgtgtctgtctttagaaggagtgatggttcattagcttttaagggtgcattagacgacaaactctacctagttgattttgcaaaagaggaggccggtctagatgcatgcttaattgctaagactagcatgggctggctgtggcatcgtcgtttagcacatgtggggatgaagaaccttcacaaacttctaaagggtgaacatgttataggtctaacaaatgtaaccttcgaaaaagatagaccttgtgcagcttgtcaagcaggtaaacaggtgggaagctctcatcataccaaaaatgtgatgaccacatcaagacctttggagttgtttcatatggacctcttcggacccgtcgcctatctaagcataagaggaagtaagtatggtcttgttattgttgatgacttttcccgcttcacttgggtattctttttgcaggataaaacagaaacccaagggaccctcaagcgcttcctaaggagagctcaaaatgagtttgagctcaaggtgaagaagataaggagcgacaacgggtccgagttcaaaaaccttcaagtggaggagtaccttgaggaggaaggaatcaagcacgagttctccgctccctacacaccacagcaaaatggtgtggtagagaggaagaaccggatgctcatagacatggcgaggacaatgcttggagaatttaagacgcctgagcggttttggtcggaagctgtgaacacagcttgccacgccataaaccgggtctatctccatcacctcctcaagaagacatcatacgagcttctaaccggtaacaaacccaacgtttcgtattttcgagtttttgggagtaaatgctacactctggtgaagaaaggtagaaattcaaaatttgctcccaaagctgtagaagggtttttgttaggttatgactcaaatacaaaggcgtatagagtcttcaacaaatcatcgggtttggttgaagtctctagcgacgttgtatttgatgagactaatggctctccaagagagcaagttgagcttgatgatgtagatgaggatgatgttccaatggacgcgattcgtaccatggcaattggagacgtacgaccgcaggaacacaaggaacaagatcaaccttcttcctcaacgacggtgcaccccccaacccaagatgatgaacaggtacctcaagaggaggcgtgtgatcaagggggaacacaagatgtccaagttgaagaggaagaagcaccacaggcccctccaactcaagttcgagcgatgattcgaaggaaccatcccgtcgaccagattttgggtgacattatcaagggagtaaccacttgctctagattagttaatttttgtgagcattactcttttgtctcttctattgagcctttcagggtagaagaggctttgctagatccggactgggtgttggccatgcaggaagagctcaacaacttcaagagaaatgaagtttggacattggtgcctcgtcccaagcaaaacattgtgggaaccaagtgggtgttccgcaacaaacaagacgagcacggggtggtgacaaggaacaaggcacgacttgtggcaaaaggttatgcccaagtcacaggtttggactttgaggagacttttgctcctatggctaggctagagtcgattcgtattttgttagcctatgctgctcaccattctttcaggttgtaccaaatggatgttaagagcgctttcctcaacgggccaatcaaggaggaggtgtacgtggagcaaccccctggctttgaggatgaacggtaccccgaccatgtgtgtaagctctctaaggcgctctatggacttaagcaagccccaagagcatggtatgaatgccttagagactttttaattgctaatgctttcaaggttgggaaagccgatccaactcttttcactaagacatgtgatggtgacttatttgtgtgccaaatttatgtcgatgacataatatttggttctactaaccaaaagtcttgtgaagagtttagcagggtgatgactcaaaagttcgaaatgtcgatgatgggcgagttgaactacttccttgggttccaagtgaagcaactcaaggatggcactttcatctcccaaacgaagtacacacaagacttgatcaagcggtttgggatgaaggacgccaagcccgcaaagactccaatgggaactgacggacacgtcgacctcaacaaaggaggtaagttcgttgatcaaaaagtataccggtccatgatagggtctttactttatttatgtgctagtagaccggatattatgcttagtgtatgcatgtgttctagatttcaatccgatccaagggagtgtcacttagtggctgtgaagcgaattcttagatatttagtcgctacgccttgcttcgggatctggtatccaaaggggtctacctttgacttaattggatattcagactccgactatgctggatgtaaggtcgataggaagagtacatcggggacgtgccaattcttaggaaggtccctggtgtcgtggagttctaagaaacaaactttcgttgccctatccaccgctgaggccgagtatgttgccgcaggacagtgttgcgcgcaatactttggatga

SEQ ID NO: 4682 - DNA, 5322 bp, Zea mays
  Clone ID: TF_ZM4904.C1.o7.fg
atggtgatcaacgacaatgagaagtccatcttcaacgagccgagggacgacaaagccaatgactccggctcaagtcaaaagaagaaggatggaaagaagaagaggcgcatcaagaagatcgtctactacgacagcgacgaatcttcctcttctcaaaaggacgacgaatacgaggagaaaaagaaaacggttaactcgaacttttctttcgattattctcgtattccgcaaaattccaatactcatttgctttccattccacttggtaaacctccacactttgatggagaggactacggattttggagtcacaaaatgtgtagccacttgttctctcttcatccaagtatatgggagatagtagaaaatggaatgcagtttgatagttcggataactctatgtttatcaatgaacaaatccataaaaatgcacaagctactactgttcttttagcatcattgtgcagggatgaatatcataaggtgagtggcttggataacgccaagcagatttgggacaccctcaagatctcgcatgaggggaacgacgtcactatgctcaccaagatggagttggtggaaggcaaactaggaaggttcgcaatgatcaggggggaggagccaacccaaacgtacaacaggctcaagaccctggtcaacaaaaaaaggagctacggaagcacgagatggacggaccacgatgtcgtccggcttatgctaaggtccttcactatccttgatcctcatcttgttaactctattcgtgagaatcctaggtacaccaagatgacacccgaggaaatacttggaaagtttgtaagcgggcgaatgatgatcaaggaggcaagatatattgatgaggtgttgaatggcccaatccacgagcctcaaaccgtttctctcaaagcaacaagtagcagggaggcgctacctagcaaggtggcgcaagtcgaggcggtcgggctaaatgaggatgaaatggccctcatcatcaagcgcttcaagacggcgctcaaaggtcgcaaggagcatcccaacaagagcaagacaaagggaaagcgctcctgcttcaagtgtggtaagattggtcactttattgctaactgtcccgataatgatagtgaccaagaacaaggaaagagtgggaagtgggaaaagaagaaggcctacaaaaatgcgaagggcgaggcacaccttggaatagagtgggactcagattgctcctcgtccgactccgacaacgaaggactcgccgcctcggccttcaacaagtcggctcttttccccaacgagcatcacacctgcctcatggcaaaggaaaagaaggtaagtactagaagtactattatgtatgcttcttcaagtgatgatgagtctagtgatgatgaagtagactatgctagcttattcaaaggcttagataaaactaaaattgataagatcaatgaattaattgatgctttgaatgagaaaaatagattgttagagaagcaagaggatcttttatatgaagagcatgataaatttgttagtgcacaaaattctcttgctttagaagttaaaagaaatgaaatgctttcatgtgaattatctacatgccatgaatctatttcgagcttaaagagtattaataatgatttaaatactaagttagaaatagctaataaatcaatctcttgtgtagaccatgttgtgatttgcaataggtgtaaggattttaatgttgatgcttgtagtgaacacctaatttccatttccaaattaaatgatgaagtggctattcttaatgcccaacttaagactagcaagaatgaatttgacaaactaaaatttgcaagggatgcctacactattggtagacacccctctattaaggatgggcttggctttcgaagggaagctaagaacttaacaagtcataaggctcccattttcaacaaggaaaaagggaaggctcctatgactagtaatagtcaaaagaaccatgctttcatgtaccatgataggaaattttctagaaatgttcatcatgataggagttgtaatgtgtatgactcaaatgccatgattgcttcaagttcttcatttgtgcatggtagagatatgcctaggaagaatgttactcatcatatgcctaggacaaatgttgttaatcatatgcctaggaaagtgtataatagacttaccactgtctttcatgcttgcaatactaagtttgttctttcatgtagaaatgaaaaagtaattgctaaaaatgtgggggccaaatgcaagggagacaagacttgcatttgggtccctaaggctattgtaactaaccttgtaggacccaacaagagttgggtttatgcatccgggggctcaagctggattatcgacagcggatgcacaaaccacatgacgggggagaagaagatgttcacctcctacgtcaagaacaaagattcccaagattcaatcatattcggtgacgggaatcaaggcaaggttaaaggactaggaaagattgctatttcatccgagcactccatatctaatgtgtttttagttgagtcgctcgggtataacttgttgtccgttagtcaattatgcaatatgggatacaattgcttattcacgaatgtagatgtgtctgtctttagaaggagtgatggttcattagcttttaagggtgtactagacgacaaactctatttagttgattttgcaaaggaggaggccggtctagatgcatgcttaattgctaagactagcatgggctggctgtggcatcgccgtctagcacatgtggggatgaagaaccttcacaaacttttaaagggagaacatgtgttaggtctaaaaaatgataaatctgaaacccaagggactctcaagcgcttcctaaggagagctcaaaatgaatttgagctcaaggtgaagaagataaggagcgacaacgggtccgagttcaagaaccttcaagtggaggagtaccttgaggaggaaggaatcaagcacgagttctccgctccctacacaccacaacaaaacggtgtggtagagaggaagaacaggacgctcatagacatggcgaggacaatgcttggagagttcaagacgcccgagcggttttggtcggaagccgtgaacacggcttgccacgccataaaccgggtctaccttcatcgcctcctcaagaagacttcgtatgagcttctaaccggtaacaaacccaacgtttcatactttcgtgtatttgggagtaaatgctacattctagtaaagaaaggtaggaattctaaatttgctcccaaggctgtagaagggtttttgttaggttatgactcaaatacaaaggcgtatagagtcttcaacaaatcatcgggtttggttgaagtctctagcgacgttgtatttgatgagactaatggctctccaagagagcaagttgatcctaatgatgtagatgaatatgatgttccaacggacgtaattcacaccatggcgattggagatgtgcgaccacaggaacaccaagagcaagatcaaccttcttcctcaacaatggttcaccccccaattcaagacgatgaacaggttcatcaagaagaggcgtgtgatcaagggggagcacaagatgatcatgttatagaggaagaagcacctcaagcccctccaacccaagttcgagcgacaattcaaaggaagcatcccgtcgaccaaatattgggtgatataagcaagggagtaactactcgctctagattagttaatttttgtgagcattactcttttgtctcttctattgagcctttcagggtagaagaggccttgctagatccggactgggtgttggccatgcaggaagagctcaacaacttcaagcgaagtgaagtttggacactggtgcctcgtcccaagcaaaacgttgtgggaaccaagtgggtgttccgcaacaaacaagacgagcacggggtggtgacaagaaacaaggcacgacttgtggcaaaaggttatgcccaagtcgcaggtttggactttgaggagatttttgctcctgtagctaggctagagtccattcgcattttgttagcctatgccgctcaccattctttcaggttgttccaaatggatgtgaagagcgctttcctcaacgggccaatcaaggaggaggtgtacgtagagcaaccccctggctttgaggatgaacggtaccccgaccacgtgtgtaagctctctaaggcgctctatggacttaagcaagccccaagagcatggtatgaatgtcttagagactttctaattgtaaatgctttcaaggttgggaaagccgatccaactttattcactaagacttgtgatggtgacttatttgtatgccaaatttatgtcgatgacataatatttggttctactaaccaaaagtcttgtgaagagtttagcagggtgatgactcaaaagtttgagatgtcgatgatgggcgagttgaactacttccttgggttccaagtgaagcaactcaaggacggcaccttcatctcccaaacgaagtacacgcaagacttgatcaagcggtttgggatgaaggacgccaagcccgcaaagactcccatgggaaccgacggacatgttgacctcaacaaaggaggtaagtccgttgataaaaaggcatgccggtctatgataggttccttgctttacttatgtgctagtagaccggatattatgctaagcgtatgcatgtgtgctagatttcaatccaacccaagggagtgtcaccttgtggccattaagcgaatccttcgatatttagttgctacgccttgcttcgagatctggtatccaaaggggtcaacctttgacttaattggatactcagactccgattatgctggatgcaaggttgaaaggaagagtacatcagggacgtgccaattcttaggaaggtccctggtgtcttggagttctaagaaacaaacttctgttgccctatccaccgctgaggccgaatatgttgccgcaggacagtgttgcgcgcaactactttggatgaggcaaaccctcagggactttggctacaatctgagcaaagtcccactcctatgtgataatgagagtgcaatccgcatggcggataatcctgttgaacacagccgcactaagcacatagacatccgacatcactttttgagagaccaccagcaaaagggagatatcgaagtgttttatgtaagcaccgagaaccagctagtcgatatctttaccaagcctctagatgagtcaaccttttgcaggctgcgtagtgagctaaatgtcttagattcgcggaacttggattga

SEQ ID NO: 4683 - DNA, 3996 bp, Zea mays
  Clone ID: TF_ZM4940.C1.o6.fg
atgaatcctcttcttcccaaaaaagacgacggcaacgtctacgagaataagaagacggttaattcaaacttctcttttgattattctcatattcctcaaagtaccaatgctcatttactctccattccacttggtaaacctcctcattttgatggagaggactacagattttggagtcacaaaatgagtagtcacttgttctctctccatcctagtatatgggagatagtagagagtgaaatgaaatttgatagctcagatagtcctttgtttatcaatgaacagattcataaaaatgcacaagctactactgtgttgttagcctcattgtgcagggacgagtatcataaggtgagcggcttggacaatgccaagcagatctgggacaccctcaagatcttacatgaggggaacgacgtcaccatgctcaccaagatggagttggtggaaggcgaactcgggagattcgcgatgataagaggggaggagccaacccagacgtacaacaggctcaaaaccctcgtcaacaagataaggagctatggaagcacgcgatggacggaccacgacgttgtccgcctaatgctaaggtcctttaccgtccttgatccacatcttgtgaacaatattcgtgagaatcctaggtacacgaagatgacgcccgaggagatccttggaaagttcgtaagcgggcggatgatgataaaggaggctagatacgtcgatgatgcattaaatggtccaatccaagagcctcaaaccattgctctcaaggcaacaaggagcaaggaggcactacctagcaaggtggcgcaagttgaggcggccgggcttaatgatgaagagatggccctcatcatcaagcggttcaagatggcgctaaagggtcgcaaggagcaccccaacaagaacaagacgaaggggaagcgctcctgcttcaaatgtggtaagattggtcattttatcgctaactgtcccgataatgatagtgaccaggaaaagaagagtggaaagtgggaaaagatgaagaactacaagaaggcgaagggtgaggcacatcttggaaatgagtgggattcggattgctcctcgtccgactccgacaacgaaggactcgccgccaccgccttcaacaagtcatcgctcttccccaacgagtatcacacttgcctcatggcaagggaaaagaaggtaaacactcgtaatactagtacttatgcttcttcaagtgaggatgagtctagtgatgatgatgaaatagattattcatgtttattcaagggcctagatagaaccaaggttgataaaattaatgaattaattgatgccttgaatgataagaataggttattagaaaagcaagaggatcttttgtatgaagagcatgataaatttgttagtgcacaaaattctcttgctctagaagttaaaaggaatgaaatgctttcttgtgaactatctacttgtcatgaaaccatttctactttaaaagatgttaatgatgatttaaatgctaaactagaagtagcaaataaatccaactcttgtgtagaacatgttatgatatgcaataggtgcaaagatgttgatgttgatgcttgtagtgaacacctaatttgcatttctaaattaaatgatgaagtggctagtcttaatgcccaacttaagactagcaagagtgaatttgagaagctaaaatttgcaagggatgcctacacaattggtagacacccctcaattaaggatggtcttggcatcaagaaggaagtcaagaacttaacaagccataaggctcccatctccgccaaggagaaagggaaggcccctatggctagaagtgctcaaaagaaccatgccttcatgtatcatgataggagacattctagaaatgtttatagaagttatgatgcttttgattctcatgctatggttgcttctagttcttctattgtgcatgatagaaatttagctaggagaaatgctattaatcacatgcctagaagaaatgttgttcatgtgcccaggaaaacaaatagtgaaccttctacaatttaccatgctttaaatgcttcctttgctatttgtagaaaggataggaagataattactagaaaattaggggcaaaatgcaagggagataaaacttgcatttgggtccctaagactatttgtactaaccttgtaggacccaacatgagttggtacctaagacccaagcctaaatttgccttgcaggtttatgcatccgggggctctagctggattatcgacagcggatgcacaaaccacatgacgggggaaaagaggatgttctcttcctacgtcaagaacaaggatccccaagattcaatcatattcggtgatgggaaccaaggcaagattaaaggcttaggcaagattgcaatctcaaatgagcactctatttctaatgtattcttagttgagtcgcttggatataatttgttatccgtaagtcaattatgtaatatgggatataattgtctattcaccaatgtagatgtgtctgtctttagaagaagtgatggttcattagcttttaagggtgtattagacgacaaactctatttagttgattttgcaaaggaggaggccggtctagatgcatgcttaattgctaagactagcatgggctggctgtggcatcgccgcttagcacatgtggggatgaagaaccttcacaagcttctaaagggagaacacgtgattggtctaactaatgttactttcgaaaaagatagaccttgtgcagcttgtcaagcagggaaacaggtgggaagcactcatcatgcaaaaaatgtgatgactacatcaagacccctggagttacttcatatggatctcttcggacccgtcgcctatctaagcataggaggaagtaagtatggtcttgttatagttgatgatttttcccgcttcacttgggtattctttttgcaggataaatctgaaacccaagggaccctcaagcgcttcctaaggagagctcaaaacgagtttgagatcaaggtgaagaagataagaaacgacaatgggtccgagttcaagaatcttcaagtggaggagtatcttgaggaggaaggaatcaagcacaagttctccgctccctacacaccacaacaaaatggtgtggtagagaggaagaacaggacgcttatagacatggcgaggacgatgcttggagagttcaagacccccgagcgcttttggtcggaagccgtgaacacagcttgccacgccatcaaccgggtctaccttcatcgcctcctcaagaagacttcgtatgagctactaaccggtaacaaacccaatgtttcgtattttcgagtttttgggagtaaatgctacattctagtgaagaagggtaggaattccaaatttgctcccaaagccgtagaagggtttttgttaggttatgtctcaaatacaaaggcgtatagggtcttcaacaaatcatcgggtttggttgaagtctctagcgacgttgtatttgatgagactaatggctctccaagagagcaagttgttgatcttgatgatgtagatgaagaagacgttctaatggccgcaatgcgcaccatggtgattggagatgtaaggccaatggaacaaaaggagcaagatcaaccctcttcctcaacaatggtgcatcccccaactcaagaagatgaacaggttcatcaagaggaggcgtgggatcaagggggagcacaagatgatcaagtaatggaggaagaagcacaaccggcacctccaactcaagtccgagcgatgattcaaagggatcatctcgtcgaccaaattttgggtgacattagcaagggagtaactactcgatctcgattagttaatttttgtgagcattactcttttgtctcttctattgagcctttcagggtagaggaggccttgctagatccggactgggtgttggccatgcaagaggagctcaataacttcaagagaaatgaagtttaa

SEQ ID NO: 4684 - DNA, 4752 bp, Zea mays
  Clone ID: TF_ZM4940.C2.o17.fg
atggatcctaagggaaaggggattgtgatcaatgataaggagaaggagtccttcgtcaacaagccaaaagatgacaagcctaccgactcgggctcgggtcacaaacgaagagatgggaagaagaagaagacgaggcgcatcaaggagattgtctactacgacgacagtgacgagtccacttcttctcaaaaggacaacgacgacaacgactacgacaaaagaaagacagttaattcaaacttttctttcgactactctcgtattccgcaaagtacaattactcatttgctctccattccacttggcaaacctcctcactttgatggagaggactacggattctggagtcacaaaatgtgtagtcacttgttctctctccatccaagcatatgggagatagtagagagtggaatgaaatttgatagtaatgatagtcccatgttcattaacgagcaaattcataaaaatgcacaagctactactgttcttctagcttcattgtgcagggacgaataccataaggtgagtggcttggataatgccaagcagatctgggacaccctcaagatctcacatgaggggaacgacgtcaccatgctcaccaagatggaattggtggaaggcgaactcaggagattcgcgatgataagcggggaggagccaacccaaacatacaacaggctcaagaccctcatcaacaagataaggagctatggaagcacacgatggatggaccacgacgtcgtccgcctaatgctaaggtcctttaccgtccttgatccacatcttgtgaacaatattcgtgagaatcctaggtacacgaagatgacgcccgaggagatccttggaaagttcgtaagcgggcggatgatgatcaaggaggcgagatacgtggacgacacgttgaacggtccaatccatgagcctcaacccattgctctcaaggcaacaaggagcaaggaggcgctacctagcaaggtagcacaagttgaggcggccgggcttaatgatgaagaggtggcccttatcatcaagcggttcaagacgacgctaaaggttcgcaaggagcatcccaacaagaacaagacgaaggggaagcgctcctgcttcaaatgtggtaagattggtcattttatagctaattgtcctgataatgatagtgaccaggaaaagaagagtggaaaatgggaaaagaagaagaattacaagaaggcgaagggcgaggcacatcttggaaaggagtgggattcggattgctcctcgtccgactccgacaatgaaggactcgcagccaccgccttcaacaagtcatcactcttccccaacgagcatcacagatgcctcatggcaaaggagaagaaggtatgtactcgaaacaatactacttatgcttcttcaagcgaggatgagtctagtgatgatgatgaaatagattattcatgcttgttcaaaggcttagatagaactaagatcgataagattaatgaattgattgatgctttgaatgacaagaataggttattagaaaagcaagaggatttgttgtatgaagaacatgataaatttgtaggggcacaaaaatctcatgctttagaagttaaacgaaatgaaatgcttgcttgtgaactatctacttgccatgagacaatttctagcttaaggagcataaatgatgatttgaaagctaagtcagaaatagctagtaaatcaacatcttgtgtagaaaatgttgtaacttgcaataggtgtaaagattttgatattgatgcttgtagcaaacacctagcttcaatgtctaaattaaacgatgaagtggctagtcttaatgcacaacttaagactagcaaaagtgaatttgataaacacccctcaattaaggatggacttggcttcaagagggaagccaagaacttaacaagccataaggctcccatctccgcaaaggagaaagggaaggcccctatggctattagtgctaaaaagaaccatgctttcatgtatcatgataggagatattctagaaatgcctatagaagttatgatacttatgactcatatgctatgactgcttctagttcccatgttgtgcatgatagagatatacctaggagaaatgttgttcctaggaaaattaatgaaccttctacaatatatcatgcttgcaatgattcctttgctatttgtagaaaggataagaaagtttatgcatctgggggttcaagctggattatcgacagcggatgcacaaaccacatgacgggggagaagaagatgttcacctcctacgtcaagaacaagggtccccaagattcaatcatattcggtgatgggaaccaaggcaaggtgaaaggcttagtcaagattgcaatctcaaatgaacactctatttctaatgtgtttttagttgattcacttggatataatttgctatctgttagtcaattatgtaatatgggatataattgcctattcacaaatgtagatgtgtctgtctttagaagaagtgatggttcattagcttttaagggtgtattagacggcaaactctatttagttgattttgcaaaagaggaggtcggtctagatgcatgcttaattgctaagactagcatgggctggctgtggcatcgccgcttagcacatgtgggaatgaagaaccttcacaagcttctaaagggagaacacgtgataggtctaacaaatgttactttcgaaaaagatagaccttgtgcagcttgtcaagcagggaaacaggtgggaagctctcatcatgccaagaatgtgatgacaacatcaagacccctggagttacttcatatggacctcttcggacccgtcgcctatctaagcataggaggaagtaagtatggtcttgttatagttgatgatttttcccgcttcacttgggtattctttttgcaggataaatctgaaacccaagggaccctaaagcgcttcctaaggagagctcaaaacgagtttgagctcaaggtgaagaagataaggagcgacaatgggtccgaattcaagaaccttcaagtggaggagtatcttgaggaggaaggaatcaagcatgagttctccgctccctacacaccacaacaaaatggtgtggtagagaggaagaacaggacgcttatagacatggcgaggacgatgcttggagagttcaagacccccgagcgcttttggtcggaagccgtgaacacggcttgccacgccatcaacagggtctacctgcatcgcctcctcaagaagacgtcgtatgagctactaaccggtaacaaacccaatgtttcgtattttcgagtttttgggagtaaatgctacattctagtgaagaagggtagaaattccaaatttgctcccaaagccgtagaagggtttttgttaggttatgactcaaatacaaaggcgtatagagtcttcaacaaatcatcgggtttggttgaagtctctagcgacgttgtatttgatgagactaatggctctccaagagagcaagttgttgattttgatgatgtagatgaagaagaagttccaacggccgcaatacgcaccatggcgattggagatgtgcagccacaggaacaagatgagcgagatcaaccttcttcctcaacaaaggtgcaacccccaactcaagatgatgaacaggaggcgtgtgatcaagggggagcacaagatgatcatgtaatggaggaagaagcgcagccggcaccttcaacccaagttcgagcaatgattcaaagggatcatcccgtcgaccaaattttgggtgatattagcaagggagtaactactcgatctcgattagttaatttttgtgagcattactcctttgtctcttctattgagcctttcagggtagaagaggccttgctagaaccggactgggtgttggtcatgcaggaggagctcaacaacttcaaaagaaatgaagtttggacactggtgcctcgtcccaagcaaaatgttgtgggaaccaagttgttccaaatggatgtaaagagcgctttcctcaacgggccaatcaaggaggaggtgtacgtggagcaacccccgagcttcgaggatgaacggtaccccgaccacgtgtgtaagctctctaaggcgctctatggacttaagcaagccccaagagcatgggtgatgactcaaaagttcgagatctcgatgatgggcgagttaagctacttccttgggttccaagtgaagcaactcaaggatgggaccttcatctcccaaacgaagtacacacaagatttgatcaagaggtttgggatgaaggacgccaagcccgcaaagactccaatgggaaccgacagacacaccgacctcaacaaaggaggtaagtctgttgatcaaaaagcataccaatctatgatagggtctttactttatttatgtgctagtagaccggatattatgcttagtgtatgcatgtgtgctagatttcaatccgatcctaaggagtgtcacttagtggctgtgaagcgaattcttagatatttagtcgctacgccttgtttcgggatctggtatccaaaggggtctacctttgacttgattggatattcagactccgactatgctggatgtaaggtcgataggaagagtacatcggggacatgccaattcttaggaaggtccttggtgtcatggagttctaagaaacaaacttccgttgccctatccaccgcagaggccgagtacgttgccgcaggacagtgttgcgcgcaactactttag

SEQ ID NO: 4685 - DNA, 4803 bp, Zea mays
  Clone ID: TF_ZM4944.C4.o5.fg
atggatcctaaggggaagggaatcgtgatcaacgacaaggaaaaggagtccttcgtcaacgagccaaaagatgacaaatccaacgactccggctcgggccacagacgtaaagatgggaagaagaagaagacaagacgtatcaaggagatcgtctactacgacagcgacgagtctacttcttcccacaaggacgacgacaacgactacaggaagacggtcaattcgaacttttcatttgattattctcgtattccacatagttcgaattcgcatttgctttccattcctcttggcaaacctccacactttgatggggaggactacggattttggagtcacaaaatgcgtagccatttattctctctccatccaagcatatgggagattgtagagagtggaatgaaatttgatagctcggatagccctatgtttattaacgaacaaattcataaaaatgcacaagctactactgtgttgctagcctctttgtgcagggacgagtacaataaggtgagcggcttggacaatgccaagcagatatgggacaccctcaagatttctcacgaggggaacgacatcaccatgctcactaaaatggagttggtggagggcgagcttggaaggtttgcaatgataaggggcgaggagccaacccaaacatacaaccggctcaagacccttatcaacaaaataaggagttatggaagcacgcgatggacggaccatgacgtcgtccgactattgctaaggtcctttaccattcttgatcctcatttggtgaataatattcgtgagaatcccaggtacaccaaaatgtcgcccgaagaagtcctaggaaaattcgtcagcgggcgaatgatgattaaggaagcaaggtacgtggacgacgccttgaatggaccaatcaacgagccgcaacctcttgctctcaaagcaacaagaagcaaggaggcgctacctagcaaggtggcacaaattgaggcagccggacttaatgatgaagagatggctctcatcatcaaacgcttcaagacggtgctaaaaggtcacaaggggcagccaagcaagaccaagacaaaagggaagcgctcatgcttcaagtgcggtaagattggtcattttatcgctaactgccctgataacgatattgaccaggaacaggggaacaagagggaaaagaagaagaattacaagaaggccaagggcgaggcacacatcggaaaggagtgggattcggattgctcctccgactccgacaatgaaggactcgccgccaccgccttcaacaagtcatccctcttccccaacgagcgtcacacatgccttatggcaagggagaagaaggtgagtactcgagactccacttatgcttcttctagtgataatgagtctagtgatgatgatgacatagactattcatacttattcaagggtttagatagatctaagatagacaaaattaatgaattgattgatgccttgaatgatatgaataggcttttagaaaagcaagaggatttgttgtatgatgagcatgataagtttgtagaggcacaaaaatcctatgctttagaagttaaaagaaatgaagtactttctagtgaattatcttcttgtcatgaaaacattgctactttaaagagcgttaatgatgatttaaatgctaagctagaaaaatctagtaaattaacatcttgtgtagaacatgttgtgatttgcactaggagtaaagactttaatgttgatgcttgtagtgaacacctagagtgcatttctaaattaaatgatgaagtagctagtcttaatgcccaacttaagactagcaagagtgatttggataaactaaaatttgcaagggatgcctacacaattggtagacacccctcaattaaggatgggcttggcttcaagagggaagtcaagaacttgacaagccataaggctcccatctccgccaaggagaaagggaaggcccctatggctactagtgttaaaaagaaccatgcctttttgtatcatgataggaaaaattctagaaatgcttttagaagatatgatgcttttgattcacatgcttatgattcttatgctatgactgcttctagttctcatgttgtgcatgatagaaaagttggtaggaggaatgttgttcataatatgcctaggagaaatgttgttaatattcctaggaaagttaatgagccttctacaatatatcatgctttgaatgcttcctttgcaatttataaaaatgatagaaaggtttatgcatccgggggttcaagctggattatcgacagcggatgcacaaaccatatgacgggggagaagaagatgttcacctcctacgtcaagaataaggattcccaagattcaattatattcggtgatgggaatcaaggcaaggataagtctgaaacccaagggaccctcaagcgcttcctcaggagagctcaaaatgagtttgagctcaaggtgaagaagataaggagcgacaacgggtccgagttcaagaaccttcaagtggaggagttccttgaggaggaagggatcaagcatgagttctccgctccctacacaccacagcaaaatggtgtggtagagaggaagaacaggacgctaatcgacatggcgaggactatgcttggagagttcaagacccccgagcgtttttggtcggaagccgtgaacacggcttgccacgccatcaacagggtctaccttcatcgcctcctcaagaagacttcatatgagcttctaaccggtaacaaacccaatgtatcttactttcgtgtatttgggagcaagtgctacattctagtgaagaagggtagaaattctaagtttgctcccaaagctgtagaagggtttttattaggttatgactcaaatacaaaggcgtatagagtcttcaacaaatcatcaggtttggttgaagtctctagcgacgttgtatttgatgagactaatggctctccaagagagcaagttgttgattgtgatgatgtagatgaagaagatgttccaacggtcgctatacgaaccatggcgattggagaagttcatcaacaggaggcgtgtgatcaagggggagcacaagatgatcgtgtgatggaggaagatgcgcaaccagcacctccaacccaagttcgagcgatgattcaaagggatcatcccgtcgaccaaattctgggtgacattagcaagggagtaactactcgatctcgattagttaatttttgtgagcattactcctttgtctcttctattgagcctttcagggtagaggaggccttgctagatccggactgggtgttggccatgcaggaggagctcaacaacttcaagagaaatgaagtttggacgctggtgcctcgtccgaagcaaaatgttgtgggaaccaagtgggtgttccgcaacaaacaggacgaacacggggtggtgacgagaaacatggctcgacttgtggcaaaaggttatgcccaagtcgcaggtttggatttcgaggagacttttgctcctgtggctaggctagagtctattcgtatcctgctagcatatgccgctcaccattctttcaggctgttccaaatggatgtgaagagcgctttcctcaacgggccaatcaaggaggaggtgtacgtggagcaaccccctggcttcgaggatgaacggtaccccaaccacgtgtgtaagctctctaaggcgctctatggacttaagcaagccccaagagcatggtatgaatgccttagagactttctaattgctaatgctttcaaggttgggaaagccgatccaactctttttactaagacatgtgatggtgatttgtttgtgtgccaaatttatgtcgatgacataatatttggttctactaaccaaaagtcttgtgaagagtttagcagggtgatgacgcagaaattcgagatgtcgatgatgggcgagttgaactacttccttgggttccaagtgaagcaactcaaggacggcaccttcatctcccaaacgaagtacacgcaagatctgctaaagcggtttgggatgaaggacgccaagcccccaaagactccgatggggaccgacggacacaccgacctcaacaaaggaggtaagtccgttgatcaaaaagcataccggtcaatgataggttctttgctttacttatgtgctagtagaccggatattatgcttagcgtatgcatgtgtgctagatttcaatccaatcctaaggagtgtcacttagtggcggtaaagcgaattcttagatatttggttgctacgccttgcttcgggctctggtatccaaaggggtctacctttgacttagttggatactcagactccgactatgctggatgtaaggtcgataggaagagtacatcggggacgtgccaattcttaggaaggtccctggtgtcatggaactctaagaaacaaacctccgttgccctatccaccgctgaggccgagtacgttgccgcaggtcagtgttgcgcgcaactactttggatgaggcaaaccctccgggactttggctacaatctgagcaaagtcccactcctatgtgacaatgagagtgctatccgcatggcggagaatcctgttgagcgcagccgcacaaagcacatagacatccggcatcactttttgagagaccaccagcaaaagggagatatcgaagtgtttcatgttagcaccgagaaccagctagccgatatcttcactaagcctctagatgagaagaccttttgcaggttgcatagtgagctaaatgtcttagattcgcggaacctggattga

SEQ ID NO: 4686 - DNA, 4341 bp, Zea mays
  Clone ID: TF_ZM4951.C1.o4.fg
atggatcctaaggggaagggaatcgtgatcaacgacaaggaaaaggagtccttcgtcaacgagccaaaagatgataaatccaacgactctggctcgggccacagacgtaaagatgggaagaagaagaagacaaggcgcatcaaggagatcgtctactacgacagcgacgaatcctcttcttcccaaaaggacgatgacaacgactacaggaagacggtcaattcgaacttttcatttgattattctcgtattccacatagttcgaattcgcatttgctttccattcctctcggcaaacctccacactttgatggggaggactacggattttggagtcacaaaatgcgtagtcatttattctctctccatccaagcatatgggagattgtagagaatggaatgaaatttgatagctcggatagccctatgtttattaacgaacaaattcataaaaatgcacaagctactactgtgttgctagcctctttgtgcagggacgagtacaataaggtgagcggcttggacaatgccaagcagatatgggagaccctcaagatttctcacgaggggaacgacatcaccatgctcactaaaatggaattggtagagggcgagcttggaaggtttgcaatgataaggggcgaggagccatctcaaacatacaaccggctcaagaccctcatcaacaaaataaggagttatggaagcacgcgatggacggaccatgacgtcgtccgactattactaaggtcatttaccgttcttgatcctcatctcgtgaacaatattcgtgagaatcccaggtacacgaagatgacgcccgaggaggtactcggaaaattcgtaagcgggcggatgatgatcaaggaggcaagatacgtggacgacgccttgaatggaccgatcaacgagcatcaaccccttgctctcaaggcaacaagaagcaaggaggtgctacctagcaaggtggcacaaattgaggcggccggacttaatgatgaggagatggctctcatcatcaaacgcttcaagacggtgctaaaaggtcacaaggggcaaccaagcaagaccaagacaaagggaaagcgctcatgcttcaagtgcggtaagattggtcattttatcgctaactgccccgataacgatagtgaccaggaacaggggaacaagagggaaaagaagaagaattacaagaaggccaagggcgaggcacacatcggaaaggagtgggactcggattgctcctccgactccgacaatgaaggactcgccgccaccgccttcaacaagtcatccctcttccccaacgagcatcacacatgccttatggcaagggagaagaaggtgagtactcgagactccacttatgcttcttctagtgataatgagtctagtgatgatgatgacatagactattcatgcttattcaagggtttagatagatctaagatagacaaaattaatgaattgattgatgccttgaatgataagaatgtgcttttaaaaaaacaagaggatttgttgtatgaagaacatgacaaatttgtagaagcacaaaaatcacttgcattagagattaatagaaataaaatgctttcttgtgagttgtctacatgtcatgattcaattgctagtttaaagagcataaatgatgatttaaatgctaaactagaaaaatctggtaaaacaacatcttgtgtagaacatgttgagatttgcactaggtgtaaggatttcgatgttgatgcctgtagtgatcatttagcttcaatttccaaactaactgaggaattggctagtcttaatgcccaacttaagactagcaagaatgatttcgataaactaaaatttgcaagggatgcctacacgattggtagacacccctcaattaaggtttatgcatccgggggttcaagctggattatcgacagcggatgcacaaaccatatgacgggggagaagaaaatgttcacctcctacgtcaagaataaggattcccaagattcaattatattcggtgatgggaatcaaggcaaggataagtctgaaacccaagggaccctcaagcgcttcctcaggagagctcaaaatgagtttgagctcaaggtgaagaagataaggagcgacaacgggtccgagttcaagaaccttcaagtggaggagttccttgaggaggaagggatcaagcacgagttctccgctccctacacaccacagcaaaatggtgtggtagaaaggaagaacaggacgctaatcgacatggcgaggactatgcttggagagttcaagacccccgagcgtttttggtcggaagccgtgaacacgacttgccacgccatcaacagggtctaccttcaccgcctcctcaagaagacgtcgtatgagcttctaaccggtaacaaacccaatgtatcgtactttcgtgtatttgggagcaagtgctacattctagtgaagaagggtagaaattctaagtttgctcccaaagcagtagaagggtttttgttaggttatgactcaaatacaaaggcgtatagagtcttcaacaaatcatcgggtttggttgaagtctctagcgacgttgtatttgatgaaactaatggctctccaagagagaaagttgttgattgtgatgatgtagatgaagaagatgttccgacggccgctatacgaaccatggcgattggagaagtgcggccacaggaacaagatgaacgacatcaaccatcttcctcaactatggtgctacccccaactcaagacgatgaacaggttcatcaacaggaggcgtatgatcaagggggagcacaagatgatcatgtgatggaggaagatgcgcaaccggcacctccaacccaagttcgagcaatgattcaaagggatcatctcgtcgaccaaattctgggtgacattagcaagggagtaactactcgatctagattagttaatttttgtgagcattactcctttgtctcttctattgagcctttcagggtagaggaggccttgctagatccggactgggtgttggccatgcaggaggagctcaacaacttcaaaagaaatgaagtttggacactggtgcctcgtccgaagcaaaatgttgtgggaaccaagtgggtgttccgcaacaaacaggacgagcacggggtggtgacgagaaacaaggctcgacttgtggcaaaaggttatgcccaagtcgcaggtttggatttcgaggagacttttgctcctgtggctaggctagagtcaattcgaatcttgctagcatatgccgctcaccattctttcaggttgttccaaatggatgtgaagagcgctttcctcaacgggccaatcaaggaggaggtgtacgtggagcaaccccctggcttcaaggacgaacggtaccccaaccacgtgtgtaagctctctaaggcgctctatggacttaagcaagccccaagagcatggtatgaatgccttagagatttcttaattgctaatgctttcaaggttgggaaagccgatccaactcttttcactaagacttgtaatggtgatttgtttgtgtgccaaatttatgtcgatgagataatatttggttcaactaaccaaaagtcttgtgaagagtttagcagggtgatgacgcagaaattcgagatgtcgatgatgggcgagttgaactacttccttgggttccaagtgaagcaactcaaggacggcactttcatctcccaaacgaagtacacgcaagacttgctaaagaggtttgggatgaaggatgccaagcccgcaaagacgccgatgggaactgacggatacaccgacctcaataaaggagactccgactatgctggatgtaaggtcgataggaagagtacatcggggacgtgccaattcttaggaaggtccctggtgtcatggaattctaagaaacaaacctccgttgccctatccaccgctgaggccgagtatgttgccgcaggacagtgttgcgcgcaactactttggatgaggcaaaccctccgggactttggctacaatctgagcaaaatcccactcctatgtgataatgagagtgctatccgcatggcggaaaatcccgttgaacacaaccgcacaaagcacatagacatccggcatcactttttgagagaccaccagcaaaagggagatatcgaagtatttcatgttagcaccaagaaccagctagccgatatctttaccaagcctctagatgagaagaccttttgcaggctgcgtagttcattctgcattttgttgcttattgtggtgctcaagttgtacaaacactccctggacctcacaagtccgttgcaaagtgatgcacatgtttag

SEQ ID NO: 4687 - DNA, 3576 bp, Zea mays
  Clone ID: TF_ZM4959.C2.o4.fg
atggatcctaagggcaaggggatggtggtcaacaataaggagaaggagtctttcgtcaatgatccaaaagatgacaagcctaccgactcgggctcaagccacaaaagaaaagacaggaagaagaagaaaacaaggcgcatcaaggagatcgtctactacgacgacagcgacgagtcctcttcttcccaaaaggacgacgacaactacgagaaaaagaaaacggtcaattcaaacttttcttttgattattctcgtattccgcaaaatacaaatgctcatttactctccattccacttggtaaacctcctcactttgatggagaggactacggattttggagtcacaaaatgcgtagtcacttgttctctctccatccaagcatatgggagatagtagagagtggaatgcaatttgatagtagtgatagtcccatgtttatcaatgagaaaattcacaaaaatgcacaagctactactgttcttctagcatcattgtgcagggatgaataccataaggtgagcggcttggataacgccaagcagatttgggacaccctcaagatctcacatgaggggaacgacgtcaccatgctcaccaagatggagttggtggagggcgaacttgggagattcgcaatgatcaggggcgaggagccaacccaaacgtacaaccggctcaagaccctcgtcaacaaaataaggagctatggaagcacgcgatggacggaccacgacgtcgtccgcctaatgctaaggtcgtttactgttcttgatccacatcttgtgaacaatattcatgagaatcctaggtacaccaagatgacgcccgaggagatccttggaaagttcgtaagcgggcggatgatgatcaaggaggcaagatacgttgacgatgcgttgaatggcccaatccaagagcctcaaaccattgctctcaaagcaacgagaagcaaggaggcgatacctagcaaggtggcacaaattgaggcggttgggcttaatgatgaagaaatagccctcatcatcaagcgattcaagacggcactaagtggtcgcaaggagcatccaaacaagaccaagacgaaagggaagcgctcatgcttcaaatgtggtaagattggtcattttatcgctaactgtcccgataatgatagtgaccaggaaaaagggaacaagagggaaaagaagaaggcttacaagaaggctaagggtgaggcacaccttggaaaggagtgggactcggattgttcgtcgtccgactccgacaacgaaggactcgccgccaccgccttcaacaagtcgtccctcttccccaacgagcatcacacctgcctcatggcaagggaaaagaaggtaagcactcataatactagtacttacgcttcatcaagtgatgaagaatctagtgatgatgaaatagactactcatgtttattcaaaggcctagatagaactaaggttgataagattaatgaattaattgatgcattgaatgataagaataggttattagaaaagcaagaggatcttttgtatgaagaacatgataagtatgtagaggcacaaaaatcccttgctttagaaattaaaaggaatgaaatgctttcttgtgagttgtctacatgccatgactctatttctagcctaaagagcataaatgatgatttgaatgctaagttagaaatagctaataaatcaacatcttgtgtagaacacgttgcaatttgcaataggtgtaaagattttaaagttgatgcttgtagtgaacacctagtttcaatttctaaattgaatgatgaagtggctagtcttaatgcccaacttaagactagcaaaaatgattttgataaactaaaatttgcaagggatgcctacacggtcggtagacacccctcaattaagaatgggcttggcttcaagagggaagccaagaacttgacaagtcataaggctcccatctccatcaaggagaaagggaaggcccctatggcaaatagtgtgcaaaagaaccatgctttcttataccatgataggagatattctaggaatgttcatcatgatagaagttgcaatgatattgtttcacatgcttatgattcaaatgcaatgtttgcttcaagttcttctatgatgtatgatagaagtttggctaggaaaaatgtcattcatcatgtgcctaggagaaatactcatatgcctaggaaaacaagtaatgaaccttctacaatttatcatgctttaaatgcttcctttgctatttgtagaaaggataagaagatagttgctagaaaattaggggcaaaatgcaagggagataaaactttcatttgggtccctaaggccatttgtactaaccttgtaggacccaacaaaagttgggtttatgcatccgggggctcaagctggattatcgacagcggatgcacaaaccacatgacaggggagaagaggatgttctcatcctacgtcaagaacaaggatccccaagattcaatcatattcggtgatgggaaccaaggcaaggtgaaagggttaggaaaaattgctatttcatccgagcactctatttctaatgtgttcttagttgagtcgcttggatataacttgttatctgataaatctgaaacccaagggaccctcaagcgcttcctaaggagagcccaaaacgagtttgagctcaaagtgaagaagataaggagcgacaatgggtccgagttcaagaaccttcaagtggaggagtaccttgaggaggaagggatcaagcacgagttctccgctccctacacaccacagcaaaatggtgtggtagagaggaagaacaggatgctcatagacatggcgaggacgatgcttggagagttcaagacccccgagcggttttggtcggaagccgtgaacacggcttgccacgccatcaaccgggtctatcttcaccgcctcctcaagaagacttcgtatgagcttctaaccggtaacaaacccaatgtttcgtatttccgagtttttgggagtaaatgctacattctagtgaagaagggtaggaattccaaatttgctcccaaagcggtagaagggtttttattaggttatgactcaaatacaaaggcgtatagagtcttcaacaaatcatcgggtttggttgaagtctctagcgacgttgtatttgatgagactaatggctctccaagagagcaagttgttgatcttgatgatgtagatgaagaagacgttccaactgccgcaatacgcaccatggtgattggagacgtgcgaccgcaggaactcaaggagcaagatcaaccttcttcctcaacaatggtgcatcccccaactcaagacgatgaacaggttcatcaagaagaggcgtgtgatcaagggggagcacaagatgatcatgtaatggaggaagaagctcaaccggcacctacaactcaagttcgagcaacgattcaaaggaatcatcccgtcgaccaaattttgggtgacattagcaagggagtaactactcgctctagattagttaatttttgtgagcattactcctttgtctctttgagagcacctagaggggggtga

SEQ ID NO: 4688 - DNA, 831 bp, Zea mays
  Clone ID: TF_ZM4959.C3.o1.fg
atggcccttatcatcaagcggttcaaaacggcgctaaagggtcgcaaggagcaccccaacaagaacaagacgaaggggaagcgctcctgcttcaaatgtggtaagattggtcattttatcgctaattgtcccgataatgatagtgaccaggaaaagaagagtggaaagtgggaaaagaagaagaactacaagaaggcgaagggcgaggcacatcttggaaaggagtgggattcggattgctcctcgtccgactccgacaacgaaggactcgccgccaccgccttcaacaagtcatccctcttccccaacgagcatcacacatgccttatggcaaaggagaagaagggattagataaaactaagattgataagattaatgaattgattgatgctttgaatgataagaatagattactagaaaaacaagatgaccttttatatgaagagcatgataaatttgttagtgcacaaaattctcttgctctagaagttaaaaggaatgaaatgctttcttgtgaactatctacttgtcatgaaaccatttctactttaaaaggtgttaatgatgatttaaatgctaaactagaagtagcaaataaatctaactcttgtgtagaacatgttatgatctgcaataggtgcaaagattttaatgttgatgcttgtagtgaacatctagtttgcatttctaaattaaatgatgaagtggctagtcttaatgcccaacttaagactagcaaaagtgaatttgacaagctaaaatttgcaagggatgcctacacgattggtagacacccctcaattaaggatggtcttggcttcaagagggaa

SEQ ID NO: 4689 - DNA, 2181 bp, Zea mays
  Clone ID: TF_ZM4983.C4.o2.fg
atggatcctaaggggaagggaatcgtgatcaacgacaaggagaaggagtccttcgtcaacgagccaagggatgacaagtccaacgactcgggctcgggccacagacgcaaagatggaaagaagaagaagacaagacgcatcaaggagatcgtctactacgacagcgatgagtctacttcctcccaaaaggacgacgaccacaacgactacgagagaaagaaaccggtcaattcaaacttttcttttgattactctcgtattcctcaaacctctttgtgcagggacgagtaccataaggtgagcggcttggacaatgccaagcagatctgggacaccctcaagatctctcatgaggggaatgatgtcaccctgctcaccaagatggagttggtggagggcgagcttggacgattcgcaatgataaggggcgaggagccaacacaaacatacaaccggctcaagacccttatcaacaaaataaggagctacggaagcacgcgatggatggaccacgacgtcgtccgcctaatgctaaggtcctttaccgttcttgatcctcatttggtgaacaacattcgtgaaaatcctaggtacaccaagatgtcgcccgaagaagttcttgggaagttcgtaagcgggcgaatgatgatcaaggaggcgagatacgtggacgacgcgttgaacggtcctattcatgagcctcaacccattgctctcaaggcaacgaggagcaaggaggcgctaccaagcaaggtggcgcaagttgaggcggccaggctaaataatgaggagatggccctcatcattaagcgcttcaagatggcgcttaaaggtcgcaagggacagccaagcaagaccaagacaaaggagaaacgctcgtgcttcaaatgtggtaagattggtcatttcattgctaactgtcccgataatgaaagtgaccaggaaaaggggaacaaaagggagaagaagaagcattacaagaaggccaagggcgaggcacatatcggaaaggagtgggattcggattgctcctcctccgactccgacaatgaaggactcgccgccaccgccttcaacaagtcatctctcttccccaacgagcatcacacttgcctcatggcaagggaaaagaaagtttatgcatccgggggttcaagctggattattgacagcggatgcacaaaccatatgacgagggagaagaagatgttcacctcctacgtcaagaataaggattcccaagattcaattatattcggtgatgggaatcaaggcaaggataagtctgaaacccaagggaccctcaagcgcttcctcaggagagctcaaaatgagtttgagctcaaggtgaagaagataaggagcgacaatgggtccgagttcaagaaccttcaagtggaggagttccttgaggaggaagggatcaagcacgagttctccgctccctacacaccacagcaaaatggtgtgatgaagaagatgttccgacggccgctatacgaaccatggcgactggagaagtgcgaccacaggaacaagatgaacgagatcaaccttcttcctcaacaacggtgcatcccccacctcaagatgatgaacagggtagaggaggccttgctagatccggattgggtattggccatgcaggaggaactcaacaacttcaagcgcaatgaagtgtggacactggtgcctcgtcccaagcaaaatgttgtgggaaccaagtgggtgttccgcaacaaacaggatgagcacggggtggtgacgaggaacaaggctcgacttgtggcaaaaggttatgcccaagtcgcaggattgtaccaaatggatgtgaagagcgctttcctcaacgggccaatcaaggaggaggtgtacgtggagcaaccccctggcttcgaggatgaacggtaccccgaccactcttgtgaagagtttagcagggtgatgacgcagaaattcgagatgtcaatgatgggcgagttgaactacttccttgggttccaagtgaagcaactcaaagatggcaccttcatctcccaaacgaagtacacgcaagatctgctaaagcggtttgggatgaaggacgccaagcccgcaaagactccgatggggaccgacggacacaccgacctcaacaaaggagattttggtgaggcaatggggttaaagggccaagattga

SEQ ID NO: 4690 - DNA, 4269 bp, Zea mays
  Clone ID: TF_ZM4988.C5.o3.fg
atggatcctaagggcaaggggatgatggtcaatgataaggagaaggagtcctttgtcaatgatccaaaggatgacaagcctactgactcaggctcgggccacaaaagaaaagacgggaggaagaagaaaacaaggcgcatcaaggagatagtctactacgacaacgacgagtcttcctcctcccaaaaggacgactacaacgactacgagaaaaagaagacgatttgggacaccctcaaaatctcacatgaggggaacgacgtcaccatgctcaccaagatggagttggtggagggtgaacttgggagattcacaatgatcaggggcgatgagccaacccaaacgtacaactggctcaagaccctcgtcaacaaaataaggagctatggaagcacgcgatggacggaccacgacgtcgtccgcctaatgctaaggtcttttactgtccttgatccacatcttgtgaacaatattcgtgagaatcctatgtacaccaagatgacgcccgaggagatacttggaaagttcgtaagcgggcggatgatgatcaaggaggctagatacgttgatgattcgttgaatggcccaatccaagagcctaaaaccattgctctcaaagcaacgaggagcaaggaggcgctacctagcaaggtggcacaagttgaggcggccgggcttaatgaggaagagatggccctcatcattaagcgtttcaagacgacgctaagggttcgcaaggagcatcccaacaagaccaagacgaaggggaagcgctcatgcttcaaatgtggtaagattggtcattttatcgctaattgtcccgataatgatagtgaccaggaacaagggaacaagagggaaaagaagaaggcttacaagaatactaagggcgaggcacaccttggaaaggagtgggactcggattgttcgtcgtccgactccgacaatgaaggactcgccgccaccgccttcaacaagtcggccctcttccccaacgagcatcacacctgcctcatggcaagggaaaagaagggcctagatagaactaaggtagataagattaatgaattaattgatgccttgaatgataaaaatagcttaaagagcataaatgatgatttgagtgctaagttagaaatagctaataaatcaacatcttgtgtaaaacatgttgtagtttgcactaggtgtaaagattttaatgttgatgcttgtagtgaacacctagtttcaatttctaaattgaatgatgaagtggctagtcttaatgcccaacttaagactagcaagagtgaatttgacaaactaaaatttgcaagggatgcctacacgattggtagacatccctcaattaaggatggtcttggcttcaagagggaagtcaagaacttaacaagtcataaggcttccatctccgccaaggagaaagggaaggcccctatggctagtagtgctcaaaagaaccatgctttcatgtatcatgataggagacattctaggaatgtttgtagaggttatgatgcttttgattctcatgccatgattgtgtctagttcttctattatgcatgatagaaatctggctaggaaaaatgttgttcatcatatgcctagaagaaatagtgttcatgttcctaggaaagtaatgaatgaaccttctacagtttattatgcttgcaatgcttcctttgctatttgtagaaaggataagaaggtttatgcatccaggggctcaagctggattatcgacagcggatgcacaaaccacatgacgggggaaaagaggatgttctcttcctacgtcaagaacaaggttccccaagattcaatcatattcggtgatgggaaccaagggaaggtgaaagggttaggaaaaattgctattttatccgagcactctatttctaatgtgttcttagttgagtcgcttggatataacctgttatctgtgagtcaactttgtaatatgggatataactgtttattcacaaatgtagatgtgtctgtctttagaagaagtgatggttcattagcttttaagggtgtactagacggcaaactttatttagttgattttgcaaaagaggaggctggtctagatgcatgcttaattgctaagactagcatgggctggctgtggcatcgccgtttagcacatgtggggatgaagaaccttcacaagcttctaaagggagaacacgtgataggtctaactaatcttgtcaagcaggataaatctgaaacccaagggaccctcaagcgcttcctaaggagagctcaaaatgagttcgagctcaaggtgaagaagataaggagcgacaacgagtccgagttcaagaaccttcaagtggaggagtatcttgaggaggaaggaatcaagcacgagttctccgctccctacacaccacagcaaaatggtgtggtagagaggaagaacaggacgctactagacatggcgaggacgatgcttggtgaattcaagacgcccgaacagttttggacggaagccatgagcacggcttgccacgccataaactgggtctaccttcatcgcctcctcaagaagacttcatatgagcttctaaccggtaacaaacccaatgtgtcttactttcgtgtatttgggagcaaatgttacattctagtgaagaaaggtaggaattctaagtttgctcccaaagctgtagaaaggtttttgttaggttatgactcaaatacaaaggcgtatagggtcttcaacaaatcatcgggtttggttgaagtctctagcgacgttgtatttgatgagactaatggctctccaagagagcaagttgttgatcttgatgatgtagatgaagaagacgttccaacgaccgcaatgcgcaccatggcgattggagatgtgcggtcacaggaacaaaaggagcaagatcaaccttcttcctcaacaatggtgcatcccccaactcaagacgatgaacaggtccatcaagaggaggcgtgtgatcaagggggagcacaagatgatcttgtaatggaggaagaagcacaaccggcacctccaacccaagttcgagcgacgattcaaagggatcatcccgtcgaccagattttgggtgatattagcaagggagtaactactcgctctagattagttgatttttgtgagcattactcttttatctcttctattgagcctttcaggcaaaatgttgtgggaaccaagtgggtgtttcgcaacaaacaagacgagcacggggtggtgacaaggaacaagacacgacttgtggcaaaaggttatgcccaagtcgcaggtttggactttgaggagacttttgctcatgtggctaggctagagtcaattcgcatattgttagcctatgctactcaccattctttcaggttgttccaaatggatgtgaagagcgctttcctcaacgggccaatcaaggaggaggtgtacgtggagcaaccccctggctttgaggatgaacggtaccccgaccacgtgtgtaagctctctaaggcgctctatggacttaagcaagccccaagagcatgtgaagcaactcaaggatgggaccttcatctcccaaacgaagtacacgtaagacttgatcaagcggtttgggatgaaggacgccaagcccgcaaagactccaatgggaaccgacggacacaccgacctcaacaaaggagatttcaatctgatccaagggattgtcacttagtggccgtgaagcgaattcttagatatttagtcgctacgccttgcttcgggatctggtatccaaaggggtctacctttgacttgattggatattcagactccgactatgctggatgtaaggtcgataggaagagtacatcggggatgtgccaattcttaggaaggtccctggtgtcgtggagctctaagaaacaaacctccgttgccctatccaccgctaaggccgagtatgttgccacaggacagtgttgcgcgcaactactttggatgaggcaaaccctcagggactttggctataatctgagcaaagttctactcctgtgtgataatgagagtgctatctgcatggcggataatcctgttgaacacagccgcacaaagcacattgacatccggcatcactttttgagagaccaccagcaaaagggagatatcgaagtgtttcatgttagcaccgagaaccagctagccgatatctttaccaagcctctagatgagtcgaccttttacaagctgcgtagcgagctaaatgtcttagattcgcgaaacctggattga

SEQ ID NO: 4691 - DNA, 4293 bp, Zea mays
  Clone ID: TF_ZM5000.C1.o15.fg
atggatcctaagggaaaggggatggtggtcaacgataaggagaaggagaccattttcaacgagccgagggacgacaaagctactaactccggctcgagtcaaaagaagaaggaagggaagaagaagaggcgcatcaagaagatcgtctactacgacgacagcgacgagtcctcttcttcccaaaaggacaacgacgacaacgaccacgagaaaaagaagacggttaactctattttttctttcgattattctcgtactcatttactctccattccacttggtaaacctcctcactttgatggagaggactacggattttggagtcacaaaatgcgtagtcacttgttctctctccatccaagcatatgggagatagtagagagtggaatgcaatttgatagtactgatagtcccatatttatcaatgagcaaattcacaaaaatgcacaagctactactgttcttctagcatcattgtgcagggatgaataccataagttggtggaaggcgaactaggaaggttcgcaatgatcaggggagaggagccaacccaaacttacaacaggctcaagaccctcgtcaacaaaataaggagctatggaagcacgcgatggacggaccacgacgtcgtccgcctaatgctaaggtctttcactgtccttgatccacatcttgtaaacaatattcgtgagaatcctatgtacaccaagatgacacccgaggaaatacttgggaagtttgtaagcgggcggatgatgatcaaggaggcaagatacgttgatgatgcgttgaatggcccaatccacgagcctcaaaccgttgctctcaaagcaacgaggagcaaggaagtgctacctagcaaggtggcacaagttgaggcggcagggctcaatgaggaagagatggccctcatcatcaagtgtttcaagacgacactaaggggtcgcaaggagcatcccaacaagaacaagacgaagggtaagcgctcatgcttcaaatgtggtaagattggtcattttatcgctaattgtcccgataatgatagtgaccaggaacaagagaagaagagggaaaataagaaggcctacaagaaggctaagcgtgagacacaccttggcaaggagtgggactcggattgttcgtcatccgactccgacaacgaaggactcgccgcctcggccttcaacaaatcgtccctcttccccaacgagcatcacacctgcctcatggcaaaggagaagaaggtaaacactcgaaagactacttatgcttcttctagtgatgatgaatctagcgatgatgaaatagattatgctagtttgttcaagggcttagaaagaactaagattgataagattaatgaattaatcgatgccttgaatgataagaatagattgttagaaaagcaagaggatcttttgtatgaagaacatgataaatttgtagaggcacaaaaatctcttgttttagaagttaaaaggaatgaaatgctttcttgtgaactatctacttgccatgagaccatttctagtttaaaaagtgttaatgatgatttaaatgctaaactagaagtagcaaatagatctaactcttgtgtagatcatgttgtaatttgcaataggtgtaaagattttaatgttgatgcttgtagtgaacacctagtttctattgcaaagttaaatgatgaagtggctagtcttaatgcccaacttaagactagcaaaaatgaatttgataaattaaaatttgcaagggatgcctacacgattggtagacacccctcaattaaggatgggcttggcttcaagagggaagccaagaacttaacaagtcataaggctcccatctccgccaaggagaaagggaaggctcctatgactaatagtagtcaaaacaatcatgctttcatttatgcaattgcagactatcgaaaaatagtcattaatcatgtgcctaggagaaatgttcttgttcctatgaacacccctcgcaccttctacaatttatacatcgcgttgcaatgcttcctttgcattcgcatgaaggataagaaggtctatgcattcgggggctcaagctggattatcgacagcggatgcacaaaccacatgacgggggagaagaagatgttcacctcctacgtcaagaacaaagatttccaagactcaatcgtattcggtgacgggaatcaaggcaaggttaaaggactaggaaaaatagctatttcttccgagcattctatccctaatgtgtttttagttgaatcgctcggatataatttgttgtccgttagtcaattatgtaatatgggatataactgcttattcacaaatgtagatgtgtctgtctttagaaggagtgatggttcattagcttttaagggtgtattagacggcaaactctatttagttgattttgcaaaagaggagggcggtctagatgcatgcttaattgctaagactagcatgggctggttgtggcatcgctgtttagcacatgtggggatgaagaaccttcacaaacgtctaaagggagaacacgtgataggtctaacaaacgataaatctgaaacccaagggaccctcaagcgcttcctaaggagagctcaaaatgagtttgagctcaaggtgaagaagataaggagcgacaacaggtccgagttcaagaaccttcaagtggaggagtaccttgaggaggaagggatcaagcacgagttctccgctctctacacaccacagcaaaacggtgtggtagagaggaagaacaggacgctcatagacatggcgaggacaatgcttggagaattcaagacacccgagcggttttggtcggaagccgtgaacacggcttgccacgccataaaccgggtgtaccttcatcgcctcctcaagaagacttcgtatgagcttctaaccggtaacaaacccaatgtttcgtactttcgtgtatttgggagcaaatgttatattctagtaaagaaaggtagaaattctaagtttgctcccaaagctgtagaagggtttttgttaggttatgactcaaataaaaggcgtatagggtcttcaacaaatcatcggatgaagaagacgttccaacggccgcaatacgcaccatggcgattggagatgtgcggccacaggaacaaaaggatcaagatcaaccttcttcctcaacaatggtgcatcccccaactcaagacgatgaacaggttgttccaaatggatgtgaagagcgcttttctcaacggaccaatcaaggaggagctgtatgtggagcaaccccctggcttcgaggatgaacggtaccccgaccacgtgtgtaagctctctaaggcgctctatggacttaagcaagccccaagagcatggtatgaatgccatagagactttttaattgctaatgctttcaaggttgggaaagccgatccaactttattcactaagacttgtgatggtgatctttttgtgtgccaaatttatgtcgatgacataatatttggttctactaaccaaaagtcttgtgaagagtttagcagggtgatgactcagaaattcgagatgttgatgatgggcgagttgaactacttccttgggttccaagtgaagcaactcaaggatggcaccttcatctcacaaacgaagtatacacaagacttgctcaagaggtttgggatgaaggacgccaagcccgcaaagactccaatgggaaccgacggacacgtcgacctcaacaaaggaggtaagtccattgatcaaaaggcataccggtctatgatagggtctttactttatttatgtgctagtagaccggatattatgcttagcgtatgcatgtgtgctagatttcaatccgatccaagggagtgccacctagtggctgttaagcgaattcttagatatttagtcgctacgccgtgcttcgggatctggtatccaaaggggtctacctttgacttaattggatattcagactccgattatgctggatgtaaggtcgataggaagagtacatcggggacgtgccaattcttaggaaggtccctggtgtcgtggagttctaagaaacaaacttccgttgtcctatccaccgctgaggtcgagtatgttgccgcaggacagtgttgcgcgcaactactttggatgagacaaaccctcagggactttggctacaatctgagcaaagtcccactcctatgtgataatgagagtgctatctgcatggcggataatcttgttgaacacagccgcactaagcacatagacatccggcatcactttttgagagaccactag

SEQ ID NO: 4692 - DNA, 2844 bp, Zea mays
  Clone ID: TF_ZM5007.C1.o6.fg
atggccctcatcatcaagcggttcaagacgacgctaaagggtcgcaagaggcatcccaacaagaacaagacaaaggggaagcgctcatgcttcaaatgtggtaagattggtcattttatcgctaattgtcccgataatgatagtgaccaggaacaagggaacaagagggaaaagaagaagacttacaagaaggctaatggcgaggcacaccttggcaaggagtgggactcggattgttcgtcgtccgactccgacaatgaaggactcgccgccatcgccttcaacaaatcgttcctcttccccaacgagcatcacacctgcctcatggcaagggaaaagaagggcctagatagaactaaggttgataagattaatgaattaattgatgccttgaatgacaagaataggttattagaaaagcaagaggatcttttgtatgaagaacatgataagtttgtagaggcacaaaaatctcttgctttagaaattaaaaggaatgaaatgctctcttgtgaattgtctacatgccatgactctatttctagcttaaagagcataaatgatgatttgaatgctaagttagaaatagctaataaatcaacatcttgtgtagaacatgttgcaatttgcaataggtgtaaagattttaatgttgatgcttgtagtgaacacctagtttcaatttctaaattgaatgatgaagtggctagtcttaatgcccaacttaagactagcaagagtgaatttgacaaaataaaatttgcaagggatgcctacacgattggtagacacccctcaattaaggatggtcttggcttcaagagggaagccaagaacttaacaagccataaggcttccatctctgccaaggagaaagggaaggcccctatggctagtagtactcaaaagaaccatgctttcatgtatcatgataggagacattctaggaatgcttatagaagttatgacgcttttgattctcatgccatgtttgcttctagttcttctattatgcatgatagaaatttggctaggaaaaatgctatgcctagaagaaatgttgttcatgttcctagaaaagtaaacaatgaaccttctacaatttttcatacttgcaatgcttactttgctatttgtagaaaggataagaaggtttatgcatccgggggatcaagctggattatcaacaacggatgcacaaaccacatgacgggggagaagaagatgttctcttcctatgtcaagaacaaagattcccaagactcaatcatattcggtgacgggaatcaaggcaaggtgaaagggttaggaaagattgctatttcatccgagcactccatttctaatgtacttttagttgagtcgcttagatataatttgttatccgttagtcaattatgcaatatgggatataattgtttattcacaaatgtagatgtgtttgtctttagaagaagtgatggttcattagcttttaagggtgtattagacggcaaactctatttagttgattttgcaaaagaggaggccggtctagatgcatgcttaattgctaagactagcatgggctggctgtggcatcgccgtttagctcatgtggggatgaagaaccttcacaagcttctaaagggagaacacgtgataggtctaactaatgtaactttcgaaaaagatagaccttgcgcagcttgtcaagcaggtaaacaggtgggaagctctcatcataccaaaaatgtgatgaccacatcaagacctttggagttgcttcatatggacctcttcggacccatcgcctatctaagcataggaggaagtaagtatggtcttgttatagttgatgatttttctcgcttcacttgggtattctttttgcaggataaatctgaaacccaagggaccctcaagcgcttcctaagaagagctcaaaatgagtttgagctcaaggtgaagaagataaggagcgacaacaggtccgagttcaagaaccttcaagtggaggagtaccttgaggaggaagggatcaagcacgagttctctgctccctacacaccacagcaaaatggtgtggtagagaggaagaacaggacgctcatagacatggcgaggacgatgcttgtagagttcaagacccccgagtggttttggtcggaagccgtgaacacagcttgccacgccatcaaccgggtctaccttcaccgcctcctcaagaagacttcgtatgagcttctaaccggtaacaaacccaatgtgtcttactttcgtgtatttgggagcaaatgctatattctagtgaagaaaggtagaaattctaagtttgctcccaaagttgtagaaggatttttgttaggttatgactcaaatacaaaggcgtatagagtcttcaacaaatcatcaggtttggttgaagtctctagcgacgttgtatttgatgagactaatggctctccaagcgagcaagttgttgatcttgacgatgtagatgaagaagacgttccaacggccgcaatacgcaccatggtgattggagatgtgcggccacaggaacaaaaggagcaagatcaaccttcttcctcaacaatggtgcatcccccaactcaagacgatgaacaggttcatcaagaagaggcgtgtgatcaagagggagcacaagatgatcatgtgatggaggaagaagcacaaccgacacctccaacccaagttcgagcgacgattcaaaggaatcatcccgtcgaccaaattttgggtgatattagcaagggagtaactactcgctctagattagttaatttttgtgagcattactcctttgtctcttctattgagcctttcagggtagaagagtga

SEQ ID NO: 4693 - DNA, 2035 bp, Zea mays
  Clone ID: TF_ZM5028.C2.o6.fg
atggatcctaggggcaaggggatggtggtaaatgagaaggagaaggagtccttcgtcaatgatccaaaagatgacaagtctactaactcgggctcaagccacaaaagaaaagacgggaagaagaagaaaacaaggcgcatcaaggagatcgtctactacgacgacagcgacgagtcctcttcttcccaaaaggatgacgacaacgactacaagaaaaggaagacggttaattctaacttctcttttgattactctcgtatttctcaaagtaccaatgctcatttactctccataccacttggtaaacctcctcagtttgatggagaggactacggattttggagtcacaaaatgcgtagtcacttgttctctctccatccaagcatatgggagatagtcgagagtggaatgcaatttgatagtactgatagtcctatatttattaatgagcaaattcacaaaaatgcacaagctactactgttcttctagcatcattgtgcagggatgaataccataaggtgagcggcttggataacgccaagcaaatttgggacaccctcaagatctcacataaggggaacaacgttaccatgctcaccaagatggagttggtggagggcgaactcgggagattcgcgatgatcaggggggaggagccaacccaaacgtacaacaggctcaagaccctcgtcaataagataaggagctatggaagcacgcgatggacggaccacgacgtcgtccgcctaatgctaaggtcctttactgtccttgatccacatcttgtaaacaatattcgtgagaatcctaggtacaccaagatgtcgcccgaagaaattcttgggaaatttgtaagcgggtggatgatgatcaaggaggcaagatacgtggatgatgcgttgaatggcccaatccacgagcctcaaactgttgctctcaaagcaacaaggagcaaggaggcgctacctagcaaggtggcgcaagttgaggcggtcgggcttaatgaggaagaaatggccctcattatcaagcggttcaagacggcgctaaagggtcgcaaggagcaccccaacaagaacaagacgaaggggaagcgctcctgcttcaaatgtggtaagattggtcattttatcgctaattgccctgataatgatagtgaccaggaaaagaagagtggaaagtgggaaaagaagaagaactataagaaggcaaagggcgaggcacatcttggaaaggagtgggattcggattgctcctcgtccgactccgacaacgaaggactcgccaccaccgccttcaacaaatcattcctcttcccaaacgagcatcacacatgcctcatggcaaaggagaagaaggtatgtactcgaaacaatactacttatgcttcttcaagtgaggatgagtctagtgatgatgaaatagactattcatgtttattcaagggcctagatagaactaaggttgataagattaatgaattaattgatgtcttgaatgataagaatatgttgttagaaaagcaagaggatcttttgtatgaagagcatgataaatttgtagaggcacaaaattctcttgcattagaaattaaaaggaatgaaatgctttcctgtgaattgtctacatgccatgactctatttctagcttaaagagcataaatgatgatttgaatgctaagttagaaatagccaataaatcaacatcttgtgtagaacatgttgcaacttgcaataggtgtaaagattttaatattgatgcttgtagtgaacacctagtttcaatttctaaattgaatgaggaagtggctagtcttaatgcccaacttaagactagcaaaaatgattttgataaactaaaatttgcaagggatgcctacacggttggtagacacccctcaattaaggatggtcttggcttcaagaggaaagttaagaacttaacaagccataaggcttccatctccatcaaggagaaaggaaaggcccctatggcaaatagtattcaaaagaaccatgctttcttataccatg

SEQ ID NO: 4694 - DNA, 4233 bp, Zea mays
  Clone ID: TF_ZM5032.C3.o5.fg
atggatcctaagggcaaggggatggtggtcaatgataaggagaaggagtccttcgtcaatgatccaaaggatgacaagcctactgactcaggctcgggccacaaaagaaaagacgggaggaagaagaaaacaaggcacatcaaggagatagtctactacgacagcgacgaatcttcctcctcccaaaaggacgacgacaacgactacgagaaaaagaaaacggtcaattcaaacttttattttgattattctcgtattccgcaaagtacaaatgctcatttactctccattccacttggtaaacctcctcactttgatggagaggactacggattttggagtcacaaaatgcgtagtcacttgttctctctccatccaagcatatgggagatagtagagagtggaatgcaatttgatagtactgatagtcctatgtttatcaatgagcaaattcacaaaaatgcacaagctactactgttcttctagcttcattgtgcagggatgaataccataaggggcgaggagccaacccaaaaatacaaccggctaaagaccctcgtcaaaaaataaggagctatggaagcacgcgatggacggaccacgacgtcgtccgcctaatgctaaggtcttttactgtccttgatccacatcttgtaaacaatattcgtgagaatcctaggtacaccaagatgacgcccgaggagatacttggaaagttcgtaagcgggcagatgatgatcaaggaggctagatacgttgatgatgcgttgaatggcccaatccatgagcctcaaaccgtggctctcaaggcaatgaggagcaaggaggcgctacctagcaaggttgcacaagttgaggcgacggggctcaacgaggaagagatggccctcatcatcaagcgtttcaagacggcgctaaggggtcgtaaggagcatcccaacaagacaaaaacgaaggggaagcgctcatgcttcaaatgtggtaagattggtcattttatcgctaattgtcccgataatgatagtgaccaggaacaagggaacaagagggaaaagaagaaggcttacaagaaggctaagggcgaggcacaccttggaaaggagctggactcggattgttcattgtccgactccgacaacgaaggactcgccgccaccgccttcaacaagtcggccctcttccccaatgagcatcacacctgcctcatggcaagggaaaagaaggtaagcactcgtgatactagtacttacgcttcctcaagtgatgaagaatctagcgatgatgaaatagactattcatgtttattcaagggcctagatagaactaaggttgataaaattaatgaattaattgatgccttgaatgataaaaataagttattagaaaagcaagaggatattttgtatgaagaacatgataagtttgtagaggcacaaaaatcccttgctttagaaattaaaaggaatgaaatgctttcttgtgaattgtctacatgtcatgactctatttctagcttaaagagcataaatgatgatttaagtgctaagttagaaataactaataaatcaacaccttgtgtagaacatgttgtagtttgcaataggtgtaaagattttaatgttgatgcttgtagtgaacacctagtttcaatttcaaaattgaatgatgaagtggctagtcttaatgcccaacttaagactagcaagagtgaatttgacaaactaaaattcacaagggatgcctacacgattggtagacacccctcaattaaggatggtcttggcttcaagagggaagtcaagaacttaacaagccataaggcttccatctccgccaaggagaaagggaaggcccctgtggctagtagtgctcaaaagaaccatgctttcatgtatcatgataggagacattctaggaatgtttatagaagttatgatgcttttgattctcatgccatgattgcttctagttcttctattatgcatgatagaaatttggctaggaaaaatgttgttcatcatatgcctagaagaaatattgttcatgctcctaggaaagtaatgaatgaaccttttacaatttattatgcttgcaatacttcctttgctatttgtagaaaggataagaaggtttatgcatctggaggctcaagctggattgtcgacagcggatgcacaaaccacatgacgggggaaaagaagatgttctcttcctacgtcaagaacaaggatccccaagattcaatcatattcggtgatgggaaccaaggcaaggtgaaagggttaggaaaaatttctatttcatccgagcactctatttctaatgtgttcttagttgagtcgcttggatataacttgttgtctatagaccttgtgcagcttgtcaagcaggataaatctgaaacccaagggaccctcaagcgcttcctaaggagagctcaaaatgagtttgagctcaaggtgaagaagataaggagcaacaacaggtccgaattcaagaatcttcaagtggaggagtatcttgaggaggaaggaatcaagcacgagttctccgctccctacacaccacagcaaaatggtgtggtagagaggaagaacaggacgctactagacatggcgaggacgatgcttggtgaattcaagacgcccgaacggttttggatggaagccgtgagcacggcttgccacgccataaaccgggtctaccttcatcgcctcctcaagaagacttcatatgagcttctaaccggtaacaaacccaatgtgccttactttcgtgtatttgggagcaaatgttacattctagtgaagaaagcaaaacgttgtgggaaccaagtgggtgttccgcaacaaacaagacaagcacggggtggtgacaaggaacaaggcgtgacttgtggcaaaaggttatgcccaagtcgcagtttggactttgaggagacttttgctcctgtggctaggctagagtcaattcgcatattgttagcctatgctactcaccattctttcagtttgttccaaatggatgtgaagagcgctttcctcaacgggccaatcaaggaggaggtgtacgtggagcaaccccctggctttgaggatgaacggtaccccgaccacgtgtgtaagctctctaaggcgctctatggacttaagcaagccccaagagcatggtatgaatgccttagagactttttaattactaatgatttcaaggttgggaaagccgatccaactctttttactaagacttgtgatggtgatctttttgtgtgccaaatttatgtcgatgacataatctttggttctactaaccaaaagtcttgtgaggagtttagcagggtgatgactcaaaagtttgagatgtcgatgatgggcgagttaagctatttccttgggttccaagtgaagcaactcaaggatgggaccttcatctcccaaacaaagtacacgcaagacttgatcaagcggtttgggatgaaggacgccaagcccgcaaagactccaatgggaaccgacggacacaccgacctcaacaaaggaggtaagtccgttgatcaaaaggcataccggtctatgatagggtctttactttatttatgtgctagtagaccggatattatgcttagcgtatgcatgtgtgctagatttcaatccgatccaagggagtgtcacttagtggccgtgaagcgaattcttagatatttagtcgctacgccttgcttcgggatctggtatccaatggggtctacctttgacttaattggatattcagactccgactatgctggatgtaaggtcgataggaagagtacatcggggacgtgccaattcttaggaaggtccctggtgtcatggagttctaagaaacaaacttctgttgccctatccaccgctgaggccgagtatgttgccgcaggacagtgttgcgcgcaactactttggatgaggcaaacccttagggactttggctacaatctaagcaaagtcccactcctatgtgataatgagagtgctatccgcatggcggataatcctgttgaacacagccgcacaaagcacattgacatccgacatcactttttgagagaccaccagcaaaagggagatatcgaagtgtttcatgttagcaccgagaaccagctagccgatatatttaccaagcctctagatgagtcgaccttttgcaagctgcgtagtgagctaaatgtcttagattcgcggaacctggattga

SEQ ID NO: 4695 - DNA, 1739 bp, Zea mays
  Clone ID: TF_ZM5066.C5.o1.fg
atggatcctaaagggaagggaatcgtgatcaacgacaaggagaaggagtccttcgtcaacgagccaagggatgacaagtccaacgactcggactcgggtcacagacgcaaagatgggaagaagaagaagacaagacgcatcaaggagatcgtctactacgacagcgatgagtctacttcctcccaaaaggacgacgaccacaacgaatacgagagaaagaaaccggtcaattcgaacttttcttttgattactctcgtattcctcaaagtactaatgctcatttattatctattccacttggtaaacctcctcattttgatggagaggactacggattttggagtcacaaaatgtgtagtcacttgttctctctccatcctagcatatgggagattgtagaaagtggaatgcactttgatagtacggatagtcccatgtttattaatgaacagattcataaaaatgcacaagctactactgtgttgctagcctctttgtgcagggacgagtaccataaggtgagcggcttggacaatgccaagcagatctgggacaccctcaagatctctcatgaggggaatgatgtcaccttgctcaccaagatggagttggtggagggcgagcttggacggttcgcaatgataaggggcgaggagccaactcaaacatacaaccggctcaagacccttatcaacaaaataaggagctacggaagcacgcgatggacggatcacgacgtcgtccgcctaatgctaaggtcctttaccgttcttgatcctcatttggtgaacaatattcgtgaaaatcctaggtacaccaagatgtcgcccgaagaagttctggggaagttcgtaagcgggcgaatgatgatcaaggaggcaagatatgtggacgacgtgttgaacggtcctattcatgagcctcaacccattgctctcaaggcaatgaggagcaaggaggcgctaccgagcaaggtggcgcaagttgaggcggccgggctaaataatgaggagatggccctcatcattaagcgcttcaagacggcgcttaaaggtcgcaagggacagccaagcaagaccaagacaaaggagaagcgctcgtgcttcaaatgtggtaagattggtcatttcattgctaactgtcccgataatgaaagtgaccaggaaaaggggaacaaaagggagaagaagaagcattacaagaaggccaagggcgaggcacatatcggaaaggagtgggattcggattgctcctcctccgactccgacaatgaaggactcgccgccaccgccttcaacaagtcatccctcttcccctacgagcgtcacacttgcctcatggcaagggagaagaaagtaagcactcatgatactagtacttatgcttcttcaagtgaggatgagactagtgatgatgatgagatagattactcatgcttattcaagggattagatagatctaaaattaataagattaatgagttgattgatgctttgaatgacaagaatagattactagaaaaacaagaggatcttttatatgaggagcatgataaatttgttagtgcacaaaattctcttgctctagaaattaaaaggaatgaaatgctctctagtgaattatctacttgtcatgaatccatctcaaaattaaaaagtgttaatgatgatttgaatgctaagttagaaatagctagtaaatcaacatcttgtgtagaaattgttgaaacttgcaatag

SEQ ID NO: 4696 - DNA, 4998 bp, Zea mays
  Clone ID: TF_ZM5105.C7.o6.fg
atggatcctaaagggaagggaatcatgatcaacgacaaggagaaggagtccttcgtcaacgagccaagggatgacaagtccaacgactcgggctcgggccacagacgcaaagatgggaagaagaagaagacaagacgcatcaaggagatcgtctactacgacagcgatgagtctacttcctcccaaaaggacgacgaccacaacgactacgagaaaaagaaaccggtcaattcgaacttttcttttgactactctcgtattccgcatagttcaagttcacatttgctctccattccactcggcaagcccccacactttgatggagaggactacggattttggagccacaaaatgcgtagtcacctattctctctccatcctagtatatgggagattgtagaaagtggaatgcactttgatagttccgatagtcccatgttcattaatgagcaaatacataagaatgcacaagctactactgttcttctagcttctttgtgcagggatgaatacaacaaagtgagcggcttggataacgccaagcaaatatgggacaccctcaagatctctcatgaagggaacgacgtcaccttgctcaccaagatggagttggtggagggcgagcttggacggttcgcaatgataaggggcgaggagccaactcaaacatacaaccggctcaagacccttatcaacaaaataaggagctatggaagcacgcgatggacggaccacgacgtcgtccgactgatgctaaggtcctttaccgttcttgatcctcatttggtgaataatattcgtgagaatcccaggtacaccaaaatgtcgcccgaagaagtccttggaaaattcgtaagtgggcgaatgatgatcaaggaggcaaggtacgtggacgacgccttgaatggaccgatcaacgagccgcaacctcttgctctcaaagcaacaaggagcaaggaggcgctaccgagcaaggtggcgcaagttgaggcggccgggctaaataatgaggagatggccctcatcattaagcgcttcaagacggcgcttaaaggtcgcaagggacagccaagcaagaccaagacaaaggagaagcgctcgtgcttcaaatgtggtaagattggtcatttcattgctaactgtcccgataatgaaagtgaccaggaaaaggggaacaaaagggagaagaagaagcattacaagaaggccaagggcgaggcacatatcggaaaggagtgggattcggattgctcctcctccgactccgaccatgaaggactcgccgccaccgccttcaacaagtcatccctcttccccaacgagcgtcacacttgcctcatggcaagggaaaagaaagtaagcactcatgatactagtacttatgcttcttcaagtgaggatgagtctagtgatgatgatgagatagattactcatgcttattcaagggattagatagatctaaaattaataagattaatgagttgattgatgctttgaatgacaagaatagattactagaaaaacaagaggatcttttatatgaggagcatgataaatttgttagtgcacaaaattctcttgctctagaaattaaaaggaatgaaatgctctctagtgaagtatctacttgtcatgaatccatctctaaattaaaaagtgttaatgatgatttgaatgctaagttagaaatagctagtaaatcaacatcttgtgttgaaattgttgaaacttgcaataggtgtgaagattttgacattgatgcttgtagtgaacacctagtttcaatttccaaacttaatgatgaattggctagtcttaatgctcaacttaagactagcaagagtaattttgataagctaaaatttgcaagggatgcctacacaattggtagacacccctcaattaaggatggtcttggctacaagaaggaagccaagaacttgacaagccataaggctcccatctccgccaaggagaaagggaaggcccctatggctagtaatgtgcaaaagaaccatgcctttatgtaccatgataggagacaaactagaaatacttttaggagttataatacttatgatgattttgactctcatgccatgtttgcttctagttcttcctatatgcatggtagaaatatgtctaggagaaatgcttttcatcatgtgcctagaaagaattttattcatgcttctaggaaagcagtgaatgaaccttctacaatttattgtgctttaaatgcttcctttgccatttgtagaaaggataggaaaatagttgctaggaagttaggggcaaaatgcaagggagacaaaacttgcatttgggtccctaaggatatttgcactaaccttgtaggacccaacatgagttgggtttatgcatccgggggttcaagctggattatcgacagcggatgcacaaaccatatgacgggggagaagaagatgttcacctcctatgtcaagaataaagattcccaagattcaattatattcggtgatgggaatcaaggcaaggataagtctgaaacccaagggaccctcaagcgcttcctcaggagagctcaaaatgagtttgagctcaaggtgaagaagataaggagcgacaacgggtccgagttcaagaaccttcaagtggaggaattccttgaggaggaagggatcaagcacgagttctccgctccctacacaccacagcaaaatggtgtggtagagaggaagaacaggacgctaatcgacatggcgaggacgatgcttggagaattcaagacccccgagcgtttttggtcggaagctgtgaacacggcttgccacgccatcaacagggtctaccttcaccgcctcctcaagaagacttcgtatgagcttctaaccggtaacaaacccaatgtatcttactttcgtgtatttgggagtaaatgctacattctagtgaagaagggtagaaattctaagtttgctcccaaagctgtagaagggtttttgttaggttatgattcaaatacaaaggcgtatagggtcttcaacaaatcatcgggtttggttgaagtctctagcgacgttgtatttgatgagactaatggctctccaagagagcaagttgttgatcttgatgatgtagatgacgaagacgttccaacggccgcgatacgcaccatgacgattggagatgtacggcctcgggagcaattggagcaagatcaaccatcctcctcaacgatggtgcatcccccaactcaagacgatgaacaggttcatcaaaaggaggcgtgtgatcaatggggagcacaagatgatcacatgatggaggaagaagcgcaaccggcacctccaactcaagttcgagcggtgattcaaagggatcatcccgtcgaccaaattttgggtgacattagcaagggagtaactactcgatctcgattagttaatttttgtgagcattactcttttgtctcttctattgagcctttcagggtagaggaggccttgctagatccggactgggtattggccatgcaggaggaactcaacaacttcaagcgcaatgaagtttggacactggtgcctcgtcctaagcaaaatgttgtgggaaccaagtgggtgttccgcaacaaacaagacgagcacggagtggtgacaaggaacaaggctcgacttgtggcaaaaggttatgcccaagtcgcaggtttggactttgaggagacttttgctcctgtggctaggctagagtctattcgtatcttgctagcatatgctgctcaccattctttcaggttgtaccaaatggatgtgaagagcgctttcctcaatgggccgatcaaggaggaggtgtacgtggagcaaccccctggcttcgaggatgaacggtaccccgaccacatgtgtaagctctctaaggcgctctatggacttaagcaagccccaagagcatggtctgaatgccttagagactttttaattgctaatgctttcaaggttgggaaagccgatccaactctttttacaaagacatgtgatggtgatttgtttgtgtgccaaatttatgtcgatgacataatatttggttctactaaccaaaagtcttgtgaagagtttagcagggtgatgacgcagaaattcgagatgtcgatgatgggcgagttgaactacttccttgggttccaagtgaagcaactcaaggacggcaccttcatctcccaaacgaagtacacgcaagatttgctaaagaggtttgggatgaaggacgccaagcccgcaaagacgccgatgggaaccgacggacacaccgacctcaacaaaggaggtaagtccgttgatcaaaaagcataccggtccatgataggttctttgctttatttatgtgctagtagaccggatattatgcttagcgtatgcatgtgtgctagatttcaatccgatcctaaggagtgtcacttagtggctgtgaagcgaattcttagatatttagtcgctacgccttgcttcgggatctggtatccaaaggggtctaactttgacttgattgggtactcagattccgactatgctagatgtaaggtcgataggaagagtacatcgggaacgtgccaattcttaggaaggtccctggtgtcgtggaactctaagaaacaaacttccgttgccctatccaccgctgaggccgagtatgttgccgcaggacagtgttgcgcgcaactactttggatgaggcaaaccctccgggactttggctacaatctgagcaaagtcccactcctatgtgataatgagagtgctatccgcatggcggaaaatcctgttgaacacagccgcacaaagcacatagacatccggcatcactttttgagagaccaccagcaaaagggagatatcgaagtgtttcatgttagcaccgagaaccagctagccgatatctttaccaagcctctagatgagaagaccttttgcaggctgcgtagtgagctaaatgtcttagattcgcggaacttggattga

SEQ ID NO: 4697 - DNA, 1605 bp, Zea mays
  Clone ID: TF_ZM5106.C2.o14.fg
atggatcctaaagggaagggaatcgtgatcaacgacaaggagaaggagtccttcgtcaacgagccaagggatgacaagtccaacgactcgggctcgggccacagacgcaaagatgggaagaagaagaagacaagacgcatcaaggagattgtctactacgacagcgatgagtctacttcctcccaaaaggacgacgaccacaacgaatacgagaaaaagaaaccggttaattcgaacttttcttttgattactctcgtattcctcaaagttctaatgctcatttattatctattccacttggtaaacctcctcattttgatggagaggactacggattttggagtcacaaaatgcgtagtcacttgttctctctccatcctagcatatgggagattgtagaaagtggaatgcactttgatagtacggacagtcccatgtttattaatgaacagattcataaaaatgcacaagctactactgtgttgctagcctctttgtgcagggacgagtaccataaggtgagcggcttggacaatgccaagcagatctgggacaccctcaagatatctcatgaggggaatgatgtcaccttgctcaccaagatggagttggtggaaggcgagcttggacggtttgcaatgataaggggcgaggagccaactcaaacatacaaccggctcaagacccttatcaacaaaataaggagctacggaagcacgcgatggacggatcacgacgtcgtccgcctaatgctaaggtcctttaccgttcttgatcctcatttggtgaacaatattcgtgaaaatcctaggtacaccaagatgtcgcccgaagaagttctggggaagttcgtaagcgggcgaatgatgatcaaggaggcaagatatgtggacgacgcgttgaacggtcctattcatgagcctcaacccattgctctcaaggcaacgaggagcaaggaggcgctaccgagcaaggtggcgcaagttgaggcggccgggctaaataatgaggagatggccctcatcattaagcgcttcaagacggcgcttaaaggtcgcaagggacagccaagcaagaccaagacaaaggagaagcgctcgtgcttcaaatgtggtaagattggtcatttcattgctaactgtcccgataatgaaagtgaccaggaaaaggggaacaaaagggagaagaagaagcattacaagaaggccaagggcgaggcacatatcggaaaggagtgggattcagattgctcctcctccgactctgacaatgaaggactcgccgccaccgccttcaacaagtcatccctcttccccaacgagcgtcacacttgcctcatggcaagggagaagaaagtaagcactcatgatactagtacttatgcttcttctagtgatgatgagtctagtgatgatgatgacatagactattcatgcttattcaagggcttagatagatctaagatagataagataaatgaactcattgatgccttgaatgataagaataggctattagaaaagcaagaggaccttttatatgaagaacatgataagtttgtagaagcacaaaaatcacttgctttagagattaagagaaattaa

SEQ ID NO: 4698 - DNA, 4992 bp, Zea mays
  Clone ID: TF_ZM5107.C2.o5.fg
atggatcctaaggggaagggaatcgtgatcaacgacaaggagaaggagtccttcgtcaacgagccaaaagatgacaagtccaacgactcgggctcgggccacagacgcaaagatgggaagaaaaagaagacaagacgcatcaaggagattgtctactacgacgacagcgatgagtccacttcctcccaaaaggacgacgtccacaacgactacgagagaaggaaaccggtcaattcgaacttttcttttgactactctcgtattcctcaaagtactaatgctcatttattatctattccacttggtaaacttcctcattttgatggagaggactacggattttggagtcacaaaatgcgtagtcacttgttctctctccatcctagcatatgggagattgtagaaaatggaatgcactttgatagtacggatagtcccatgtttattaatgaacagattcataaaaatgcacaagctactactgtgttgctagcctctttgtgcagggacgagtaccataaggtgagcggtttggacaatgccaagcagatctgggacaccctcaagatctctcatgaggggaatgatgtcaccttgctcaccaagatggagttggtggagggcgagcttggacggttcgcaatgataaggggcgaggagccaactcaaacatacaaccggctcaagacccttatcaacaaaataaggagctacggaagcacgcgatggacggatcacgacgtcgtccgcctaatgctaaggtcctttactgttcttgatcctcatttggtgaacaatattcgtgaaaatcctaggtacaccaagatgtcgcccgaagaagttctggggaagttcgtaagcgggcgaatgatgatcaaggaggcaagatatgtggacgacgcgttgaacggtcctattcatgagcctcaacccattgctctcaaggcaacgaggagcaaggaggcgctaccgagcaaggtggcgcaagttgaggcggccgggctaaataatgaggagatggccctcattattaagcgcttcaagacggcgcttaaaggacgcaagggacagccaagcaagaccaagacaaaggagaagcgctcgtgcttcaaatgtggtaagattggtcatttcattgctaactgtcccgataatgaaagtgaccaggaaaaggggaacaaaagggagaagaagaagcattacaagaaggccaagggcgaggcacatatcggaaaggagtgggattcagattgctcctcctccgactccgacaatgaaggactcgccgccaccgccttcaacaagtcatccctcttccccaacgaacgtcacacttgcctcatggcaagggagaagaaagtaagcactcataatactagtacttatgcttcttcaagtgaggatgagtctagtgatgatgatgagatagattactcatgcttattcaagggattagatagatctaaaattaataagatcaatgagttgattgatgccttgaatgacaagaatagattactagaaaaacaagaggatcttttatatgaggagcatgataaatttgttagtgcacaaaattctattgctctagaaattaaaaggaatgaaatgctctctggtgaattatctacttgtcatgaaaccatttctactttacaaggtgttaacaatgatttaaatgctaaattagaagtagcaaataaatctaattcttgtgtagaacatgttataatttgtactaggtgtaaagattttgacattgatgcttgtagtgaacacctagtttcaatttccaaacttaatgatgaattggatagtcttaatgctcaacttaagactagcaagaatgatttcgataagctaaaatttgcaagggatgcctacacgattggtagacacccctcaattaaggatggacttggtttcaagagggaagccaagaacttaacaagccataaggctcccatctccgccaaggagaaagggaaggcccctatggcaagtagtactaaaaggaatcatgcttttatgtatcatgataggagacaaactagaaatgcttataggaattataatgcttttgactctcatgccatgtttgcttctagttcttcctatatgcatggtagaaatatgtctaggagaaatgctattcatcatgtgcctagaaagaatatcattcatgctcctaggaaagtagtgaatgaaccttctacaatttattgtgctttaaatgcttcctttgctatttatagaaaggataggaaaatagttgctaggaaattaggggcaaaatgcaagggagacaaaacttgcatttgggtccctaaagatatttgcactaaccttgtaggacccaacatgagttgggtttatgcatccgggggttcaagctggattatcgacagcggatgcacaaaccatatgacgggggagaagaagatgttcacctcctacgtcaagaataaggattcccaagattcaattatattcggtgatgggaatcaaggcaaggataagtctgaaacccaagggaccctcaagcgcttcctcagtagagctcaaaatgagtttgagctcaaggtgaagaagataaggagcgacaacgggtccgagttcaagaaccttcaagtggaggagttccttgaggaggaagggatcaagcacgagttctccgctccctacacaccacagcaaaatggtgtggtagagaggaagaacaggacgctaatcgatatggcgaggacgatgcttggagaattcaagacccccgagcgtttttggtcggaagccgtgaacacggcttgtcacgccatcaacagggtctaccttcatcgcctcctcaagaagactttgtatgagctactaaccggtaacaaacccaatgtatcttactttcgtgtatttgggagtaaatgctacattctagtgaagaagggtagaaattctaaatttgctcccaaagctgtagaagggtttttgttaggttatgattcaaatacaaaggcgtatagggtcttcaacaaatcatcgggtttggttgaagtctctagcgacgttgtatttgatgagactaatggctctccaagagagcaagttgttgatcttgatgatatagatgaagaagatgttccaacggccgcgatacgcaccatgacgattggagatgtacggcctcgggaacaattggagcaagatcaaccgtcttcctcaactatggtgaatcccccaacccaagatgacgaacaagtacttcaagtggaggcgcatgatcaagggggagcacaagatgttcaagttgaagaggaagaagcacctcaggcacctccaacccaagttcgagcggtgattcaaagggatcatcccgtcgaccaaattttgggtgacattagcaagggagtaactactcgttcaagattagttaatttttgtgagcattactcctttatctcttctattgagcctttcagggtagaagaggccttgctagatccggactgggtgttggccatgcaggaggagctcaacaacttcaagagaaatgaagtttggacgctggtgcctcgtcctaagcaaaatgttgtgggaaccaagtgggtgttccgcaacaaacaagacgagcacggagtggtgacgaggaacaaggctcgacttgtggcaaaaggttatgcccaagtcgcaggtttggactttgaggagacttttgctcctgtggctaggctagagtccattcgtatcttgctagcatatgcctctcaccattctttcaggttgttccaaatggatgtaaagagcgctttcctcaacgggccaataaaggaggaggtgtacgtggagcaaccccctggcttcgaggatgaacggtaccccgaccacgtgtgtaagctctctaaggcgctctatggacttaagcaagccccaagagcatggtatgaatgccttagagatttcttaattgctaatgctttcaaggttgggaaagccgatccaactctttttactaagacttgtgatggagatttgtttgtgtgccaaatttatgtcgatgacataatatttggctctactaataaaaagtcttgtgaagagtttagcagggtgatgacgcagaaattcgagatgtcaatgatgggcgagttgaactacttccttgggttccaagtgaagcaactcaaggatggcaccttcatctctcaaacaaagtacacacaagacttgctaaagcgggttgggatgaaggacgccaagcccgcaaagactccaatgggaaccgacggacacaccgacctcaacaaaggaggtaagtccgttgatcaaaaagcataccggtcaatgataggatcgttactttacttatgtgctagtagaccggatattatgcttagcgtatgcatgtgtgctagatttcaatccgatcctaaggagtgtcacttagtggcggtgaagcgaattcttagatatttagttgctacgccttgcttcgggatctggtatccaaaggggtctacctttgacttaatcggatactcagattccgactatgctggatgtaaggtcgataggaagagtacatcggggacgtgccaattcttaggaaggtccctggtgtcatggaactctaagaaacaaacttccgttgccctatccaccgctgaggccgagtatgttgccgcaggacagtgttgcgcgcaactactttggatgaggcaaaccctcagggactttggctacaatctaagcaaagtcccactcctatgtgataatgagagtgctatccgcatggcggaaaatcctgttgagcacagccgcacaaagcacatagacatccggcatcactttctgagagatcaccagcaaaagggagatatcgaagtgtttcatgttagcaccgagaaccagctagccgatatctttaccaagcctctagatgagaagaccttttgcaggctgcgtagtgagctaaatgtcttagattcgcggaacttggattga

SEQ ID NO: 4699 - DNA, 1685 bp, Zea mays
  unsure (1)..(1685): unsure at all n locations
  Clone ID: TF_ZmC4812_1
nnaaaaattccaaaaaaaaagaaaaaaaaaaaaaaaaaaaaaaaaaaaaaaaaaaaatcgagaaaaaaaggatcgtctgctggcatcgttccattctcctctaaaccctagccgcctagcgcctcgatctgagcagcctgtctcgcggaggtagttctggttgatttggtcctagatggcggaggaaaaagtggggcggatcttcgtcggcgggctgtcgtggaacaccacggagcgcacgctcgagcgcaccttcggtcagtacggcaaggtcatcgaggctcaggttgtagtggaaagggagacaggccgctctaggggatttggatttgtcacattttcagaacctcgggctgtggatgctgccattcggggaatgcataacggagaactggatggccgcaatatttctgtgaacaaagctgaacctaggaactctgatggctatggatatggtggtggtggtggtggtggttactcgtccggtggtagaggtggatatcgtagtggagctgatgtagttccagcagccagtgatgattgtttcaaatgtggccgtcctggacattgggctcgtgaatgcccttattcagatggaagtggtagaactggaaggtattctcccggttcaaggtatggtggtggcactggtggacgtggtgatcgctttggaggatcagatcgttttgctcgctatgatgatgatcgatatgatggtgggcgctatgtggacagcagggatacttattatggttccgggcgcgatcgctatgcaccggcagcagaacgctattctggtgacaggtacagtggtgcagatcgatatgcgtccagcggctttgccagagaaaggagctatgagagagatggagggaggtccaatggaggttactaccgtgatgaaccgaggggcactggtggctatggcagaggtggttcacgtggcggcggcggcggtgggcctgctcgctttggtgggagttaccgagataggcctgctccatacgatcgtcccagcaggggaggagcagctcgtgcttatgatgatcgttactgaagaatgttcccctgaggcagaacagagatatctgtgtatttcagctatgcactagtatttacatttgccagcttgatccttcaattccgtgttatccagcagttgcagtttgttttattagtctatgaagacaatggttcagtccatgggttattaatatgctggtaccgtaatctttaggcagtgtgctcctggttgattcgtcatgtttgtgtaactactttggagtttgcactaaataatgaactaattccagtatgtggtctttgaattggacttccgttatgcttactgagatagctgtgccgcattctgcattgaggatgaactttgcaccgataattctgagatgtgctgtgcggcaatgtgcagatcgatctgttcagctcttgatgctgctgggttttgttggtctaatatcaggaaggtttaattctgcttctactctgggctgagtaagatggtgcgaatctgagtctcagaaaaactgtggttcatgcagtcaggtgatggttatgatgttttcctgatgcagatgaatgcgttatgttactgatttactagcgatgtctggtgcagatccgcagataaacttggcttctttgctctgttctctggcttattctaa

SEQ ID NO: 4700 - DNA, 4104 bp, Zea mays
  Clone ID: TF_ZM5006.C3.o12.fg
atggatcctaagggcaaggggatggtggtcaatgataaggagaaggagtctttcttcaatgagccaaaaatgacaagcccactgactcgggctcgagtcacaagaagaaagacggatgaatatcataaagtgagcggcttggataacgccaagcagatttgggacaccctcaaaatctcacatgagggaaacgatgtcaccatgctcactaagatggagttggtggaaggcaaactaggaaggctcaagaccctcgtcaacaaaataaggagctatggaagcacgcgatggacggaccacgacgtcgtccgacttatgctaaggtccttcaccgtccttgatcctcatcttgttaactctatccgtgagaatcctaggtacaccaagatgacgcccgaggagatactcagaaagttcgtaagtgggcgaatgatgatcaaggaagcaagatacgttgatgatgcgttaaatggcccaatccatgagcctcaaaccattgctctcaaggcaacaagtagcagggaggcgctacctagcaaggtggcgcaaattgaggcggctgggctaaatgaggatgaaatgaccctcatcatcaagcgcttcaagacggcgctcaaaggtcgcaaggagcatcccaacaaaagcaagacgaagggaaagcgctcctgcttcaagtgtggtaagattggtcattttatcagtaattgtcccgataatgacagtgaccaggaacaagagaagaagagggaaaagaagaaggcttacaagaaggctaagggtgaggcacaccttggcaaggaatgggactcggattgttcatcgtccgactccgacaacgaaggactcgccgcctcggccttcaacaaatcgtccctcttccccaatgagcatcacacctgcctcatggcaaaggagaagaaggtaagcacacgaaatgctattacatatacctcttcaagtgatgatgaatccagcgatgatgaagtagactatgctagtttattcaaagggttagatagaactaaaattgataaaatcaatgaattaattgatgcattgaatgagaaaaatagacttttagaaaagcaagaagatcttttatatgaagagcatgataaatttactagcaaaaatgaatttgataaactaaaatttgcaagggatgcctacacgattggtagacacccctcaattaaggatgggcttggcttcaagagggaatccaagaacttaacaagtcataaggctcccatctccaccaaggagaaagggaaggcccctatggctaatagtactcaaaagaaccatgctttcatgtaccatgataggagatattctaggaatgttcattatgataaaagttacaatgatgttgtttcacctgccatgattgcttcaagttcttctattatgcatgatagaagtttggctaggaaaaatgtcactcatcatatgcctaggaggaatgttcatgtttatgcatccgggggatcaagctggattatcgacaacggatgcacaaaccacatgacgggggagaagaagatgttcacctcctacgtcaagaacaaagattcccaagactcaattatattcggtgacgggaatcaaggcaaggttaaaggactaggaaaaatagctatttctttcgagcattctatctctaatgtgtttttagttgagtcgctcgggtataatttgttgtccgttagtcaattatgtaatatgggatataattgcttattcacaaatatagatgtgactgtctttagaaggagtgatggttcattagcttttaagggtgtattagacgacaaactctatttagttgattttgcaaaagaggaggtcggtctagatgcatgcttaattgctaagactagcatgggctggctgtggcatcgccgtttagcacatgtggagatgaagaaccttcacaaacttctaaagggagaacatgtgataggtctaacaaatgtaaccttcaaaaaagatagaccttgtgcagcttgtcaagcaggtaaacaggtgggaagctctcatcataccaaaaatgtgatgaccacatcaagacctttggagttgcttcatatggacctcttcggacccgtcgcctatctaagcataggaggaagtaagtatggtcttgttatcgttgatgacttttcccgcttcacttgggtattctttttgcaggataaaacagaaacccaagggaccctcaagcgcttcctaaggagagctcaaaatgagtttgagctcaaggtgaagaagataaggagcgacaacgggtcggagttcaagaatcttcaagtagaagagtaccttgaggaggaaggaatcaagcacgagttctccgctccctacacaccacagcaaaatggtgtggtagagaggaagaataggacgctcatcgatatggcaaggacgatgcttggagagttcaagacccacgagcggttttggtcggaagccgtgaacacggcttgccacgccataaaccgggtctaccttcatcgactcctcaagaagacttcatacgaactcctaaccggtaacaaacccaatgtgtcttactttcgtgtatttggaagcaaatgttatattctagtgaagaaaggtagaaattctaagtttgctcccgaagctgtagaagggtttttgttaggttatgactcaaatacaaaagcgtatagggtcttcaacaaatcatcgggtttggttgaagtctctagcgacgttgtatttgataagactaatggctctccaagagagcaagttgttgatcttgatgatgtagatgaagaagatgttccaacagctgcaatacgcaccatggcgattggagatgtgcggctacaggaacaaaaggagcaagatcaaccttcttcctcaacaatggtgcatccccaactcaagacaatgaacaggttcatcaagaggaggcgtgtgatcaatggggagcacaagacgatcatgttgttccaaatggatgtgaagagcgctttcctcaacgggccaatcaaggaggaggtgtacgtagagcaaccccctggctttgaggatgaacggtaccccgaccacgttgggaaagctgatccgactttattcactaagacttgtgatggtgacttatttgtgtgccaaatttatgtcgatgacataatatttggttctactaaccaaaagtcttgtgaagagtttagcagggtgatgactcaaaagtttgaaatgtcgatgatgggcgagttgaactacttccttgggttccaagtgaagcaactcaaggatggcactttcatctcccaaacgaagtacacacaagacttgatcaagcggtttgggatgaaggacgccaagcccgccaagactccaatgggaactgacggacacgtcgacctcaacaaaggaggtaagtctgttgatcaaaaagcataccggtctatgataggttccttgctttacttatgtgctagtagaccggatattatgcttagtgtatgcatgtgtgctagatttcaatccgatccaagggagtgtcacttagtggctgtgaagcgaattcttagatatttagtcgctacgccttgcttcgggatctggtacccaaaggggtctacctttgacttaattggatactcggactccgattatgctggatgcaaggtcgataggaagagtacatcagggacgtgccaattcttaggaaggtccctggtgtcttggagttctaagaaacaaacttccgttgccctatccaccgctgaggccgagtatgttgccacaggacagtgttgcgcgcaactactttggatgaggcaaaccctccgggactttggctacaatctgagcaaagtcccactcctatgtgataatgagagtgctatccgcatggcggataatcctgttgaacacagccgcacaaagcacatagacatccagcatcactttttgagagaccaccagcaaaagggagatatcgaagtgttttatgttagcaccgagaaccagctagccgatatctttaccaagcctctagatgagaaaaccttttgcaggctgtgtagtgagctaaatgtcttagattcgcggaacttggattga

SEQ ID NO: 4701 - DNA, 3528 bp, Zea mays
  Clone ID: TF_ZM4932.C3.o9.fg
atggcgggtgaatcatggagcttggctccgtccctcctcgaccgcgtctacgagtcctccatcagaaccactacttgcgcctggccgaaatcgacggagagggagaagaagactgagaaaaggagaagagggccgccgccgaggtgtatgggagtcgcgatcccttggcagatgggtaacatgacttgtgggtacagggtacaacctctgcagagtgtaaaactgatggtcaacacccggaagggtggtggaattgatttacctcccaatcgacacactcggaggatatttagacaaccccagccacaaccaacagagatggatcctccaccaccgcctccaccatcaggagttgacccactggttgcagctcagatgaggatgatgcaacaaatggctgacactatggcagatatgcatgctcagatgcagcaggaacgccaggagatgcaccaagagcgggaggagatacgtcgagagttgcaccaagaacgagaagagatacgccaggaaaggaggacgcagcagcaacagcaacagcaacaacaaccgcaacaagcaccacagcctccaccaccacccccagttccaccccgagataagcaccgggagttcatgagccataagccaccgacatttgctagttgtcctgatccactggacgcagatgattggctaaagttcgtagagaagatgttgaacattgctcagtgcacggaccaggagaagggaagcatgtcagtcagcgagtatcgcgacaagttcattcagctctccagatatgctccggaagaggttgccaaagatgagaggaagcaggaacattttattgaaggacttaatggacctctacagtattctctggtggcacatacgtttccatcatttcagaggctgctcgataaggctctatctattgaacacaagcgtgttcagctaggagatttgaagaggaaggctatatcccaaggacaaggaagcaacagtgctacccccacttgtaccccgatgaaattctcaggacagagtgcaggcactacttgcttcaagtgtgggaagactggacattatgcaattgtttgcccacagaggattgctaccaccccagttcagaataagcagcagactccaggatctggcaagggacactctattgccagggttaatcaagtcagcactgatgctactcctgatggtgctgacatcgtgcttggtatgttttacgttaatgcaattcctgcaaccatattatttgattctggtgctacacattcatttatgtctgctcgatatgccaacacaaatgaggtacccctgctaaatatgagaaaatcaatgatagtgattacacctaaagggcctgttgaggcaaataaaatgacacgtagattgacattaacaattatgggaagagaatttatagctactgctataatattagaggcaagcagtatagatttgatccttggtatgtcctggttaagaaaggcaaaggccattatagcatgtggtaggggtaccgtagaactcaccagccctaaaggagaaagatttcaagttcaaattgcagtaaccacctcttccagacatgcgatgtactttatagttgaggagtttgttggtgacaacatccgtgtggttagagattttctggatgtctttccagaggagttgccagggatgccaccagatagggaagttgagtttgttattgatctcttacctgggactgtccctatttctaaacggccatacaagatgtctgtaaaagaattaaaggaacttaagaagcagttaacagaattacaagaggctgggttcattcatccgagttcctcaccttggggagcaccgatactgtttgtacagaagaaggatggttcacaacgaatgtgtgtggattatagatcccttaatgatgttactgtgaagaacaagtatccgttaccccgcattgaggatttatttgatcagatgagaggtgctagggtattcttgaagattgatctccgatcgggataccatcagatgaggattaggccatcggatattcccaagacaactttcttgactcgatatggattatatgagttcacggttatgtcatttggactgactaatgcaccagcttattttatgaatttgatgaataaggtgtttatggagtatttggacaaattcgtcgtagtattcatcgacgatattcttatttattccaagagttatagtgatcatgaggaacatctgagattggtgctacagaagctacgagataatcaactctatgctaagtatagcaaatgggagttttggattggcgaggtgccattccttggacatatcatttctaatggagggatttcagtagatcctgctaaagtcaaggagataatggagtggagcgtatccactacagttaaagagattcagagtttcttggggcttacaggatattatcggagatttattgaaggattctctaagattaccaagcctatgacctcacttctagagaaggaaagagagttcaagtgggacgagaagtgccaagatagttttgatcaattaaagaagaggttgatgtcgccaccagtgttgaaggatatcaaccttaggcaacgccgttggttggagcttattaaagattatgatttggagattcactatcacccgggcaaggcgaatttggttgccgatgccttgagtcggaaggaacacgttcattcagctattgtggcccagctacctgatgagcttgttgaggatttcaggagacttaacctggggatagttgctcacaatgaaggagttactattgatgtggaacctactttggagcaagaaatccgcaaaggacaaattggtgatgctaaaatacaagagatcaaggatcttattactgaaggtcgaggtccagaattcacggaggatgagcaaggcaccatatggttcaaggataggatatgtgttcctgatattgaaagccttcgtgagactattttaaaggaggcccatgactcggattattctattcaccctggtagcaccaagatgtatcaggatttgaagcagaaatactggtggtatggattgaaaagagatgtggctgcacatgtggctatgtgcgatgtgtgtcaaagagttaaggctgaacaccagaggccagctggactactgcacccacttaagatacccgggtggaagtgggaagagattggaatggatttcattaccggattgcctcgcacccagaaaggatatgatgctatatgggtgattgtggatagattgattaaagtagcccacttcattcctgtcaagactacttataaaggttctcaactggcagagttatatatggcacagattgtgtgtttacatggagtaccaaagaagatcgtgtctgatcgaggttcacagttcacctcaagattctggagaagctttcatgagaatatgaatacaaagttgaattttagtacaacctatcaccctcagactgatggacagactgaaaggactaattaa

SEQ ID NO: 4702 - DNA, 4212 bp, Zea mays
  Clone ID: TF_ZM4352.C1.o5.fg
atgtctactcaacgggaccatgtggatcctctcctcgaggaaatccccatcacatcttccggtgaggaagtggaccccaaggtcctcgacctcgccatgaagattgccgagaagatgttcctcaaaatgaaagaggaagatgctaagaaaaaggccgaagaagaagaatcaagaagaaaggccgaagaagataaaggtaaaggaaaatttgatgtcgaaggtgttgagcaaggtaagtctcaacaccgagggatcatctaccaaaagcaaagaaattttatccccaacttctcttcctccccacttggaaagttaccaactcttagtgagttgaactatgacgagtgggccgacaagatgaagtcgcatttaatcggtgtgcatcctagtctttgggagattgtcaatgtaggtatgtttaagcccgcccaaggagaagagatgactccggaaatgatgcaagaggttcatcgcaatgctcaagcagtgagcataattaaaggaagtctttgtccggaagaataccggaaagttcaaggaagagaagatgcccgtgacatttggaatattcttaaaatgtcacatgagggagatcccaaagctaagagacatagagttgaagctttagagagtgagcttgcaagatatgattggacaaagggtgagtcacttcaatcactctttgaccggttgatggtgttagtaaacaaaataagagtgcttgggagtgaagattggagtgactccaaggtcacaagattattcatgagagcatataaagaaaaggataaaagtcttgcaaggatgattagggatcgtgatgactatgaggatatgacgcctcatcaattatttgcaaaaaatcaacaacacgagtccgaagaagcccctatcaagacaagagactctcatgccttgatcactaatgaacaagacaaccccaagaagaacaaagaccacaaagcaaagaaagtggtcgagacctcaagtggtgaagatagctcaagtgatgaagacacaactatgttcatcaaaacattcaagaaatttgtaaggaaaaatgacaagttccaaaggaaaggaaagaagagggcatgctatgaatgtggccaaaccggtcatttcatagtggattgtcctaacaagaaggaacaagaagccaagaaggaatacaagaaggacaagttcaaaaagggaggcaagaccaagggatacttcaagaagaagaaatatggtcaagcccatattggtgaagaatggaactccgatgaagagagttctagctccaaggaagaggaagtggtggcaaacgtggccatccaatctacatcaagctcgcaactcttcaccaacctacaagatgactcctacactccaacttgcctcatggcaaaaggagataaggtaagcttatttagtaatgatttaccaaatgatgatgatgatgaacaaattgccatgaaaaataaaatgattaaagaatttggcttgaatggatacaatgttatcaccaaattaatggagaagctagataaaacaaaagcaactcttgatgctcaagaagacttgcttatccttgaaaaggaaagaaacctagagcttcaagaattgcttcacaataaggatgaaatgctagatgtcttgactaaggaagtatctttagtcaagataactatagagaataaagataaagaagtaattaatatgaaaacctctatagctaatcttgcaaatgaaaagaatgcacttgaaacaagcatgttaagcttgaatgttcaaaatcaagaacttcaagtgcaacttgaaaattgcaagaacatcaatgcctcatctttagtgattgaatctaagtctagctccttaaatgataatttttgcaaacattgtgccaaatatcatgcttcttgttgtctaactaaccatgcaaggaagaatagcccacaggtgaaggtcaaaggaattttgaaaagatgctctagcaatgatgggttaaagaaagttaaacccaagtacaagtccctaaagcccaacaatggaagaagggggcttgggttcaactcatccaaggaaaaccctagcacagtgcataaggggtggagatcccccaagttcatagagggaaccaccctatatgatgccttggggaggattcactcctcaaatgacaagtcacctcaagtaaaggtctactcctctggtgggtcaagttgggtgcttgacagtggatgtacaaatcacatgaccggggagaaagacatgtttcattcattgcaactaactcaagaagcacaagaaattgtgtttggagatagtggcaagagtaaggtgattggtattggtaaaattcctatctctgaccaacaatcactttcaaatgttttattggtagattctttaagctacaatttgttgtccgtttcacaactttgtggaatgggttataattatttattttctgatgtggatgtgaagatccttagaagggaggactcctcagttgcctttacgggtcgcttgaagggcaagctttatcttgttgatttcacaacaagtaaagtgacgcctgagacttgtttagtggcaaagtccgacaagggttggctatggcatcgccggctagcccatgttggtatgaggaatttggccaaacttcaaaaggataatcacatcattcgactaacaaatgttgtatttgagaaagatagggtttgtggcgcatgccaagcaggaaagcaacatggagtcccacataaatcaaagaatgtggtcacaacaaagaggccattggagcttcttcacatggacctcttcggacctatggcttacattagcattggtggtgaaactcaagagatattgaagaaattcatgaggagagctcaaaatgagtttgagctcaaaatcaagaaagtgagaagtgataatgggacggaattcaagaacacaggtgtcgaagaatttttaggcgaagaaggaatcaaacatgagttctcagttccttacactccacaacaaaatggtgttgtggagagaaagaaccgaactttaattgaagcagctagaaccatgttggatgagtacaagacacctgacaattttatgcaatcaaccgtctctatcttcacaagatctacaaaaagactgcttatgagcttctcactgaaagtcaagagctcaaagtttgctcctagagtggatgagggtttcttgcttggttatgcatcaaatgcgcatggatatcgcgttttcaacaataccaccggtcttgttgaaatagcgatagacgtgacatttgatgagtctaatggctcgcaagggcatgtttctaatggcactgcaggaaatgaagaactaccttgtgaggccataaagaaacttgcaataggtgaagtgagacctcaagaaaaggatgatgaggaaggaactttgtggatgaccaatgaggttgttgatgtgggtgcaaaggtggtgggtgacaaatcctccacccaagcaaacccatcaacctcaagtcatccaagtattgaagaaaatcatcaattccaaaggatgccaactatggtagaagatggacacgaaagtgttgatggtgaagtgcctcttgatcaagtgaatgatgaggaggagcaaatacaaagacaaccatcagtgcctcatcctagagtccatcataccattcaaagggaccatccggtggacaacatcctgggtagcatcaggagaggggtaacaactcgatctcgtttagctaatttttgtgaattttactcgtttgtttcctctcttgagccacttaaggttgaagaagcattgggtgatccggattggataatcgccatgcaagaggagttgaacaacttcacctggaatgaagtctggtccttagtccaaagacccaaacaaaatgtgattgtgactaaatgggtctttaggaacaaacaagatgaacatggcgtagttacaagaaacaaagcacggttggttgcccaaggctacactcaagtggaaggacttgattttggtgaaacatatgcgccggtagcaaggttagagtcaattagaatattaattgcctatgctactaaccatgatttcaagctatatcaaatggatgtcaagagcgcatttctaaatggaccactacaagagagggtctatgtggagcaaccaccgggctttgaagagccaaagaagccaaaccatgtttattga

SEQ ID NO: 4703 - DNA, 392 bp, Zea mays
  Clone ID: TF_LIB3059-057-Q1-K1-G9
tgaagaggaagactatcacccagggacaagggagcagtagcatctgccgtcgctatgttccaccccagggtacaccagctcgtcctggaggagggcaactgtcctaccaacgacctgctctgcatataccacaggcgactccgcatactcgccaggctgcccccactggcaccccaacgagacctactggccagggtactactacagtcaccacttgcttcaagtgtggtgaggttgggcactacgccaatgcttgtccgaagaggaatcccaacacacccgctcgaagcaatgtttaaagcaagcaacagactctggctaccggccaggggtccaataatgctagagtcaaccaaattagtgctgatgctactgttgacgatgatgatatt

SEQ ID NO: 4704 - DNA, 883 bp, Zea mays
  unsure (1)..(883): unsure at all n locations
  Clone ID: TF_LIB4756-066-R1-K1-F8
cattgggaccctcgaggccggccgggactctactctggacgcgactcgaacttaaaccctagagccgcagccccggtcgctccaccgaccccaaatctcaaatcagcgggagggaactcgcacgcgaaggctgaactcatggctcgcgtctacgttgggaacctggatccgcgtgtcacggcgcgggagatcgaggacgagttccggatgtttggggttctgaggagtgtatgggttgctaggaaaccaccagggtttgccttcattgactttgatgaccgcagggatgcacaagatgccattcgtgaattggatggtaagaatggttggagggttgagctgtcaactaaagttggtggtggccgtggccgagaccgtaacggttctgatatgaagtgctatgagtgtggtgaagctggccactttgcacgtgaatgccgcttgcggattggttcaggaggcttgggtagtggaaggcgtcgcagccgaagtcctagatatcgcagccgcagccgcagccgcagccgcagcccaaggtatcgaaggagcccaagctatagcagaagcccgcgagatcgttctcctaggaggcgaagttacagcaggtcgccactgggatctcctgcacggagtctcagcaggtcaccgccgctgccgccgcctcctcccagaaataacagcaggtcaccacctggagcccgagaagtgagcaggtcgccgccgccacctcctcccagaaataacagcaggtcaccaccggcagcccgagacgtgagcaggtcaccaccggcagcccgagacgtgagcaggtcgccaccaccacctcctgatgccagaagaagctatagtggatccccangacagcagccacaacgcgacgagt

SEQ ID NO: 4705 - DNA, 1423 bp, Zea mays
  Clone ID: TF_ZmC5918_1
tggggccctcgaggtcgtttcccgcccgaaaaagtcccagctccctcactctactctggacgcgactcgaacttaaaccctagagccgcagccccggtcgctccaccgaccccaaatctcaaatcagcgggagggaactcgcacgcgaaggctgaactcatggctcgcgtcttcgttgggaacctggatccgcgtgtcacggcgcgggagatcgaggacgagttccggactgtttggggttctgaggagtgtatgggttgctaggaaaccaccagggtttgccttcattgactttgatgaccgcagggatgcacaagatgccattcgtgaattggatggtaagaatggttggagggttgagctgtcaactaaagttggtggtggccgtggccgagaccgtaacggttctgatatgaagtgctatgagtgtggtgaagctggccactttgcacgtgaatgccgcttacggattggttcaggaggcttgggtagtggaaggcgtcgcagccgaagtcctagatatcgcagccgcagccgcagccgcagccgcagcccaagatatcgaaggagcccaagctatagcagaagcccgcgagatcgttctcctaggaggcgaagttacagcaggtcgccactgggatctcctgcacggagtctcagcaggtcaccgccgctgccgccgcctcctcccagaaataacagcaggtcaccacctggagcccgagaagtgagcaggtcgccgccgccacctcctcccagaaataacagcaggtcaccaccggcagcccgagacgtgagcaggtcaccaccggcagcccgagacgtgagcaggtcgccaccaccacctcctgatgccagaagaagctatagtggatccccaggacagcagccacaacgcgacgagtccccatatgccaatgacgcctgagattctcttagctgccccaagatgctggaaaatgctaggggcccccagcatgttttgcctgtccggtcggcacaactgtaattctgtaggatcgagtctgagattttgttccagtgttttgggtttcccttgacacatcgctgctgatacaattgtggaggcaggagcacaacgtttctgttttaagtattgactggatgactttgggcgcttgtagttgtcaaggcaggacctgatttgtgttaggcttgtattactagactgcattcgaatttggagaaagtgttcatcgtgctgtaacgtttccgtttcgagtattgactttgggcacttatagctgtcaagacatgacctggttcttgttagatttatatcactagattgcttttgaattcggacgaagtgttaatcgtgggctatgttgagatatttgtctaccttttcaggacgctttcgaagttgagataaaaaaaaaaaaaaaaagcgccctcgtgc

SEQ ID NO: 4706 - DNA, 1850 bp, Zea mays
  Clone ID: TF_ZmC5918_3
ctctcccagagtcccagctccctcactctactctggacgcgactcgaacttaaaccctagagccgcagccccggtcgctccaccgaccccaaatctcaaatcagcgggagggaactcgcacgcgaaggcaagtacgctttagatcccccattgcttctggctactaggccagcgcgcctcgattttcttctccgttttggtctaattcgtgaggaatttgggttttctcggtggagcttggttccgctccgccttggagtggatttcggtgacttctttgttcagattgtttcgctcttgcaggctgaactcatggctcgcgtctacgttgggaacctggatccgcgtgtcacggcgcgggagatcgaggacgagttccggacgtttggggttctgaggagtgtatgggttgctaggaaaccaccagggtttgccttcattgactttgatgaccgcagggatgcacaagatgccattcgtgaattggatggtaagaatggttggagggttgagctgtcaactaaagttggtggtggccgtggccgagaccgtaacggttctgatatgaagtgctatgagtgtggtgaagctggccactttgcacgtgaatgccgcttacggattggttcaggaggcttgggtagtggaaggcgtcgcagccgaagtcctagatatcgcagccgaagccgcagccgcagccgcagcccaagatatcgaaggagcccaagctatagcagaaggtaatttgctaatgacaccaattcaccacatgtattcatccagtagttttaattaagggttgggaaacacgacctagaaatcctaaaacttttgagaacgaagcaaaatttcagagataacacgttccctttaaccaagtgagtatccactatccagtatggtctcagatttgttggatagtatttaaccaaacattcgactatgcattttgactttttgagtgttgttctttatcttgcattggtactatataatacaatgcattctacaccccctcccacctgttatagctttgttagcgttggcctaatatttcaggggaacatgttgagagacttcataaaatacagatcaatgtcttcttgcctaactagcagccttttcaatgcgttattttatgttcatcctgaaaacaaatgttcggtttttccggagctacagcccgcgaggtcgttctcctaggaggcgaagttacagcaggtcgccactgggatctcctgcacggagtctcagcaggtcaccgccgctgccgccgcctcctcccagaaataacagcaggtcaccacctggagcccgagaagtgagcaggtcgccgccgccacctcctcccagaaataacagcaggtcaccaccggcagcccgagacgtgagcaggtcaccaccggcagcccgagacgtgagcaggtcgccaccaccacctcctgatgccagaagaagctatagtggatccccaggacagcagccacaacgcgacgagtccccatatgccaatgacgcctgagattctcttagctgccccaagatgctggaaaatgctaggggcccccagcatgttttgcctgtccggtcggcacaactgtaattctgtaggatcgagtctgagattttgttccagtgttttgggtttcccttgacacatcgctgctgatacaattgtggaggcaggagcacaacgtttctgttttaagtattgactaacgtttctgttttaagtattgactggatgacttgggcgcttgtagttgtcaaggcaggacctgatttgtgttaggcttgtattactagactgcattcgaatttggagaaagtgttaaaaccccccccccacc

SEQ ID NO: 4707 - DNA, 266 bp, Zea mays
  Clone ID: TF_jC-zmX700382080a1
gagctctttagtcggcggtcgcccttctttactatgccgttctttgaggctgctcggacgttttaaggcgttcgatgagcgtactgggccgcatactcatgccacaggcgaacggtgcgactatcatctcctcctcacggatgcctatttgaaagctcgaaagaagaataattggacgatcggcaaatgcttcaactgtggcaaccgcggtcactttgcacaggactgccccaagccgaagaaggaagaggcactattcgacaatg

SEQ ID NO: 4708 - DNA, 626 bp, Zea mays
  Clone ID: TF_ZmC263852_1
ccctctctctctctcccgcacgcgcacccggaagcctcgcttccgccgccgccgtcgctgccgctccgcgccgcgacgcagactcgccccgtgctacgctacgcccggagctcccggctctcgtcggcgcagggatttgttcaccatggcccgcttgtatgttggcaacttggatgcccgggtgactgctggggaacttgaagacgagttccgtgtgtttggagttttgcgaagtgtctgggttgcacgtaagccacctggttttgcgtttatcgattttgatgacaagcgggatgctgaggatgcacttcgtgatctagatggcaagaatggatggagggttgagctgtctcgcaatgaccgtggtgaccgtggaggtcgtggtggtggtgctggtggcggcggcggcggtcgtgatcgtggtgggtctgatatgaaatgctatgaatgtggtgaatctgggcattttgctcgtgaatgtcgtctgcgtattggttctggtggtctgggcagtggaaggcgtcgcagcaggagccgcagtcgcagccgcagtcctaggtaccgtaggagtccgagctatggcagaagaagttacagccctcgtgatcgctctccaagacgccgca

SEQ ID NO: 4709 - DNA, 828 bp, Zea mays
  unsure (1)..(828): unsure at all n locations
  Clone ID: TF_ZmC518624_1
ctcttccgcccgcggcggctcaaacttaaaccctagagccgctcccctcctcgcctccgaagcgctcgccacccgattcgcgagtcccctcctcccagggaggcgcttccgcgaaggtccgctgctgcggtcatggctcgcgtctacgtggggaatctggatccgcgcgccactgcgcgcgagatcgaggacgagttccgcgtgtttggggttctcaagagtgtgtgggttgctagaaagccaccaggatttgctttcattgactttgatgagaccagggacgcaaaggatgcaattcgtgaattggatggcaagaatgggtggagagttgagctgtcaaccaaatctggtagtggccgtggccgagaacgtgaacgctctggaggttctgatatgaagtgctatgagtgtggtgaaagtggccactttgcacgagagtgtcgcctacggattggttctgggggcctgggtagcggaagacgccgcagccggagcccgaggcaccgcagccgtagccgtagcccaagataccgcaggagcccaagctatggcagaaggagctacagcccacgggatcggtctcccaggaagcgaagttacagcagatcaccaccgcctccccgggcgcggagtatcagcaggtctccaccacctgcccgtgcgcgaagcatcagcaggtctccaccgnncggccccgtgngcgaagcatcagcaggtcaccgccgnctgcccgtgcgcnaaacatcagcaggtcaccaccgcctcctcgcgcagaaagcatcagtaagtcacaccgccagcccgtgacgggaagctatagcaggtccc

SEQ ID NO: 4710 - DNA, 715 bp, Zea mays
  Clone ID: TF_ZmC518624_2
ctcttccgcccgcggcggctcaaacttaaaccctagagccgctcccctcctcgcctcctcagcgctcgccatccgattcgccagtccccaatccccccagggaggagcttccgcgaaggtccgctgctgcggtcatggctcgcgtctacgtggggaatctggatccgcgcgccactgcacgcgagatcgaggacgagttccgcgtgtttggggttctcaagagtgtgtgggttgctagaaagccgccaggatttgctttcattgacttcgatgagaccagggacgcaaaggatgcaattcgtgaattggatggcaagaatgggtggagagttgagctgtcaacaaaatctggtagtggccgtggccgagaacgtgaacgctctggaggttctgatatgaagtgctatgagtgtggtgaaagtggccactttgcacgagaatgtcgcctacggattggttctgggggcctgggtagcggaagacgccgcagccgaagcccgaggcaccgcagccgtagctgtagcccaagataccgcaggagcccaagctatggcagaaggagctacagtccacgggatcggtctcccaggaagcgaagttacagcaggtctccaccgcctgcccgtgcgcgaagcaccagcaggtctccaccgcctgcccgtgggcgaagcatcagcaggtcaccgccgcctgcccgtgcgcgaagcatcagcag

SEQ ID NO: 4711 - DNA, 828 bp, Zea mays
  Clone ID: TF_LIB4738-138-A1-K1-B7
cggccgggctctcccaaatccttctcctccgcgccgccacagccgggcgcgcctccccgatcgagatccaggagatatgcctcgttatgatgatcgccatgggaatacacgcttgtatgttggaagattggcccctcgcacccgttcccgcgacctagaatatcttttcagcaaatatggaaggttttcggttttttacccaaccatggaggtctgtggtggaagggtgcccttggtggaattggtggccattgttccgatatttgtggaggactttggggtggccattgttccgatatttgtggaggactttggtgaagggcgcccttggtgtaatcttattgactgttgtagatgaagttgcaagttgatgcatttgagtacttgactcatgtcagcagcttactgtttgtggaaactatttgcgcagaatacgtgaagtggagttgaagcgtgactatgcattcattgaattcagtgacccccgtgatgctgatgatgcgcagtacaacctagatggcagggaagtcgatggaagccgtattattgttgaatttgctaaaggagttcctcgtggttctggtggttcacgtgagtacatgggaagaggacctccaccaggaacaggtcgttgttttaactgtggaatggatggtcactgggcaagggactgcaaggctggtgactggaagaacaatgctaccgctgtggtgaatcgggccatatagagagaattgccagaacagtcaagaaatctcaggcgtgataaaagctattcacggctccatcccccccgtggggggacgtggccgcagccggagctacagc

SEQ ID NO: 4712 - DNA, 5769 bp, Zea mays
  Clone ID: TF_ZmC74_112
atggcaacataccaggagtttctgagcacgcagccgcccttgttcaccaaggcagaggatccgttggacgccgacgtatggcgtcacgtcgtcgagtccaagtttcccctcctcacaggagactgccctgatgaggccaaggctcgctttgccgcacagcagtttcgcggccctgctcggacttggtgggaccactttcgtgctatgctccccgctgatcgtgaagtatcttgggaggaattcaagactgccttcagaggacaccacatcccagctggcattcttgatcggaagttgaatgaatttctggcccttaatcaaggaacccgcatggtactgcagtatgcgcaagccttcaacgacttatgccagtatgcagggtatcatgctgattctgatgaaaagaagagggatcgcttccgcaggggtctcaataccaagctgcgggaacgactcaacactgtccgggctgatagcttcaatgagttggtcaacatggccatctcccaggaagattgcattgttgctcaccgggcagagaagaagagaaaggcaccaatggcagcaccatccgctcaggctcagaggttccggattgtttctcacaatcagagcaggggttttcagcagcaggcaggcagatgggtgatcaggccacctcagcagcagcagcaggcacccaaccgctacccagctcccgccccaaggaacaatcagcctccgcagcagcagcagttccgccagggcaatgggaacaagtgtttcacttgtggcagtgtgggccactatgccaagaattgtcccaggaaccagcagaggcagatgccagcaccaaatcaagacaagggaagaaagcagaaggtgcaagttaggcaagggaagctcaacttcactactctggaggaagtacctgaaggagctcctatcatgaccggtaccttttcagtttataatcaacctgctttaattctgtttgattctagtgcatctcatagtttcattagccaaaagttcagtgctaaatgcaaactgccattctctcactcaaaagggtcattcatgatagtcacacctgggggtaaaattgcaactaaccaattaaaccaaagtgtgcctattcaactgggaagccacattatcaaaaccactcttcttgtgttgggattggaaaatgtggacattattctaggagcaaattggatgaccttgcaccaagttgtgcttgatgtagccagtcgtaccgtggaagttaattctccgttctgcgggaatttcactttaattctgcctagtcgagattctactcagtcgtgtgctttctctatgacggagttacctctgaaaaagatcccagtggtatgtgagtatgcagatgtctttcctgatgaattgccaggaatgccacccgaccgggatatcgaattcgccatcaagttgcaaccggggacggccccaatttctaagaggccctaccgaatgccacccgctgagttggcagaattgaagaagcaattgcaagagttgctggataagagttttattcgcccaagcacttcaccttggggatgtccagcactgtttgtgaagaagaaggatgaaagcttgaggctgtgtatagattaccgccctcttaatgcggtaactatcaagaacaagtatcctttgccttgtattgatgttctttttgaccagttggtcggggccaaggtattttccaagatagaccttcgctctggctaccatcagatcaaaatacgagcatgtgatattccgaagacggcattctcaaccagatatgggctatatgaattcttggtgatgtcattcgagctgacaaatgcaccagcatatttcatgtatctgatgaattctgttttcatgccggaattggacaagttcgtggtggttttcattgatgacattttggtgtactcaaagaacgaagaagaacatgccgggcatttgcatgtagtgcttcaacgtctgcgagagcaccacctttatgccaagttatccaagtgtgatttttggctaaaggaaatcaaatttttgggtcacactatctctcaggctggaatagctgttgatcctgataaagtgcaagaggtgatgaactggaggccaccaacaactgttcgccagattcggagttttctgggattagttggttattacagaagatttattccggacttctctcgaattgcgaagcctattactgagttgctgaagaaagaagtcaagtttgtttggagtcagaagtgcgaagatgccttccatgcattaaggcagcatctgaccacagcaccaatattggcgcaacccaacagcagcaagccttttgatgtatactgtgatgcctctggcaccgggctaggttgtgtcttgatgcaagacaaccgagtcattgcttatgcctcaagagcactcaggcctcatgagcaaaactatcccactcatgacctcaagttggcagcagtggctgatctcaacatgaggcagagaagatggctagagctgatcaaggattatgacctggaggtacattatcacccaggaaaagctaatgtggtagcagatgccttgagtcggaagttgcaatgcaattgtgttctgatggattctcgcattaacaccttgtgtgatgagttgagcaagatgcaaattgaagtgattccttctggttctttgtctcacatttctgttgagccagctttgcaagaccaggttatcatggcccagcttagtgacaagggagtgcaatttatcaagaagaatctccatcagaaggttgagaagtataattgtttccgccaggatgagaaaggtgtgctatggttcaaaagcagattggtgattcctaaagatcaggacctcaagaggaaaattttggatgaggctcatctctccaaattctctatgcatccgggaagcaccaagatgtaccatgatctgaagcctttgtactggtggaccagaatgaagagggagataggccagtatgtatcagaatgtgacacctgtcagaggataaaggcaagccacttgaagtcagctggagctttgcaaccattgtccgtaccttcgtggaagtgggacgatatcaacatggatttcattgtgggtctgcccaacacctctcgtcatcatgattcgatttgggttattgtggaccgattgacgaaagtggcacattttcttcctgtgcacaccactgataaggctcagaaatatgcagaattgtatattgaccggatcgtgtgtttgcacggattaccccggaccattgtttctgaccgaggagcccaatttgttgccagattttgggaacaattgcaggagtctttgggaaccaagctaatcaggagttcagcttaccacccacagactgatggtcagacggaaagggtaaaccaaattctggaggatatgctgagagcttgtgcaatcgattgtggcaagaactgggataagcacctctccttggcagagtttgcttataacaatagttatcaatccagcctaaagatggcaccttttgaagctctctatggaagaaggtgcaggacaccactcaattggtctcaacctggtgagagagaagtttttggacctgacttagtgactgaagccgaaaggaaggtcaagctaatcaggaagaatctagaagctgctcatgccaggcagaagagctatcatgataaaagaaggaaacctctccagttcgaggtgggaagttttgtatacctcaaggtatcacccaccaagggagtgcagaggtttgggatcaaaggcaagctagcccctcgttacattggaccttatgagatcatagaagcatgtggacccgtggcatacaagctgaagttaccttccaagatgtctgccattcacagtgttttccatgtatctcagctgaagaagtgtgttcgattgccgaccgagatcatagcagagccagaattggagatagagccagatctatcgtaccaagagtacccctccaagattctggattgcaaagaaagatcaactcgggctaaatcgatcaagatgtataaggtccagtggagtaatcactcagaggaggaagctacttgggaaaccgaggaattcttgagatccaacttccccgattgcctacctaaggaagctgattgcaatcttgccgacggagagtacgtgctcatccccgagcaaggacctgtccaagaggaggaccaggagcaggcttcagagactgctattgaggatctccccgcagccccagcaattgaaggcaagccccgctatggtgggtacaagtgcggtcactgcacggcggcagccggggtcagtggagcattgtatgccaaggcggtaccattcaggaaatggttgacgcccaggacagccatcaagtcacaagttctggcagactttgtcgtcgactggactgggccaataacacagccggacccgtccgcagagaaggtttggacaatccattgcgatggcgcatggtgctacgcgggggcaggcgctgctgcagtcattacctcacccaccggggtcaagcacagatacgcggcacgcctcagctttgctctggaatctgacagatgcactaacaacatagcagaatacgaagctgttatcctcggcctccgcaagctaagggtctttggtgtcactacctgcataatcagaacagactccaaggtagtcgccggccaggtcaagaaagactatgcagcaaaggaccccgcactcatgcaatacctcgcggctatccgtagtctcgagagacagttcaagggtttcaccttgcagcatgtggaccgagccaagaatgaggaggccgacgcattagtcaaggctgccgccaaaggcgagtccctgccctccgacgtgttctaccatgttatcggcacgccagccgtccgcagccccaaagggctccaaataaccaatgacagcgagggccaccgcatagtcaaccttattatgaccgaagactggcgagcaccaataaccctgtttctacaagggtactaccatccaaccgacatcaacgaggccaagcgcctcaagcatcgaagccgggacttcgcgctgattgaaggccagctttacaagaagggggtcagtcaaccaatgcttaaatgcgtcaccgagaccgaaggcgtccaaatcctgtgcgaagtccacagcggtacttgcggctctcacgcagggccaagggccctagccgcaaaggtgatccgtcaaggtttctactggcccgcaatgatctgcgccgcaaatcgggtcacaaggtcctgcaaagcctgccagaaattttctcctcgatcaggcagcccttcgcaattcacaaaactaatcgcccatacatggcctctccagcgctggggcctagacattgtcgggcccctgcccacgactcaggggaacctcaagttcaccttcgtcgctgtcgagtattttaccaaatggatcgaggcgagggctatatccacaataacatcaaagactgcacagaaattcttctggcaaaacattgtttgccgcttcggagtaccgtctgaactcacagttgacaacgacaagcagtttgacagccaagacttcaaggatttctgcttctccattggcaccaagcttgccttggcctcggtataccacccgcagtccaacggagttgtggaacgcgtaaatggcaaaaatttcacagctgtcaagaagatgctcctcgacgaaaaagggcaagtgggccgatttgttacctga

SEQ ID NO: 4713 - DNA, 184 bp, Zea mays
  Clone ID: TF_LIB3354-024-P1-K1-H6
tttcgttgagcaacataagaagggtctgtgatggagaggaggatagttctcactgcaccatagcatgctcaaagaagaggcgaacatgttatgaatgtggcatccctgggcacctctcttctaattgcccaaacaagaaagatcctgaatttatttctgatgaaaagaacactaatgttgattc

SEQ ID NO: 4714 - DNA, 478 bp, Zea mays
  Clone ID: TF_LIB3068-029-H3_FLI
ctaagatctctcattttccttaaccccactcaagttcaattaattcgtggtaatcctagatacactcaaatgacccccgaggaagttatcgggaattttgtgagctttgaatgtatgatcaagggctccaagaagatcaacgagcttgatgaaccctccacgtccgaagcacaaccggtggcgtttaaggcgacggaggagaagaaggaggagtctacaccgagtagacaacaaattgacgcctccaagctcgacaatgaggagatggctttaatcatcaaaagctttcgccaaatcctcaagcaacggaaggggaaggattacaaaccccgttccaagaaggtttgctacaagtgtggtaagcccggtcactttatagctaaatgtccattatcaagtgatagtgacaggggcgacaacaagaagggaaagaggagagaaaagaagaggtaccacaagaggagggcggccgctcgcg

SEQ ID NO: 4715 - DNA, 2338 bp, Zea mays
  Clone ID: TF_ZmC119_821
atgtcgggagcatccgccaagagggagatcaggaccggcgagaagcccgccacaagccatgggaaggctccatccggggagtccgccaataaggtgaagggatccccttcacacgacaagtcgcgtcggagcggtgacaagaagaagaagatgaagaaggtggtctactacgagaccgactcttcgtcgccatccacctccggctccgacacgccgtccgtaacttctaagcgccatgagcgcaagaagtttagtaagatccccctacgctaccctcgtatttccaaacgtactccattactttccgtcccattaggcaaaccacctatgtttgatggtgaagattataatatgtggagtgataaaatgaggcatcatctaacctcactccacactagcatttgggatgttgttgagattggagtacaggtaccatcaccgggggatgaagactatgattcggacgaggtcgcccaaatccgacacttcaactctcaagccaccactatactcctcgcctctctaagtcgagaggagtataacaaggtgcaaggactaaagagcgccaaggagatttgggacgtgctcaagaccgcgcacgaaggagatgaggtgactaaaatcaccaagcgggagacgatcgaggggaagctcggtcggttccgactcaaccaaggcgaggacccacaagccatgtacaaccgcttgaagaccttggtgaatcaagtgcgctacctcgggagcaccaaatgggatgaccatgagatggtcaaggttattctaagatccctcgttttccttaaccctacgcaagttcaattaattcgaggtgatcctagatacacgctaatgtctcccgaggaggtcataggtaaatttgtgagctttgagctaatgatcaaaggctccaaaaagatcatcgagcaaggcgactcctccatgcccgaagcacaacccgttgcattcaaagcaacgaaggagaagaaacaagattctaatccaagtagaatccccatcgacgcctccaagctcaacaataaggagatggcgctcatcatcaagagcttccgtcaaatcctcaaacaaaggaaggggaaatattacaagccccgttccaagaaggtgtgctacaagtgtggtaagcccggtcatttcattgctaaatgtccattatctagtgatagtgacaggggcgacgacaagaaggaaaagaggagagaaaagaagagatactacaagaagaagggcggtgatgcccatgtgtgccgcgagtggaactccgacgagagctcctccgactcctcctccgacgaggacaccgccaacatcgccgtcaccaagggcctctgtcacacccggattttaggggtccaaaacccgggcgcgaacataatcaccagaggttgcgcatctttacccacaagtcatgttacccatctgccaagggatcgtgacttcccatacacctctaccgaggaggcgaggcagggtaacactacgaggcctttacaaagttccactagcttcagaaaacccgctacagttataggaagctccaatgcagggttcttgcctgaccgccatcgcagcaaaatcaaccaaggacctccctacactgaccactcccctactgcccttgcccctttcgggtaaggtagtcatccactagctttcctaattaatcagccaagggcgtccataaacccttgtggtagcactgttttcccgagtggttctccatgttccaattaacataatggtcttaacatgaacaataaataacaactgataacaaaagtgtaatcatgaataatgtatctccatacccaaaaccacatatagcactagcaagtactacccagaaagttcagtggtaaacaaggtataaagatagacaaactagggtatcctattgggtcccatcaaaattaacctatgcagatcattatgattaattagaacatgactgggtaaaaagaagtgatcaagggcacaacttgcctgggacttgagattccaggtaacaacttgcttttcagatgactcgtgacctcgcgctagtcgtagcaatacaaacaaacatggtataggcaaaattaacatcacaccaaacatagcaacaaactgcataataataatctactcgtcactacgagatcgtgggatcgagaactactaagatcggagtcgtggttaaggagttatgattttatagatgattcatgtgattaaaatattaaactatatcataaattggttattatagatcatatgagaaattattttataaataattatcttaactttaatctagatccccggcccggccggcctcgag

SEQ ID NO: 4716 - DNA, 2385 bp, Zea mays
  Clone ID: TF_ZmC31816_2
ctaaagacagttgtagcccattttgcataattgagaaactgaaagcaagttatagtctaaagaatcttcaagaaaaacattagaaatagaatggtcaggagatatagcaattttaccaagtcctttgaccaaactttgattctcatccccgaatgtgatagctctttggggatcatggtttttctcataggaggagaacatctttttctccccagtcatgtggtttgtgcacccgctatcaatgatccaacttgagcccccggatgcataaaccttaggttcccaaacacaagccttggagcccttgtgtttgcccccaacatatttggcaattactttgcctgatttgttagttaaaacatatgaagcatcaaaagtcttaaatgaaacattagtttcatttgatgcaataggagatttctttttaggcaatttaacatgggttgattgcctagagctagaagcctcatttttatacataaaagcatgatgtgtaacattatgaggtttcctagcatgaattctcctaattttgtgctcgagataaccaacatgatataaaatatagcccttgttatcctgagccatgggagccttacccttaacaaaaatagacaatcttttaggggtattaagcttgacattgtctccctgttggaagccaatgccatccttaatcccagggcgtctcccattatagagcaggcttctagcaaatttaaatttttcattttctatctcacgctcaataattttaacactaagttgagctatgtgatcattttgttgtttagataaagctaggtgatcatggatagcatcaacattgatgtctctacatctatttaaatctttagccttagatattaatttatcattctcaatcctaagactagaaagtgattcattcaacttgtcaattttagcaatcaaactagcattatcatttttaagtttgacaagagaatcatcacaaacatttaatttctcaaccttagcaattaatttaacattctcatttctaaggttggagatagtatcatggcaaatgttaagctcactagtcaatttttcacatttttctatctcatgagcataagcatttttaaccttaacgtgcttcttgttttccttaataaggaagtcatcttgcctatccttgagtccatccttctcatgaatagcactaattaattcattcaatttttctttttgttgcatgttgaggttggcaaaaagtgtgagcaaatcatcctcatcatcactagagctagcctcatcactagatgttgcatatttagtggaagctctagattttaccttcttctttttgtcgtcctttgccatgaggcacttatggccgacgtttgggaagacaaggcctttggtgacggcgatgttagcggcatcctcgtcggatgaggagtcggtggagctctcatcggagtcccattcccgacacacttgggcatcgccgcccttcttcttgtagtatctcttcttttccctcctctttcccttcttgtcgtcgcccctgtcactatcacttgataatggacatttagcaataaaatgatcgggcttaccacacttgtagcaaactttcttggagcggggcttgtaatccttcccccttctttgtttgaggatttggtggaagctccagatgatgagcgccatttcctcgttgtcgagcttggaggcgtcgatggggagcctacttgacgtagactcttctttcttttcctccgtcgctttgaatgcgacgggttgcaccttgaccatttcatggtcatcccattttgtgctcccgaggttgcgcacttgattcaccaaggtcttgagccggttgtacatggcatgtggctcctccccttggttgagcatgaatcgactgagctccccctcgatcgtttcccgcttggtgatcttggtcacctcatctccttcgtgcgcagtcttgagcacgtcccaaatctcttttgcactcttcaatccttgcaccttattatactcctgcgctccatactcaacaatatcccatatgcttttgtggagtgaggttaggtgatgcctcattttatcactccacatagaataatcttcaccgtaaaaaaccggtggtttgctatacttcttgcgctcatggcacttagaagtggcagatgtcgattcggagtcggaggtggagggtgacgaagagtcggactcgtagtagaccactttcttcatcttcttcttcttgtcacctctccgttgtgacttgatggaggaagcagattcctccttgtgcttgtgggcggactccctcgaatgggttctccccgagcttgcggacttgtcgccactggtccctatctcccttttggcggatgctcccgacat

SEQ ID NO: 4717 - DNA, 1445 bp, Zea mays
  Clone ID: TF_ZmC31816_27
gataaccagcatgatataaaatatagtccttattatcctgaggatggtagccttgcccttaacaaaattagacaatcttttagtggcattaagcttgacattgcctccctgttggaagccaatgccatccttgatgacagggcgtctcccactatagagcatgcttctagcaaatttaaatttttcattttctaagtcatgctcattaattttagcactaagttgagctatgtgatcattttgttgtttaattaaagctaggtaatcatgaatagcatcaacattaatgtctctacatctagtacaaatagaaacatgatcaacactagaagttgagggtttgcacacatttagttcatcaatcttagcatgtaacatggagtattcatttctaagattggaaatagcatatcagcaaacacattaaattctttgccttagcaaataaattttcaatttcaaatttaaaggctgcaagagaggcattcaatttatcaatcttaacaatcaaactagcattatcatttctaagattggaaattgaatcatcacatacatttgatttctcaaccttaacatttaatttagcattttcatttctaaggttagaaatagtgtcatggcaaatgttaagcttactagttaattttttacatttttctacttcctgagcataagcatttttaaccttaacatgcttcttattttctttaattaggaagtcctcttggctatccaagagttcatccttctcatgaatagcactaatcaattcatttaatttttctttttgttgcatgttgaggttggcaaaaagggtgagcaagtcatcctcatcatcactagagctatcctcatcactagatgttgcatacttagtggaggatctagagtcgaccttcttccttttgccgtcctttgccatgaggcattgtgcccgacgttggggaagaggagacccttgttgacgacgatgttggtggcgtcctcgtcggaggaggagtcggtggagctctcatcggagtcccactcccggtatacatgggcatcgccacccttcttgtaatatttcttcttttctttcctctttcccttcttgttgttgcccctatcactatcacttgataatggacattttgcaatgaaatgaccgggcttaccacacttgtagcaaactttcttggagcggggctcgtagtctttccccctcctttgcttgaggatttggcgaaagctcttgatgatgagcgccatttcctcgttgtcgagcttggaggcgtcgatggggagcctacttgacgtagactcttctttcttctcctccgtcgctttgaatgcgacgggttgcacctcgggtgtggaggtggcgcctcgctcgattttaattcactctaactcaaattttagaaccaagttgtgttgtttgagttaagttttgcagatca

SEQ ID NO: 4718 - DNA, 530 bp, Zea mays
  Clone ID: TF_ZmC31816_40
cttgattttaccttcttctttttgccctccttggccatgaggcacttgtggccgacgttggggaagagaagacccttggtgacggcgatgttggcggcgtcctcgttggaggaggagtcgatggagctctcgtcggagtcccactcgcggcacacgtgggcatcaccgcccttcttcttgtagtgtctcttcttctcctttcttctccccttcttgtcgtcgcccctgtcactatcactagataatggacatttagcaataaaatgaccgggcttaccacacttgtagcatactttcttggagcggggcttgtagtctttccctctcctttgcttgaggatttgacggaagctcttgatgatgagcgccatctcctcgttgtcgagcttggaggcgtcgatgggtgttcgacttggtgtagactcctcctccttctcctccgtcgccttgaatgcgaccggttgtgcctcgggtgtggaggaagcgcctcgctcgatgattttctttgagcctttaatcattagctcaaa

SEQ ID NO: 4719 - DNA, 2825 bp, Zea mays
  Clone ID: TF_ZmC3310_3
atgtcgggagatcacgccaagaagatggtgatcggcggtgagaagaccgctacaagccacgggaaggctctgtcgagggagtccgccaacaagaagaaggatggatcaccttcacgcattcaatcgcacaagagtggcgagaagaagaagaaaatgaagaaattggtctactacgaggccgactcttcctcgccctctacatccggatccgacaccgcgtccgtcacttctaagcgccaagagcgcaagaagtatagtaagatccccctacgctatcctcgcattgctaaacatgctccattactttccgtcccattaggcaaaccaccgacatttgacggtgaagattattctaggtggagtgatattatgagatatcacataacctcactccacaaaagtatatgggatgttgttgagtttggtgtacaggtaccatccgtatgggatgaagattatgatgaggacgaggtggcccaaatcgtgcacttcaactcccaagccaccactatactcctcacctctctaagtcgagaggagtataacaaggtgcaaggattgaaaagcgccaaagagatttgggacgtactcaagaccgcacacgaaggagacgaggtgacaaaaatcaccaagcgggagacgatcgagggggagctcggtcgtttccggcttcgccaaggggaggagccacaagaaatgtacaactggctcaagaccttggtgaaccaagtgcgcaacctcgggagcaaaaaatgggatgaccatgaaatggtcacggaagtaataggaaaattcgtgagctttgagttgatgatcaaaggctcaaggaaaatcatcgagcaagatggtccctccactcccgaagcacaaccgatcgcattcaaggcgacggaggagaagaaggaagagtctacatcaagtagactccccatcgacgcatacaagctcgacaacgaggagatggcgctcatcatcaagagcttccgccaaatcctcaagcaaaggaggggggaggattacaaattccgctccaagaaagtgtgctacaagtgtggtaagcccggtcattttattgcaaaatgtccattatcaagtgatagtgacaggggcgacgacaagaagggaaagaggagagaaaagaagagatactacaagaagggaggcgatgcccatgtgtgccgcgagtggaactccgatgagagctcctccgattcctcctccgacgaggacgccgccaacatcgccgtcaccaagggactcctcttccccaacgtcagccacaaatgcctcatggcaaaggacggcaaaaggaagaaggtaaaatcaaagtcctccactaaatatgcaacctctagtgatgaggataattctagtgatgaggaggataatttgcgcaccctttttgccaacctaaacatgcaacaaaaagaaaaattaaatgaattgattagtgctattcatgagaaggatgaactcttggacacccaagaggacttcctaattaaggaaaataagaagcatgttaagattgattcaaatgtttgtgatgtttcaattcccaatcttagagatgataatgttagtttacttgctaagattgaagaattgaatgtctctcttgctagccttaggaatgagaatgaaaaattaattgctaaggctaaagacttagatgtttgcaacattaccatttccattcttagaagtgaaaatgacattttacatgctaagattgttgaactaaaatcttgtaaaccctctacatctaccgttgagcatgtttccatttgcaccagatgtagagacattaatgttgatgctattcatgatcacctggctttaattaagcaacaaaatgatcacatagctcaacttgatgccaaaatttctgagcatgacttagaaaacgaaaattttaaatttgccagaagcatgctctatagtgggagacgccctggcatcaagggtggcattggcttccaacagggaggcaatgtcaaacttaatgcccctcctaagagattgtccaactttgttaagggcaaggctcccatgcctcaggataacgagggttacattttgcaccctgccggttatcccgagcgcaaaattaggagaactcactctaggaagtctcactctggccctaaccatgcttttatgtataagggtgagacatctagctctaggcaaccaacccgtgctaagttgcctaagaagaaaactcctagtgcatcaaatgatcctgacatttcatttaaaacttttgatgcatcttatgttctgactaacaaatccggcaaggtagttgccaagtatgttgggggcaagcacaaggggtcaaagacttgtgtttgggtacccaaagttcttgtgtctaatgccaaaggacccaaaaccgtttgggtacctaaaatctttatgcatccgggggctcaagttggatcatccatagcggatgcacaaaccacatgacaggggagaagaagatgttctcctcctatgagaaaaaccaggatccccaaagagctatcacattcggggatggaaatcaaggtgtcactgtctttagaagaagtgatgattcaatagcatttaagggagtgttagagggtcagctataccttgtagattatgatagagctgaactcgacacttgcttaattgctaagactaacatgggttggctctggcaccgtcgactagcccatgttgcgatgaagaatcttcacaagcttctaaagggagagcacattttaggattaacaaatgttcatttcgagaaagacaggatttgtagcgcatgccaagtgaaagtcgcctag

SEQ ID NO: 4720 - DNA, 1959 bp, Zea mays
  Clone ID: TF_ZmC3310_8
atgtctcccgaggaagtaataggaaaatttgtgagctttgaattgatgatcaaaggctcaaataaaatcatcgagcaagatggtccctccacgcccgaagcacaaccggtcgcattcaaggcgacagaggagaagaagaaagaatctacatcaagtagactccccatcaacgcctccaagctcgacaacgaggaaatggcgctcatcatcaagagcttccgccaaatcctcaagcaaaggagagggaaggactacaagtcccgcaccaagaaagtgtgctacaagtgtggtaagcccggtcattttattgcaaaatgtccattatcaagtgatagtgacaggggcaacgacaagaaaggaaagaggagagaaaagaagagatactacaagaagaagggcggcgatgcccatgtatgccgcgagtgggactcggacgagagctcctccgactcctcctccgacgaggacgccgccaacatcgtcgtcaccaaaggactcctcttccccaacgtcggccacaagtgcctcatggcaaaggacgacaaaaggaagaaggtaaaatcaaggtcctccactaaatatgcatcctctagtgatgaagataattctagtgatgaggaggataatttgcgcactctttttgccaaccttaacatgcaacaaaaagaaaaattaaatgagttaattagtgctattcatgagaaggatgaactcttggactcccaagaggacttcctaattaaggagaataagaagcatgttaaggttaaggatgcttatgctctagaagtagaaaaatgtgaaaaattatctagtgagctaagcaagtgccatgatattattaccaaccttagaaatgagaatactagtttaatagctaaggttgattcaaatctatgtgatgattcaatttccaatcttagagatgataatgctaatttgcttgctaagattgaaaaattgaatgattctcttgctagccttagaaatgataatgaaaaattaattgctaaggctaaagacttagatgtttgcaatgttacaatttccaatcttagaagtgaaaatgacattttacatgctaagattgttgaacttaaatcttgcaaaccctctacatctactgtcgagcatgtttccattaatgttgatgctattcatgatcacctagctttaattaagaaacaaaatgatcacatagctcaacttaatgccaaaataaatgagcatgacttagaaaatgaaaaatttaaatttgctagaagcatgctctatagtgggagacgccctggcatcaaggatggcattggcttccaaaagggagacaatgtcaaacttaatgcctctcctaaaagattgtctaattttgttaagggcaaggctcccatgcctcaggataacgagggctacattttgtaccctgccggttatcccgagcacaaaatttggagaattcactcttggaagtctcactctggcccccatcatgcttttatgtataggggtgagacatctagctctaggcattctacccgtgccaaattgcctagaaagaaatctcctactgcatcaaatgatcccaacgtttcatttaagacttttgatgcatcttatgtgcttactaacaaatccggcaaggtagttgccaaatatgttgggggcaaacacaagggctccaagacttgtgtttgggtaaccaaggtttatgcatctgggggatcaagttcgataattgatagtggatgcacaaaccacatgacatgggagaaaaggatgttctcatcctatgagaaaaacaaagatccccaaagagctatcacattcggggatggaaatcaagatataggtgttgctgtctttagaagaagtgatgattcagtagcatttaagggagtatttgaggaaaaaatctcaaacccaagagactttgaagggattcttgagacgagcttaaaatga

SEQ ID NO: 4721 - DNA, 2784 bp, Zea mays
  Clone ID: TF_ZmC7465_2
atgtcgggagatcacgccaagaaggagatggagaccggcgaaaagcccactacaagccacgggagcacttcatcggaagagtcccgcaccaagaggagggagaagaagtcgagctcctccaacaaagggaaggagaagaaatcctcttctcaccacaaagagaagaaggagagatcttcctcccacaagccgcatcggagtggggacaagcacaagaggatgaggaaagtggtctactacgagaccgacacctcaccaacatcgacctccggctccgatgcgccctccgtaacttctaaacgccaagagcgtaagaagtttagtaagatccccctacactatcctcgcacttctagacatactcctctactttccgtcccattaggcaaaccgccaacctttgacggtgaagattatgctaggtggagtgatttaatgcgatttcatctaacctcactccacaaaagtatatgggatgttgttgagtttggtgcacaggtgccatccgtaggggatgaggactatgatgaggacgaggtggcccaaatcgagcacttcaactctcaagcgacaaccatactcctcgcctctctaagtagggaggagtacaacaaggtgcaagggttgaagagcgccaacgaggtttgggacctcctcaagaccgcgcacgagggtgacgagctcaccaagatcaccaagcgggaaacgatcgagggggagctcggtcgcttccggcttcgccaaggggaggagccacaacacatgtacaaccggctcaagaccttggtgaaccaagtgcgcaacctcgggagcgtgaagtgggacgaccacgaggtggttaaggttattctaagatcgctcattttccttaaccccactcaagttcaattaattcgtggtaatcctagatatactcaaatgacccccgaggaagttatcgggcattttgtgagctttgagtgcatgatcgagggctccaggaagatcaacgagcttgatgatccctccacgtccgaagctcaacccgtcgcattcaaggcgacggaggagaagaaggaggagtctaccccgagtcgacaaccaattgacgcctccaagctcgacaatgaggagatggcgctcgtcatcaagagctttcgccaaatcctcaagcaacggagggggaaggactacaagtcccgctccaagaaggtttgctacaagtgtggtaagcccggtcactttatcgctaaatgtcctttatcaagtgacagtgaccggggcgacgacaagaaggggaggaggaaggagaagaagaggtaccacaagaagaggggcggcgatgcccacgtgtgccgcgagtgggactccgacgagagctccaccgactcctccgccgacgaggacgccgccaacatcgccgtcaccaagggacttctcttccccaacgtcggccacaagtgcctcatggcaaaggacggcaaaaggaagaaggttaaatctagatcctccactaaatatgaatcctctagtgatgataatgctagtgatgaggaggataacttgcgtaccctttttgccgatcttaacatgcaacaaaaggaaaaattaaatgaattgattagtgctattcatgagaaggatgacctcttggactcccaagaggactgccttattaaggaaaacaagaagcatgttaaggttaaaaatgcttatgctctagaggttgagaaatgtgaaaaattgtctagtgagctaagcacttgccgtgagaccattgacaaccttaggaatgaaaatgctagtttaaatgctaaggttgattctcatgtttgcgatgtttcaattcccaatcctagagataataatgatgatttgcttgctaggattgaagaattaaacatttctcttgctagccttagagtagaaaatgaaaatttgattgctaaggctaaggaccttgatgtttgcaatgccaccatttccgatcttagagataaaaatgatattcttcgtgctaagattgttgaacttaattcttgcaaaccctctacatctaccgttgagcatgtgtctatctgtactagatgtagagatgttgatgtcaatgctattcatgatcacatggctttaattaaacaacaaaatgatcatatagcaaaactagatgctaaaattgccgagcacaacttagaaaatgagaaatttaaatttgctcgtagcatgctctatagtgggagacgccctggcatcaaggatggcattggcttccaaaggggagacaatgtcaaacttagtgcccctcctaaaaggttgtctaactttgttaagggcaaggctcccatgcctcaggataacgagggttacattttgtaccctgccggttatcctgagagcaaaattaggagaactcattctaggaagtctcactctggccctaaccatgcttttatgtataagggtgagacatctagcgctaggcaaccagcccgtcccctggtgcctagatagaaaactcctagtgcatcaaatgatcatgacatttcattcaatacttttgatgcatcttatgtgttgactaacaaatccggcaaggtttatgcatccgggggctcaagttggatactcgacagcgggtgcacaaaccacatgacaggggagaagaagatgttctcctcctacgagaaaaaccaagatccccaacgagctatcacattcggggatggaaatcaaggtgtcactgtctttagaagaagtgatgattcaatagcatttaagggagtgttagagggtcagctatacttg

SEQ ID NO: 4722 - DNA, 1650 bp, Zea mays
  unsure (1)..(1650): unsure at all n locations
  Clone ID: TF_ZmC7465_25
atgtcgggagcattcgccaagagggaaatcgagaccggtgacaagtccgcaagctcggggagaacgcactcaagggagtctgcccacaagcacaaggaggaatcctcttcctccatcaagtcccaacgaaagggtgacaagaagaaaaagatgaagaaggtggtctactacgagaccgactcttcgtcaccctccacctccggctcggaatcggcatccgccacttctaagcgccatgagcgcaagaagtatagtaagatgcctcttcgctatcctcgtatttcaaaatgcactccattactttccgttccattaggcaaaccacctatgcttgaaggtgaagattattctatgtggagtgataaaatgaggcatcacctaacctcactccacaaaagcatatgggatgttgttgagtatggagcgcaggtaccaaagaagggagacaaggattacgactcggaggaggtcgaacaaatccaacacttcaactctcaagccactactatactccttgcctctctaagtcgagaggagtataataaggtgcaagggttgaagagcgcaaaggaaatttgggacgtgctcaagaccacgcacgaaggagacgaggtgaccaagatcaccaagcgggagacgatcgagggggagctcggtcacttcatgcttcaccaaggggaggagccacaagcgatgtacaaccggctcaagaccttggtgaaccaagtgcgcaacctcgggaggaccaaatgggatgatcatgaaatggtcaaggttattcttagatcactcgttttccttaaccctacgcaagttcaaatgattcgtggtgatcctagatacacactgatgtctcccgaggaagtgataggaaagtttgtgagctttgaactaatgatcaaaggctccaaacaaatcattgagcgaggcgccacctccacacccgaggtgcaacccgtcgccttcaaagcgacagaggagaagaaggaagagtctacatcaagtaggctccccatcgacgcctccaagctcgacaatgaggagatggctttaatcatcaaaagctttcgccaaatcctcaagcaaaggaaggggagagattacaagccccgttccaagaaggtttgctacaagtgtggtaagcccggtcattttatcgctaaatgccctttgtctagtgatagtgacagggataacgacaagaagggaaagaggagagaaaagaagaggtactacaagaagaagggtggcgatgcccatgtttgccgagagtgggactccgacgagagcttgaaagggaaatgtgcccttgggccatttctaagtattttggtgatctagggactcctcttccccaacgtcggccacaagtgcctcatggcaaaggacggcaaaaggaagaaggtaaaatcaagatcctccactaaatatgaaacctctagtgatgaggatgatgctagcaatgaggaggataacttgcgcgttctttttgccaaccttaacatggaacagaaggaaaaactaaatgagctaattagtgaaatccatgaaaaggatgacctcatggactcccaagaggacttcctaatcaaaggaaattatnagcatgttaagaataaaaaagcttatgctctaaagtcgacctgcagg

SEQ ID NO: 4723 - DNA, 4810 bp, Zea mays
  Clone ID: TF_ZmC951_286
ctacttcaactcccccatcatcgacatctcaaatttctgtgtcatgatcctactaaattcttcacaagtagactcgttagtagacccaaatatgatatcatcaacataaatttggcatacaaacaaatcattgtcaagagttttagtaaataaagtaggatcggccttgccgactttgaagccattagcaataaggaaatctcttaggcattcataccatgctcttggggcttgcttgagcccataaagcgccttagagagcctatagacatggttagggtactcactgtcttcaaagccgggaggttgctcaacgtagacctcttccttgattggtccattgaggaaagcactcttcacgtccatttgataaagcttgaagccatggtaagtagcataggctaataatatgcgaattgactcaagcctagctacgggtgcataggtttcaccgaaatccaaaccttcgacttgggagtatccgttggccacaagtcgagctttgttccttgtcaccacaccatgctcatcttgcttgttgcggaagacccatttggttcctacaacattttggttaggacgtggaactaaatgccatacctcgttccttgtgaaattgttgagctcctcttgcatcgccatcacccaatccgaatcttggagtgcttcctctaccctgtgtggcttaatagaggaaacaaaagagtaatgctcacaaaaatgtgcaacacgagatttagtgcttacccccttatgaatgtcgtcgaggatggtgtcgacagggtgatctcgttggattgcttggtggactcttgggtgtggcggtcttggttcttcatcctccttgtcttgatcatttgtatctcccccttgatcattgccgtcatcttgaggtggttgagcctcatcctcaatttgagttggtggagatgcttgcgtggaggaggatggttgatcttgttcatttggaggctcttcggattccttaggacacacatccccaatggacatgttccttagcgcgatgcacggagcctcttcctcacctatctcatcaagatcaacttgctctacttgagagccgttagtttcatcaaacacaacgtcacaagaaacttcaactagtccagaggacttgttaaagactctatatgcccttgtgtttgaattatatcctagtaaaaagccttctacagtcttaggagcaaatttagatttcctacctcttttaacaagaataaaacatttgctaccaaagactctaaaatatgaaatgttgggctttttaccggttaggagttcataggatgtcttcttgaggattcgatgtagatataatcggttgatggcgtagcaggcggtgttaaccgcctcggcccaaaaccgatccggcgtcttgtactcatcaagcatggttcttgtcatgtccaatagagttcgattcttcctctccactacaccattttgttgtggggtgtagggagaagagaattcatgcttgatgccctcctcctcaaggaagccttcaatttgtgaattcttgaactccgtcccgttgtcgcttcttattttcttgatccttaagccgaactcattttgagcccgtctcaagaatccctttaaggtctcttgggtttgagatttttccgatgccggtgagcccgccacggcggtggacacgaaaccgtggcgccagagtccttccccatctccggccgccagcacgaccttgcgaaattgaacaccaccgtcgatgggatctataaattgagtgtgccacagtctccgtagggcagtaaatgcggccagctcgattccggttagctcgcgtccctctgttccttgttctagcgtcctcatgtgcccttgatgctcaccaaaccgtccaattacactagaagcccacccatcgtcaggaacatccccctccatccgcaacctgttaacgaaggcaagccccggtgcatttgccaccttccttgatgtttttaaaatctttctcacttgcttgcttgactcccacataaccagcatacccttgagagtcttttctttagtcgggtaagacttgctgagtattccatactcagggtttatcccctctaacactcccttaaatgctattgaatcatcacttcttctaaagacagtgacacctttgaccaaaccttggtttccatccccgaatgtgatagctcgttggggatcttggtttttctcgtaggaggagaacatcttcttctcccctgtcatgtggtttgtgcacccgctgtcgattatccaacttgagcccccggatgcataaaccttgccggatttgttagtaggcacatatgatgcatcaaaagttttgaatgaaatgttatgatcatttgatgcattaggagttttcttcttaggcaacttagcacgggttggttgcctagaactagatgtctcacccttatacataaaagtatggttagggccagagtgagacttcctagaatgaattctcctaattttgctctcgggataaccggcagggtacaaaatgtaaccctcgttatcctgaggcatgagagccttgcccttaacaaaattagacaatcttttaggaggggcattaagtttgacattgtctcccctttggaagccaatgccatccttgatgccagggcatctcccattatagagcatacttctagcaaatttaaatttttcattttctaagttatgctcgacaattttagcatctaatattgctatatgatcattttgttgtttaattaaagtcatttgatcatgaatagcatcaacatcaatatctctacatctagtacaaatagacacatgcttaacggtagatgtagagggtttgcaagattttaattctacaaccttagcatgtaatacatcattttcacttctaaggttagaaatagtaacatcaaaatctttggccttagcaagcaatttttcattttcaatcctaaggctagcaagagaaacattcaactcatcagtcttagcaagtaaatcaacattatcatctctaggattgggagttgaaacatcacaaacatgtgaatcaaccttagctaacaaattagcattctcatttctaaggttgtcaatggtctcctggcaagtgcttagctcacaagacaatttttcacatttttcaacttctagagcgtaagcatttttaaccttaacatgcttcttattttctttaataaggaagtcctcttgggagtctaagagatcatccttttcatgaatagcactaattagttcatttaacttttccttttgttgcatgtttaggttggcaaaaaggatgcgcaagttatcctcctcattactagcattatcctcatcactagaggtttcatatttagtggaggatcttgattttaccttcttctttttgccgtccttggccatgaggcacttgtggccgacgttggggaagaggaggcctttggtgacggcgatgttggtggcgtcctcgtcggaggaggagtcggtggagctctcctcggagtcccactcgcggcacacatgggcatcgccacccctcttcttgtagtgcttcttcttctcctttcttctccccttcttgtcgtcgcccctatcactatcactagacaatggacatttagcaatgaaatgaccgggcttaccacatttgtagcacactttcttggagcggggcttgtaatctttccccctcctttgcttgaggatttggcggaagctcttgatgatgagtgtcatttcctcgttgtcgagcttggaggcgtcgatgggtgttcgacttggagtagattcctccttcttttcttccgtcgccttgaatgcgaccggttgtgcttcggacgtggaggggtcgtcaagctcgttgatcttctttgagcctttgatcatcaactcaaagctcacaaaattacctataacttcctcgggggtcatttgagtatatcttaaccacttcgtggtcatcccactttacgctcccgaggttacgcacttggttcaccaaggtcttgagccggttgtacatatgttgtggctcctcccctttgcgaagccggaatcgaccgagctccccctcgatcgttttccgcttggtgatcttggtgagctcgtctccctcgtgcgcggttttgagcacatcccaaacctccttggcactcttcaacccttgtactttgttatactcctctctacttagtgaggcgaggagtattgttgtcgcttgagagttgaagtgctcgatttgggtcacctcatcctcatcatagtctttatcccctacggatggtacctgtgcaccaaactcaacaacatcccatatgcttttgtggagcgaggttagatgaaatcgcattaaatcgctccacctagcgtaatcttcaccatcaaaagttggtggtttgcctaatgggacggaaagtaaaggtgtatgtttggaaatgcgagggtagcgtagggggatcttactatacttcttgcgctcttggcgcttagaagtgacggatgccgcgtcggagccggatgtggatgccgatgaagaatcggtctcgtagtagaccaccttcctcattcttttcttcttgtccccactccgatgcggcttgtgggaagaagatttttccttcttatctttgtggtgagaagaagatttcttctccttccctttgttggaggagatcttcttcttctccttcctcttggtgcgggactcttccgatgaagtgctcccatggcttgtagtgggcttttcgccggtctccatctccttcttggcgtgatctcccgacat

SEQ ID NO: 4724 - DNA, 5403 bp, Zea mays
  Clone ID: TF_ZmC951_300
ctagccgttgggccattctgctgagcgcggacggtccgccctcctggtgcggacggtccgccccggacggtccgcgccagaggccggacggtccgcgcaagggctcggacggtctttgcttttcctccggacagtccatagcacagacttggatttttgcattggttctgtccgagggttattcttgtgtcgcggacggtccgccgcaagggcccggacggtccgcgcttggcctgtttttccaaaaagcttctcctgtccggaataatctacggtattccggacagtcgatttagcatagttatagatgaacttttggcacttctcccccttgttggcatgaatcgccaaaaacggaatcattagagccctcgaagtactttcttcccctgcggcaatgtactcggcttcggcggtggaaagagcgaccgaattttgcttctttgaagcccaagacaccaaggatcttcctaagaactggcaagtccccgatgtgctcttcctattgattttgcaccctcccgtgtcgaggtcgagatgcccattagttcccatgggtgtcttgatgggtttggcatccttcatcccaaacttagcaagaatgtcttgagtgtacttcgtttggctaatgaaggtgccctcttggagttgcttgacttggaatcctagaaaatacttcaactcccccatcattgacatctcgaatttctgtgtcatgatcctactaaactcttcacatgtagacttgttagtagacccaaatataatatcatcaacataaatttggcatacaaacaagtcattttcaagagttttagtaaagagtgtaggatcggccttgccgactttgaagccatttgcaataaggaaatctctaaggcattcataccatgctcttggggcttgcttgagcccataaagcgccttagagagcctataaacatggttaggatactcactgtcttcaaagccgggaggttgctcaacatagacctcttccttgattggtccgttgaggaaggcacttttcacgtccatttgatagagcttaaagccatggtaagtagcataggctaataatatgcgaattgactcaagcctagctacgggtgcataggtttcaccaaaatccaaaccttcgacttgtgaataccctttggccacgagtcgagctttgttccttgtcaccacaccatgctcatcttgcttgttgcggaagacccatttggttcctacaacattttggttaggacgtggaactaaatgccatacctcatttctagtgaagttgttgagctcctcttgcattgccaccacccaatccgaatcttgaagtgcttcttctaccttgtgtggttcaatagaggaaacaaacgagtaatgttcacaaaaatgtgcaacccgagatctagtagttacccccttatgaatatcgccgaggatggtgtcgacggggtgatctcgttgaattgcttggtggactcttgggtgtggcggtcttggttcttcctcatcctccttttcttgatcatttgcatctcccccttgatcattgccgtcatcttgaggtggctcatcttcttgattttgcccttcatcaacttgagcctcatcctcattttgagttggtggagatgcttgcgtggaggaggatggttgatcttgtgtatttgaaggctcttcggattccttaggacacacatccccgatggacatgttccttagcgcgatgcatggagcctgttcttcacctatctcatcaagatcaacttgctctacttgagagccgttagtttcatcaaacacaacgtcacaagagacttcaactagtccagtggacttgttaaagaccctatatgcccttgtgtttgagtcataaccaagtaaaaagccttcggttaggagttcatacgatgtcttcttgaggattcggtgaagatataaccggttgatggcgtagcaggcggtgttgaccgcttcggcccaaaaccggtccggtgtcttgtactcatcaagcatggttcttgccatgtccaatagagttcgattcttcctctccactacaccgttttgttgtggcgtgtagggagaagagaactcatgcttgatgccctcctcctcaaggaagctttcaatttgagagttcttgaactccgtcccattgtcgcttcttattttcttgatccttaagccgaactcattttgagcccgtctcaagaatccttttaaagtctcttgggtttgagatttttcctgtaaaaagaatacccaagtgaagcgagaataatcatccacaataactagacagtacttactcccgccgatgcttatgtaagcgatcgggccgaatagatccatgtgtaggagctccagtggcctgtcagtcgtcattatgttcttgtgtggatgatgagtgccaacttgcttccctgcttggcatgcgctacaaatcctgtctttctcaaaatgaacattggttagtcctaaaatgtgctctccctttagaagcttatgaagattcttcatcccaacatgggctagtcggcggtgccagagccaacccatgttagtcttagcaattaaacatgtgtcgagctcagctctatcaaaatctactaagtatagctgaccctctaacacacccttaaatgctattgaatcatcacttcttctaaagacagtgacacctttgaccaacccttgatttccatccccaaatgtgatagctcgttgggggtctttgtttttctcatatgaggagaacatccttttctccccggtcatgtggtttgtgcacccgctgtcgagtatccaacttgagcccccggatgcataaaccttgccagatttgctagtcaacacataagatgcatcaaaagttttaaatgaaatggcatgatcatttgatgcattaatagttttctttctaggcaacttggcatgggttggttgcctagatctagatgtctcacccttatacataaaagcataattagggccagagtgagacttcctagaatgaattttcttaatcttattctcaggatacccggcagggtacaaaatgtaaccctcgttatcctgaggcatgggagccttgcccttaacaaagttagacaagttcttaggaggggcattaattttgacattgtttcccctttgaaagccaatgccgtccttaatgcccgggcgtctcccattatagagcatgcttctagccaatttaaatttttcattttctaagtcatgctctctaattttagcattaagttgtgctatgtgatcattttgttttttaattaaggcaaggtgatcatggatagcatcgacattaatatctctacatctagtgcaaatggacacatgctcaatagtagatgtagagggtttgcaagactttaattcaataaccttagcatgcaacaaatcattcttagttctaaggtcagaaatagtagtattgcaaacatcaaaatccttagccttagcaattaatttctcattctcatttctaaggctagcgatggaagcattcaattcatcaatcctagcaagcaagtcaacatcatcatttctaggatcaatgcaaacatgagaatcaaccttagccaacaaattagcattttcatttctaaggttgtctaaaatctcatggcaagtgcttagctcactagataatttttcacatttttctctttctagagcataagcatttttaaccttaacatgtttcttgttttccttgattaggaagtcctcttgggagtccaagagatcatccttctcatggatagcactaattagctcatttaatttttctttttgttccatgttaaggttggcaaaaagaatacgcaagttatcctcctcatttttatcatcctcatcactagatgtttcatatttagtggaggactttgattttaccttctttttgccgtccttggccatgaggcacttgtggccgacgttggggaagaggaggcctttggtgacggcgatgttggcggcgtcctcgtcgtcggaggagtcgcttgagctttcgtcggagtcccactcccgacaaacatgggcatcgccgcccttcttcttgtagtacttcttcttctccttccttttgcccctcttgtcgttgtccctgtcactgtcacttgataatggacatttagcaataaagtgaccgggcttaccacatttgtagcaaaccttcttggaacgggatttgtagtccttccccttccgttgcttgaggatttgccggaagcttttgatgattagggtcatctcctcgttgtcgagcttggaggcgtcaattggttgtctacttggtgtagactcctccttcttctcctccgttgccttgaaggccacgggttgcgcctcggatgtggaaggctcatcaagctcgttgatcttcttggagcccttaatcatgcattcaaaactaacaaaattcccgatgacttcctcgggggtcatttgtgtatatctaggattgccacgaattaattgtacttgagtagggttaaggaaaataagggctctcagaataaccttaaccacttcgtggtcatcccattttgtgctcccgaggttgcgcacttggttcaccaaggtcttgagccggttgtacatgtcttgtggctcctccccttggcgaagacggaagcgaccgagctccccctcgatcgtttcccgcttggtgatcttggtgagttcatcaccctcatgcgccgtcttgagtaggtcccaaatctccttggcattcttcaacccttgtactttgttgtattcctccttgcttaaagaggcaaggagaatggttgtggcttgggagttgaagtgctcgatttgggccacttcgtccgtgtcgtagtcctcatcccctacggatggtacctgtacaccatactcaacaacatcccataatcttttgtggagggagattagatgaaattgcattaaattactccacatagcataatcttcaccattaaaagttggtggtttgcctaatgggacggaaagtaaaggtgtatgtttaggaacgcgagggtagcgtagggggatcttactatacttcttacgctcttggcgtttagaagtgacggacgccgcgtcggagccggaggtggaggtcgatgaagtgtcggtctcgtaaaagaccaccttcctcatccttttgtgcttgtccccactccgatgcggcttgtgagaagatttttccttcttctccttatggtgagaagaggaagatcttttctccttccgcttggaggatttcttcttcttctctcttctcttggtgcgggactcttccgatgaggatgaagtgctcccttggcttgtagtgggcttgtcgtcgccggtctccatctccttcttggcgtgatctcccgacat

SEQ ID NO: 4725 - DNA, 4596 bp, Zea mays
  Clone ID: TF_ZmC951_302
ctaatgcctaagtttggtaaatgtttgttcatctaatggcttggtaaagatatcggctaattgttctttggtgttaatatatgcaatctcgatatcccccttttgttggtgatcccttagaaaatgataccgaatgactatgtgtttagtgcggctatgctcaacgggattatccgccatgcggattgcactctcattatcacatagaagaggaactttggttaatttgtaaccatagtccctaagggtttgcctcatccaaagtaattgcgcgcaacaatgaccggtggcaatatactcggcttcggcggtagaaagagctacggaattttgcttctttgaagcccaagacaccagagaccttcccaagaactggcaagtccccgatgtgctctttctattaattttacaccctcccgtgtcgaggtcgagatgcccattggttcccatgggtgtcttgatgggcttggcatccttcatcccaaacttgtttagaatgtcttgaatatacttcgtttggctaatgaaggtgccctcttggagttgcttcacttcaaatcctaagaagtacttcaactcccccatcatagacatctcgaatttttgtgtcatgatcctactaaattctttacatgtagattcgttagtagacccaaaaatgatatcatcaacataaatttggcatataaacaaatcattttcaagtgttttggtaaagagtgtagaatcggcctttccgactttgaagccattagtgataagaaaatctcttagggattcataccatgctcttggggcttgtttgagcccataaagcgccttagagagtttgtaaacatggttagggtactcactatcttcaaagccgggaggttgctcaacatagacctcttccttgatcggtccattgaggaaggcacttttcacgtccatttgataaagcttaaagccatggtaagtagcataggaaagtaaaatgcgaattgactcaagcctagctacaggtgcataggtttcaccgaaattcaaaccttcgacttgtgaatatcccttggccacaagtcgggctttgttccttgtcaccacaccatgctcatcttgcttgttgcggaagacccacttggttcctacaacattttgattaggacgtggaactaaatgccatacctcattcctagtgaagttgttgagctcctcttgcatcgccaccacccaatccgaatcttgaagtgcttcctctaccttatgtggtcttgggtgtgtcggtcttgtagcttgttcatcttcctcatcttgatcatgggcatctcccccttgatcattgctctcctcttgaggtggctcaacttcttgatcttctccttcatcattttgagccttaccctcatcttgagttggtggagatgcttgtgtggaggaagatggttgatcttgtgcttgtggtggctcttcggattccttaggacacacatccccaatggacatgttccttagcgcgacgcacggagcctcttcatcatctagctcatcaagatcaacttgctctacttgagagccgttagtctcatcaaacacaatgtcacaagaaacttcaactagtccagaggacttgttaaagactctatatgcccttgtgtttgaatcatatcctagtaaaaagccttctacagccttaggagcaaatttggattttctacctcttttaacaagaataaagcatttgctaccaaagactctaaaatatgaaacatttggctttttaccggttaggagttcatatgatgtcttcttgaggattcggtgtagatataaccggttgatggcgtagcaggcagtgttgaccgcctcggcccaaaaccgatccgaagtcttgtattcatcaagcatggtccttgccatgtccaatagagttctattcttcctctccactacaccattttgttgtggcatgtagggagaagagaactcatgcttgatgccctcctcctcaaggaagccttcgatttgagagttcttgaactccgtcccgttatcgcttctaatctttttgatcctcaagccgaactcattttgagcccgtctcaagaatccctttaaggtttcttgggtatgagatttttcccaaacgattttgggtcctttgacattagatacaagaactttgggtacccaaacacaagtctttgatcccttgtgtttgcccccaacatacttggcaactattttgccggatttgttagtcaaaacatagtatgcatcaaaagttttaaatgaaatgttagaatcatttgatgcaataggagttttcttcttaggcaatttagcacgggttgattgcctagagctagatgtctcacccttatacataaaagcatgattagggccagagtgagacttcctagagtgatttctcctaattttgtgctcgggataaccggcagggttcaaaatgtaaccctcgttatcctgaggcatgggagccttgcccttaacaaagttagacaatcttttaggaggggcattaagtttgacattgtctcccttttggaagccaatgccatccttgatgccagggcatctcccactatagagcatgcttctagcaaatttaattttttcattttctaagtcatgctcattaatcttagcattgagttgagctatgtgatcatttttcttcttaattaaggctaggtgatcatgaatagcttcaacattaatgtctctacatctagtgcaaatggaaacatgctcaatggtagatgtagagggtttgcaagattttagttcaacaatcttagcatgtaaaatgtcattttcatttctaagattggaaatggtaacattgcaaacatctaagtccttagccttagcaattgattttacattctcatttctaaggctagcaagagagacattcaattcttcaatcttagcaagtaaattaacattatcatctctaatattggaaattgaatcatcacaagcatttgaatcaaccttaacatgcttcttattttccttaattaggaagtcctcttgggagtccaagagttcatccttctcatgaatagcactaattagttcatttaatttttccttttgttgcatgtttaggttggcaaaaagggtgcgcaaattatcctcctcatcgctagaattatcctcatcactagaggttgcatatttactggaggattttgattttaccttcttccttttgccgtcctcggccatgaggcacttgtggccgacgttggggaagaggagtcccttggtgatggcgatgttggcggcgtcctcgtcggaggaggagtcggaggagctctcgttggagttccactcgcggcacacatgggcatcgctgcccctcttcttgtggtacctcttcttttctctcctctttcccttcttgtcgttatccctgtcactgtcactacataatggacattttgcaataaagtgaccgggcttaccacacttgtagcacactttcttggagcgggacttgtagtccttccctctcatttgcttgaggatttggcggaagctcttgatgatgagcgccatttcctcgttgtcgagcttggaggcgtcgatgggtgttctacttgatgtagattcctccttcttctcctccgtcgccttgaatgcgaccggttgtgcttcggacgtggaggggccatcaagctcgacgattttctttgagcctttgatcatcaactcaaagctcacaaaattccctattacttcctcgggagtcattagtgtatatctaggattgccacgaattaattgaacttgagtagggttaaggaaaacaagtgatctaagaataaccttaaccattttgtggtcatcccattttttgctcccgaggttgcgcacttggttcaccaaggtcttgagctggttgtacatatcttgtggctcctccccttggcgaagtcggaagcgaccgagttccccctcgatcatctcccgcttggtgatcttggtcacctcgtctccttcgtgcgcggtctttagcacgtcccaaatttcctttgcgctcttcaacccttgcaccttattatactcctctcgacttagagaggcgaggagtatagttgtggcttgggagttgaagtgttggatttgtttgacctcctccgagtcgtaatcctcgtctcccttctttggtacctgcactccatactcaacaatatcccatatgcttttgtggagtgaggttaggtgatgcctcattttatcactccacataggataatcttcaccttcaaacataggtggtttgcctaatggaacagagagtaatggagtgcgtctagaaatgtgaggatagcgaaggggcatcttactatacttcttgcgctcctggctctttgaagtggtggaggccgattccgagccggaggtggagggtgacgaagagtcggtctcgtagtagaccaccttcctcatcttcttcttcttgtcacccatccgatgggacttgatggaggaagaggatttctccttgtgcttgtgggcggactcccttgagtgtgttcttctcgagcttgcggtcttgtcgccggtcccgagatccctcat

SEQ ID NO: 4726 - DNA, 5331 bp, Zea mays
  Clone ID: TF_ZmC951_303
tcaaaagaaattcctagaatcaagaatatttagctcatgcctaagtttgttaaaagattgttcatctagtggcttggtaaagatatcggctaattgttccttggtgttaatatatgcaatctcgatatctcccttttgttggtgatccctaagaaaatgataccgaatggctatgtgtttagtgcggctatgctcaacgggattatccgccatgcggattgcactctcattatcacatagaagaggaactttggttaatttgtaaccgtagtccctaagggtttgcctcatccaaagtagttgcgcgcaacaatgacctgcgacaatgtactcagcctcggcggtagaaagagctatggaatttttcttctttgaagcccaagacaccaaggaccttcccaagaactggcaagttcccgatgtgctctttctattgattttacaccccgcccaatcggcatccgaataaccaattaaatcaaatgtggatccccgagggtaccaaagcccaaacttaggagtatgaactaagtatctcaagattcgttttacggccataaggtgagcttccttagggtcggcttggaatcttgcacacatgcatacggaaagcataatatccggtcgagatgcacataaatagagtaaagaaccaatcatcgaccgatataccttttgatcgacggatttaccttccgtgtcgaggtcgagatgcccattggttcccatgggtgtcttgatgggcttggcatccttcatcccaaacttgtttagaatgtcttgaatatacttcgtttggctaatgaaggtgccctcttggagttgcttcaattgaaatcctaggaagtacttcaactcccccatcattgacatctcgaatttctgtgtcatgatcctactaaattcctcacatgtagattcgttagtagacccaaatataatatcatcaacataaatttggcatacaaacaaatcattgttaagagttttagtgaatataataggatcggcttttccaactttgaatccattagtgataagaaaatctcttaggcattcataccatgctcttggggcttgcttgagcccataaagcgccttagagagtttatatacatggttagggtactcactatctttaaagccgggaggttgctctacatagacctcttccttgattggtccgttgaggaaggcactcttcacgtccatttgataaagcttgaagccatggtaagtagcataggccaataatatacgaattgactcaagcctagctacgagtgcataggtttcaccgaaatccaaaccttcgacttgtgaataccccttggccacaagtcgggctttgttccttgtcaccacaccatgctcgtcttgcttgttgcggaacacccactttgttcctacaacattttgattaggacgtgggaccaaatgccatacctcgttcctagtgaagttgttgagctcctcttgcatcgccaccacccaatccgagtcttgtagtgcttcctctaccctatgtggctcaatagaggaaacaaaatagtaatgctcacaaaaatgtgcaacacgagatctagtggttacccccttatgaatgtcgccgaggatggtgtcgacagggtgatctcgttggattgcttggtggactcttgggtgtggcggtcttggttcttcatcctccttgtcttgatcatttgcatctcccccttgatcattgtcgtcatcttgaggtggctcatctcttggatcttgtccttcatcaactttagcctcatcctcattttgagtcggtggagatgcttgcgtggaggaggatggttgatcttgtgcatttggaggctcttcgaattccttaggacacacatccccaatggacatgttcctaagttcgatgcatggagcctcttcattacctatctcatcaagatcaacttgctctacttgagagccgttagtctcaccaaacacaacgtcacaagaaacttcaactagtcctgaggacttgttaaagactctatatgcccttgtgtttgaatcatatcctagtaaaaagtcttctacagtcttaggagcaaatttagattttctacctcttttaacaagaataaagcatttgctaccaaagactctaaaatatgaaatattgggctttttaccgattaggagttcgtatgatgtcttcttgaggattcggtgtagatacaaccgattgatggcgtagcaggcggtgttgaccgcctcgacccaaaaccgatccgatgtcttgtactcatcaagcatggttcttgccatgtccaatagagttctattcttcctctgcactacaccattttgttgtggggtgtagggagaagagaactcatgcttgatgccctcctcctcaaggaagccttcgatttgtgagttcttgaactccgtcccgttgtcgcttctaattttcttgattcttaagccgaactcattttgagcccgtctcaagaatccttttaaggtttcttgggtatgagatttttcctgcaaaaagaatacccaagtgaagcgggaataatcatccacaataactagacagtacttactcccgccgatgcttatgtaggctatcgggccgaataggtccatgtgtaagagctcgagtggcctgtcagttgtcatgatgttcttatgtggatgatgaatcccaacttgtttccctgcctgacatgcgctacaaatcctgtctttctcaaaatgaacattcgttagtcccaaaatgtgttctccctttagaagcttatgaagattcttcattccaacatgtgctagccggcgatgccagagccagcccatgttagtcttagcaattaagcaagtgtcgagttcagctttatcaaaatctactaagtatagctgaccctctaacactcccttaaatgctattgaatcatcacttcttctaaagacagtgacaccttggtttccatccccgaatgtgatagctcgttgaggatcttggtttttctcataggaggagaacatattcttctcccctgtcatatggtttgtgcacccgctatcgatgatccagcttgagcccccggatgcataaacccaaactgttttgggtcctttggcattagatacaagaactttgggtacccaaacacaagtttttgatcccttgtgtttgcccccaacaaacttggcaactactttgtcggatttgttagtcaaaacataagatgcatcaaaagttttaaatgaaatgtcatgatcatttgatgcactaggagttttcttcttaggcaatttagcacgggttgattccctagaactagatgtctcacccttatacataaaagcatgattagggccagagtgagacttcctagagtgaattctcctaattttgctctcgggataaccggcagggtacaaaatgtaaccctcgttatcctgaggcatgggagccttgcccttaacaaaattagataatcttttaggaggggcattaagtttgacattgtctcccttttggaagccaatgccatccttgatgccagggcgtctcccgctatagagcatgcttctagcaaatttaaatttttcattttctaagtcatgctcattgattttagcattaagttgagctatgtgatcattttgtttcttaattaaagtggataatttttcacatttttctacttctagagcataagcattcttaaccttaacatgcttcttattttctttaataaggaagtcctcttgtgaatccaagagatcatccttatcatgaatagcactaattagttcatttagtttttccttttgttgcatgttgaggttagcaaaaagagtacgcaaattatcttcctcatcactagcattttcttcatcactagaggattcatatctagtggaggatttagatttaaccttcttatttttgctgtcctttgccatgaggcacttgtggccgacgttggggaagaggagtcccttggtgacggtgatgtttgcggcgtcctcgtcggaggaggagtcggaggagctctcgtcggagtcccattcccggcaaacatgggcatcgtcgcccttcttcttgtagtatctcttcttctcctttcttctccccttcttgtcgtcgcccctgtcactatcactagataatggacatttagcaatgaaatgaccgggcttaccacatttgtagcaaacttttttggagcggggtctgtaatcctcccccctcctttgcttgaggatttgacggaagctcttgatgatgagcgccatctcctcattgtagagctttgaggcgtcgattggttgtctacttgatgtagactcctccttcttcttctccgtcgctttgaatgcaaccggttgtgcctcggacgtggaggggccatcaagctcgttgatcttctttgagcctttgatcatcaattcaaagctcacaaaattcccgattacttcctcgggagtcattagtgtatatctaggattgccacgaattaattgaacttgagtagggttaaggaaaacaagtgatcttagaataaccttaaccatttcgtggtcatcccattttttgctcccgaggttgcgcacttggttcaccaaggttttgagccggttgtacatgtcttgtggctcctccccttggcgaagtcgaaagcgaccgagctcccccttgatcgtttcccgcttggtgattttggtcacctcgtctccttcgtgcgcggtctttagcgtgtcccaaatctccttagcacgtttcaacccttgcaccttattatactcctctcgacttagagaggcgaggagtatagttgtggcttgggcgttgaagtgttggatttgggccacttcgtcctcatcataatcttcatcccctacggatggtacctgtacaccaaactcaataacatcccatatacttttgtggagtgaggttaggtgatatcgcatcaaatcactccacctagcataatcttcaccatcaaacgttggtggtttgcccaatgggacggaaagtaaaggtgtatgtttaggaaagcgaggatagcgtagggggatcttactaaacttcttgcgctcatggcgcttagaagtgacggacggcgtgtcggagccggaggtggatggcgacgaggagtcggtctcgtagtagaccaccttcctcatcttcttcttcttgtcaccgctccgatgcgacttgtgtgaaggggattccttctccttccccttgttgcaggactctcctgatggagctttctcatggcttgtagcgggcttctcgccggtcaccatctccttcttggtgtgatctcccgacat

SEQ ID NO: 4727 - DNA, 3648 bp, Zea mays
  Clone ID: TF_ZmC951_320
ttaggcattcataccatgctcttggggcttgcttgagaccataaagcgccttaagagtttatagacgtgattagggtactcactatcttcaaagctgggaggttgctcaacatagacctcttccttgattggtccattgaggaaggcactcttcacgtccatttgataaagcttgaagccatggtaagtagcataggcaagtaatatacgaattgactccagcctagctacgggtgcataggtttcaccgaaatccaaaccttcgacttgtgaataccccttggccacaagtcgggctttgttccttgtcaccacaccatgctcatcttgcttgttgcggaagacccacttggttccctcatcatcttccttgtcttgatcattagcatctcccctttgatcattgtcctcctcttgaggtggctcctcttgatcttcatcatcattatcttgatcttgatcctcatcttgagttggtggagatgcttgcattggggaagatggttgatcttgtgcttgtggaggctcttcggatttcttaggacacacatccccaatggacatgttccttagcgcgatgcacagagcctcttcatcatctagctcatcaagatcaacttgctctacttgagagccgttagtctcatcaaacacaatgtcacaagaaacttcaactagtccagtggacttgttaaagactctatatgcccttgtgtttgaatcatatcctagtaaaaggccttctacagccttaggagcaaatttagattttctacctcttttgacaagaataaagcatttgctaccaaagactctaaaatatgaaacattgggctttttaccgatgaggagttcatacaatgtcttcttgaggattcggtgaagatataaccggttgatggcgtagcaagcggtgttgaccgcctcggcccaaaaccgatccgaagtcttgtactcatcaagcatggtccttgccatgtccaatagagttctattcttcctctccaccgtctcaagaatccctttaaggtctcttgagtttgagatttttctcccgccgatgcttatgtaagctatcgggccgaataggtccatgtggagtagctcaagtggcctgtcggtcgtcatgatgttcttgtatggatgatgaacaccaacttgctttcctgcttgacatgcactacgtaccctgtctttctcaaaatgaacattggttagtcccaaaatgtgctctccctttagaagcttatgaagattcttcatcccaacatgggctagtcggcggtgccagagccaacccatgttagtcttagcaattaagaaagtgtcgagttcagctctatcaaaatctactaagtatagctgaccctctagcactcccttaaatgctactgaatcatcacttcttctaaagacagtaacaccttgatttccatccacgaatgtgatagctctttggggatcatggtttttctcgtaggaggagaacatcttcttctcccctgtcatgtggtttgtgcacccgcccttgtgtttgcccccaacatatttggcaactactttgcctgatttgttagttagcacataagatgcatcaaaagtcttgaatgaaatgttatgatcatttgatgcaataggagttttcttcttaggcaatttagcatgagtagattgcctagaactagatgtctcactcttatatataaaagcatgattagggccagagtgagacttcctagagtgaattctcctaattttgtgctcgggataaccgatagggtataaaatgtaaccctcgttatcctgaggcatgggagctttgcccttaacaaagttggacaatcttttaggaggggcattaagcttgacattgtctccctgttggaagccaatgccatccgtaatgccagggcgtctcccactataaagcatgctacgagcaaatttaaatttctcattttctagttcatgctcgacaattttagcatctagtttagctatatgatcattttgttgtttaatcatagcaaggtgaccatgaatagcatcaatgttaatatctctacatctagtacaaatagagacatgatctatgctagatgtagagggtttgcaatcatttaattcaacaatcttagcatgtaaaatagcattctcatctctaagattggaaatagaagcattgcacacatctaagtctttagccttagcagttaatttatcattctcaattctaaggctagcaagagaggcattcaatttttcaatcttagcaattgaactagcattatcatttctaagattgtcaattgaatcatcacaaacatttgatttctcaaccttagcaattaatttggcattttcatttctaaggttggaaataacatcatggcaagtgcttagctcactagataaattttcacatttttctaccttcttcttcttaccgttctttgccatgaggcacttgtggccgacgttggggaagaggaggcctttggtgacggcgatgttggcggcatcctcgtcggaggaggagtaggtggagctctcatcggagtcccactctcggcatacatgggcatcgtcacccttcttcttgtagtacttcttcttttccttcctccttcccttcttgtcgtcgcccctgtcactatcacttgataatggacatttagcaataaaatgaccgggcttaccacacttgtagcacactttcttgaagcgagatttataatccttccccctcctttgcttgaggatttggcggaagctcttgatgatgagcgccatttcctcgttgtcgagcttggaggcatcgatggggagcctacttgacatagactcttctttcttctcctccgtcgctttgaatgcgacgggttgcacctcgggtgtggaggtgccgccttgctcgacgatttgtttggagcctttgatcatcaattcaaagctcacaaactttcctatcacttcctcgggagacattagcttatatctaggatcaccacgaattaattgaacttgcataggattacgaaaaacgagtgatcttagaataaccttgaccatttcatggtcatcccattttgtgctcccgaggttgcgcacttgattcaccaaggtcttgaggcggttgtacatggcttgtggctcctctccttggttgaggatgaatcgaccgagcttcccctcgatcgtctcccgcttggtgatcttggtcacctcatctccctcgtgcacggtcttgagcacgtcccaaatctccttggcacttttcaacccttgcaccttattatactcctctcgacttagagaggcaaggagtatagtggtggcttgggagtcaaaatgccgaatttgggcaacctcgtccgaatcatatgcttcatccctaaacttcttgcgctcatggcgcttagaagtgacggacggagtgtcggagccggaggtggatggcgacgaggaatcggtctcgtagtagaccaccttcttcatcttctttttcttgtcgccactccgatgcgacttggtatgtgaaggggctcccttcattttgttgtcggactcccctgatggagctttcccgtggattgtagacttgtcatcgccggtcatgatctccttcttggcgtgttctcccgacat

SEQ ID NO: 4728 - DNA, 3699 bp, Zea mays
  Clone ID: TF_ZmC951_356
tcacggggtgatctctttgtattgcttggtggactcttgggtgtggcggttttggaacttgttcatcttccttatcttgatcatgggcatctccccttgatcattgctctcctcttgaggtggcttaactccttgatcttctccttcatcattttgagcctcatcctcatcatttgttggtggagctgcttgcatggaggaagatggttgatcttgtgcttgtggaggctcttcggattccttaggacatacatccccaatggacatgttccttagtgcgacgcacaaagcctcttcatcatctagctcattaagatcaacttgctctacttgagagccgttagtctcatcaaacacaatgtcacaagaaacttcaactagtccagaggacttgttaaagactctatatgcccttgtgtttgaatcatatcctagtaaaaagccttctacagccttaggagcaaatttagattttctacctcttttaacaagaataaagcatttgctaccaaagactctaaaatatgaaacattgggctttttaccggttaggagttcgtatgatgtcttcttgaggattcggtgtagatacaaccggttgatggcgtagcacgcggtgttgactgccttcgcccaaaaccaattcgaagtcttgtactcatcaagcatggtccttgccatgtccaatagagttctattcttcctctccactacaccattttgttgtggcgtgtagggagaagagaactcatgcttgatgccctcctcctcaaggaagccttcgatttgtgagttcttgaacctcggtcccgtggcgctccttatttcttgatctccgccgatgcttatgtaagctatcgggccgattgatagatccatgtgtaggagctcgagtggcctgtcagtcgtcatgatgttcttatgtggatgatgaacaccaacttgcttccctgcctgacatgcgctacaaaccctgtctttctcaaaatgaacatttgttagtcccaaaatgtgttctccctttagaagcttgtgaagattcttcattccaacatgtgctagtcggcgatgccagagccagcctatgttagtcttagcaatcaagcaagtgtcgagttcagctctatcaaaatctactaagtatagctgaccctctaacactcccttaaatgctattgaatcatcacttcttctaaagacggtaacacctatatccgtaaaaaggtagttgtaacccattttacataattgagaaacggaaagcaaattgtaatctaaagaatcttgattcccatccctgaatgtgatagcttgttggggatcttggtttttctcgtaggaggagaacatcttcttctcccctgtcatgtggtttgtgcacccactatcgatgatccaacttgagcccccggatgcataaacccaaacgattttgggtcctttgacattagatacaagaactttgggtacccaaacacaagtctttgaccccttgtgcttgcccccaacatacttggcaactactttgccggatttgttagtcaaaacataagatgcatcaaaagttttaaatgaaatgttaaaatcatttgatgcaataggagttttcttcttaggcaattttgcacgggttgattgcctagagctagatgtctcacccttatacataaaagcatgattagggccagagtgagacttcctagagtgaattctcctaatcttatgctcgggataaccggcagggtacaaaatgtaaccctcgttatcctgaggcatgggagccttgcccttaacaaaattagacaatcttttaggaggggcattaagttttacattgtctcccttttggaagccaatgccatccttgatgccagggtgtctcccactatagagcatgcttctagcaaatttaaaattttcattttctaagtcatgctcattaattttggcattaagttgagctatgtgattattttgtttcttaattaaagctaggtgatcatgaatagcatcaacattaatgtctctacatctagtgcaaatggaaacatgttcaacggtagatgtagagggtttgcaagattttagttcaacaatcttagcatgtaaaatgtcattttcacttctaagatttgaaactgtaacattgcaaacatctaagtccttagccttagcaatcaatttttcatactcgtttctaaggctagcaagagagacattcaattcttcaatcttagcaagtaaactaacattatcatctctaagattgggaattgaatcatcacaaacatttgaatcaaccttagcaattaatctagcattctcatttctaaggttggcaattatatcatggcaagtgcttagctcactagatagtttttcacatttttctacttctagagcgtaagcatttttaaccttaacatgcttcttgttttccttaattaggaagtcctcttgggagtccaagagttcatccttctcatgaatagcactaattaattcatttaacttttctttttgttgcatgtttaggttggcaaaaagggtacgcaaattatcctcatcatcactagaattagcctcatcgctagatgtcgcatatttagtggaggatttagatttaaccttcttctttttgccgtcctttgccatgagacacttgtggccgacgttggggaagagaagacccttggtgacggcgatgtttgcggcgtcctcgtaggaggaggagtcggtggaactctcgtcggagtcccactcccggcaaacatgggcatcgccgcccttcttcttgtagtacctcttcttctcctttcttctccccttcttgtcgtcgcccctgtcactgtcactagatagtggacattttgcaataaaatgaccgggcttaccacacttgtaacaaactttcttggagcggggcttgtaatccttccccctcctttgcttgaggatttggcggaagctcttgatgatgagcgccatttcctcattgtcgagcttggaggcatcgatggggattctacttggagtagaatcttctttcttctcctccgttgctttgaatgcaacaggttgtgcttcgggcgtggaggagtcgccttgctctaagtcgacgatgtgtttggagcctttgatcattagttcaaagctcacaaacttcccaatcacctcctcgagagacattagcttatatctaggatcaccatgtattaattgaacttgagtaggattacgaaatacgagggatcttagaataaccttgaccatctcatggtcatcccattttgtgctctcgaggttgcgcacttggttgaccaaggtcttgagccggttgtacattgcttgtggctcctctccttggttgaggacgaatcgaccgagctccccctcgatcgtctcccgcttggtgatcttggtcacctcattccttcgtgcgcggttatacttcttgcgctcatggcgcttagaagtgacggacaccgcgtcggagccggatgtggagggcgacaaagagtcggtcttgtagtagaccactttcttcatcttcttcttcttgtcgccactccgaagcgacttgacgcggggaggggattcctccttgcctttggcgccggactcccttgataaagccttcccgtggcttatggccttctcgccggtttccatctccctcttggcggatcctcccgacat

SEQ ID NO: 4729 - DNA, 4419 bp, Zea mays
  Clone ID: TF_ZmC951_357
tcaaaagaaattccgagaatcaagaatatttagctcatgcctaagtttgttaaatgtttgttcatctagtggcttggtaaagatatcggctaattgttctttggtgttaatatatgcaatctcgatatcccccttttgttggcgatcccttaagaaatgataccgaatggctatgtgtttagtgtggctatgttcaacgggattatccgccatgcggattgcactctcattatcacatagaagaggaactttggttaatttgtaaccatagtccctaagggtttgcctcatccaaagcaattgcgcgcaacaatggcctacggcaatatactcggcttcggcggtagaaagagctacagaattttgcttctttgaagcccaagacaccagagaccttcccaagaactggcaagtccccgatgtgctctttctattaattttacaccctcccgtgtcgaggtcgagatgcccattggttcccatgggtgtcttgatgggcttggcatccttcatcccaaacttgtttagaatgtcttgaatatacttcgtttggctaatgaaggtgccctcttggagttgcttcacttgaaatcctaagaagtacttcaactcccccatcatagacatctcgattttttgtgtcatgatccatgctcttagggcttgtttgagcccataaagcgccttagagagtttgtaaacatagttagggtactcactatcttcaaagccgggaggttgctcaacatagacctcctccttgattggtccattgaggaagacacttttcacgtccatttggtaaagcttaaagccatggtaagtagcataggcaagtaatatgcgaattgactcaagcctagctcccccttgatcattgctctcctcttgaggtggctcctcttcttgatcttctccttcatcattctgagcctcatcctcatcttgagtcggtggagatgcttgcatggaggaagatggttgatcttgtgcttgtggaggctcttcggattccttaggacacacatccctaatggatatgttccttagcgcgacacacggagcctcttcatcatctagctcatcaagatcaacttgctctacttgagagccgttagtctcatcaaacacaatgtcacaagaaacttcaactagtccagaggacttgttaaagactctatatgcccttgtgtttgaatcatatcctagtaaaaaaccttctacagccttaggaacaaatttggattttctacctcttttgacaagaataaagcatttgctaccaaagactctaaaatatgaaacattggtctttttaccggttaggagttcatatgatgtcttcttgaagattcggtgtagatacaaccggttgatggcgtagcaagcggtgttgaccgcctcggcccaaaaccgatccgaggtcttgtactcatcaagcatggtccttgccatgtccaatagagttctattcttcctctccactacaccattttgttgtggtgtgtagggagaagagaactcatgcctgatgccctcctcctcaaggaagccttcgatttgtgagttcttgaactccgttctgttgtcgcttctaatctttttgatcctcaagccgaactcattttgagtccgtctcaagaatccctttaaggtctcttgggtatgagatttttccaagtatagctgaccctctaacactcccttaaatgctactgaatcatcacttcttctaaagacagtaacaccttgattcccatccccgaatgtgatagctcgttggggatcttggtttttctcgtaggaggagaacatcttcttctctcctgtcatatggtttgtgcacccactatcgatgatccaacttgagcccccagatgcataaacccaaacacaagtctttgaccccttgtgcttgctcccaacatacttggcaactactttgccggatttgttagtcaaaacataagatgcatcaaaagccttaaatgaaatgttagaatcgtttgatgcaataggagttttcttcttatgcaattttgcacgggttgattgcctagagctagatgtctcacccttatacataaaagcatgattagggccagagtgagacttcctagagtgaattctcctaattttgtgctcgggataaccggcagggtacaaaatgtaaccctcgttatcctgaggcatgagagccttgcccttaacaaagttagacaatcttttaggaggggcattaagtttgacattgtctcccttttggaagccaatgccatccttgatgccagggcgtctcccactatagagcatacttctagcaaatttaaatttttcattttctaagtcatgctcattaattttggcattaagttgggctatgtgatcattttgtttcttaattaaagctaggtgatcatgaatagcatcaacattaatgtctctacatctagtgcaaatagaaacatgctcaacggtagatgtagagggtttgcaagattttagttcaacaatcttagcatgtaaaatatcattttcacttctaagattggaaatggtaatattgcaaacatctaagtctctagccttagcaattaatttttcattctcaattttaaggctagcaagagagacatttaattcttcaatcttagcaagtaaactaacattatcatctctatgattgggaattaaatcatcacaaacatttgaatcaaccttagcaattaatttatcattctcatttctaaggttggcaataatatcatggcacatgcttagctcattagataatttttcacatttgtctacctctagagcataagcattcttaaccttaacatgcttcttattttccttaattaggaagtcctcttgggtgtccaagagttcatccttctcatgaatagcactaattaattcatttaatttttctttttgttgcatgtttaggttggcaaaaagggtgcgcaaattatcctcctcatcactagaattatcttcatcacttcttccttttgccgtcctttgccatgaggcacttgtggccgacgttggggaagaggaggcccttagtgacgggctgacggcgatgttggcggcatcctcgttggaggaggagtcggtggagctctcgtcggagtcccacttacggcacacatgggcatcgccacccttcttcttgtggaacctcttcttttctctcctccttcccttcttgtcgtcgcccctgtcactgtcacttgataatggacattttgcaataaagtgaccgggcttaccacacttgtagcacactttattggagcgagatttgtagtcctttctccacctttgcttgaggatttggcgaaagctcttgatgatgagcgccatctcctcattgtcgagcttggaggcgtcgatgggtagtctacttgatgtagactcctccttcttctccttcgtcaccttgaatgcgaccggttgtgcttcgggcgtggaggggccatcttgctcgatgattttctttgagcctttgatcatcaactcaaagctcacaaattttcctattacttcctcgggagacattagtgtgtatctaggatcaccacgtattaattgtacttgcgtagggttaagaaaaacgagtgatctaagaataaccttgaccatttcatggtcatcccattttttgctcccgaggttgcgcacttggttcaccaaggtcttgagccggttgtacatctcttgtggcttctccccttggcgaagccggaagcgactgagctccccctcgatcgtctcccgcttggtgatcttggtcacctcgtctccttcgtgcgtggtcttgagtacgtcccaaatctccttggcgctctttaatccttgcaccttgttatactcctctcgacttagagaggtgaggagtatagtggtggcttgggagttgaagtgcacgatttgggccacctcgtcctcatcataatcttcatccccgacggatggtacctgtacaccaaactcaacaacatcccatatgcttttgtggagtgaggttaggtgatatctcatcatatcactccacctagaataatcttcaccgtcaaacgtcggtggtttgcctaatgggacggaaagtaatggagtatgcttaggaatgcaaggatagcgtagggggatcttattatacttcttgcgctcttggcgcttagaagtgacggacgcggcgtcggatccggatgtagagggcgaggaagagtcggtctcgtagtagaccactttcttcattttcttcttctcgccactcttgtgtgatcgaatgcgtgaaggggatccatccttcttgttgttggcggactcccttgatggagccttcccgtggcttgtagcggacttctcaccgccgatcaccatcttcttggcgtgatctcccgacat

SEQ ID NO: 4730 - DNA, 4806 bp, Zea mays
  Clone ID: TF_ZmC951_361
tcaatcaaagttcctagaatcaagaatatttagctcatgcctaagtttggtaaaagttttctcatctagtggcttggtaaagatatcggctaattgttctttggtgttaatgtaagcaatctcgatatctccccattgttggtgatccctcaaaaagtgataccgaatggctatgtgtttagtgtggctatgttcaacgggattatccaccatgcggattgcactctcattatcacatagaagaggaactttggttaatttgtaaccatagttcctaagggtttgcctcatccatatcaattgcgcgcaacaatggcctgcggcaatatactcggcttcggcggtagaaagagctacagaattttgcttcttagaagtccaagacaccagggatcttcccaagaactggcaagtccctgatgtgctctttctatcaattttacaccctgcccaatcagcatcggaatatccaattaaatcaaaagtggatcccttggggtaccaaaggccaaacttatgagtataaactaaatatctcaagattcgttttacggccctaaggccattagttcccatgggtgtcttgatgggcttggcatccttcatcccaaacttggtgagtatgtcttgaatgtacttcatttggctaatgaaggtgccctcttggagttgcttcacttgaaatcctaagaaatacttcaactcccccatcatagacatcttgaatttttgaatcatgatcctacatgctcttggggcttgcttgagcccataaagcgccttagagagtttgtaaacatggttaggatactcactatcttcaaagccgggaggttgctcaacatagacctcttccttgattggtccattgaggaaggcactcttcacgtccatttgataaagcttgaagccatggtaagtagcatgggcaagtaatatacgaattgactcaagcctagctacgggtgcataggtttcaccgaaatccaaaccttcgacttgtgagtatcccttggccacaagtcgggctttgttccttatcaccacaccatgctcatcttgtttgttgcggaagacccactcattcctcgtgaagttgttgagctcctcttgcattgccaacacccaatctgaatcccttaatgcatcttctatcttgtatggctcaatagaagacacaaaggagtaatgttcgcaaaaatgagcaacacgagatcgattggttatccccttttgaatatcgtcgaggatggtgttcacggggtgatctcgttgtattgcttggtggactcttgggtgtggcggtcttagaccgtcatcatcttccttgtcttgatcatgggcatctccccctagatcattgtccccttcttgaggtggctcatcctcttgatcttcattttcatcctcttgagcttgatcctcatcttgagttggtggagatgcttgcatggaggaagatggttgatcttgtgcttgtggaggctcttcgaattccttaggacacacatcccctatggacatgttccttagagcgacgcacggagcctcttcatcatctagctcatcaagatcaacttgctctacttgagagccgctagtctcatcaaacacaatgtcacaagaaacttcaactagtccagtggacttgttaaagactctatatgcccttgtgtttgaatcatatcctagtaaaaagccttctacagccttaggagcaaatttagattttcttccagttaggagttcatacgatgtcttcttgacgatttggtggaggtagaggcggttgatggcgtagcaagcggtgttgattgcttccacccaaaaccggtctgatgtcttgtattcatcaagcatggtcctcgccatgtcaagtagagttctattcttcctctccactacaccattttgttgtggcgtgtagggagaagagaactcatgcttgatgccctcatcctcaaggaagccttcaatttgagagttcttgaactccgtcccgttgtcgcttctaatctttttgatcctcaagccgaactcattttgagcccgtctcaagaatccctttatggtctcttgggtttgtgatttttcttgaaaaaagaacacccaagtgaagcgagaataatcttccacaattacaagacaatacttactcccgtcgatgcttatgtaagcgatcgggccgaataggtccatgtggagtagctcaagcgacctgtcggtcgtcatgatgttcttgtgtggatgatgaacaccaacttgcttccctgcctgacatgcgctacaaaccctgtctttctcaaaatgaacattggttagtcccaaaatgtgctctccctttagaagcttatgaagattcttcatcccaacatgggctagtcggcggtgccaaagccaacccatgttagtcttagcaattaagcaagtgtcgagttcagctctatcaaaatctactaagtatagctgaccctctaacactcccttaaatgctactgaatcatcacttcttctaaagacagtaacaccttgatttccatccccgaatgtgatagctcgttgggggtcatggtttttctcgtaggaggagaacattcttttctccccagtcatgtggtttgtgcacccgctatcgatgatccaacttgagcccccggatgcataaaccatgggagctttgcccttaacaaagttgggcaatttcttgggggcattaagtttgacattgtctccttgttggaagccaatgccatccttaatgcctgggcgtctcccactatggagcatgcttctagcaaatttaaatttttcattttctaagtcatgctcattatttttagcactaagttgagctatgtgatcattttgtttcttaattaaagctaggtgatcatgaatagcatcaacattaatgtctctacatctagtgcaaatggtgacatgctcaacggtagatgtagagggtttgcaagtatttaattcaacaatcttagcatgtaaaatggcattctcatctctaagattggaaatagaaacattgcaaacatttaaatctttatccttagcaattaatttttcattctcaattttaaggctatagagtgatgcatttaacttgtcaatcttagtaattagactaggattatcatttctaagattaacaagagaatcatcacaaacatttaaattctcaaccttagcaattaatttagcattctcatttctaaggttggaaataacatcatggcaagtgcttagctcactagttattttttcacatttttctacctctagagcataagcatttttaaccttaacatgcttcttgttttctttaattaggaagtcctcttggctatccaagagttcatccttatcatgaatagcactaattaattcatttaatttttccttttgttgcatgtttaggttggcaaaaagtgtaagtaaatcatcctcatcatcactagagctagcctcatcactagatgttgcatacttagtggaggatctagattttaccttcttcttgccgtcttttgccatgaggcacttgtggacgacgtttgggaagagaagacccttggtgacggcgatgtttgcggcatcctcgtcggaggaggagtcggtggagctctcctcggagtcccactcccggcaaacatgggcatcgccgcccttattcttgtagtatctcttcttttctcttctctttcccttcttgtcgtcgtccctgtcactatcactagataatggacatttagcaatgaaatgaccgggcttaccacacttgtagcacaccttcttggaacggggcttgtaatctctccccttcctttgcttgaagatttggcgaaagcttttgatgattaaagccatctcctcgttgtcgagcttggaggcgtcgatgggaagcctacttggtgtagactcttccttcttctcctccgtcgctttgaagacgacgggttgcacctcgggtgtggaggtggcgccttgctcgatgatttgtttggagcctttgatcattagttcaaagctcacaaactttcttatcgcttcctcgggagacattagtttatatcttggatcaccacgaattaattgtacttgagtagggttaagaaaaacaagtgatctaagaataaccttgaccatttcatggtcatcccatttggtgctcccgaggttgcgcacttggttcaccaaggtctcgtctccttcgtgcgcagacttgagcacgtcccaaatctcctttgcactcttcaacccttgcaccttattatactcctctcgacttagagaggcgaggagtatagtagtggcttgggagttgaagtgttggatttgttcgacctcctccaaatcataatccttgtcccccttctttggtacctgcgctccatactcaacgatatcccatatgcttttatggagtgaggttaggtgatgcctcattttatcactccacatagaataatcttcaccttcaaacataggtggtttgactaatgggacggaaagtaatggagtgcgttttgaaatgcgaggatagcgaaggggcatcttactatacttcttgcgctcatggcgcttagaagtggtggatgccgattccgagacggaggtggagggtgacgaagagtcggtctcgtaatagaccaccttcttcatcttcttcttcttgtcacccttccgttgggacttgatggaggaagaggattcctccttgtgcttgtgggcggactcccttgagtatgttctccctgagcttgcggacttgttgccggtcccgatctccctcat

SEQ ID NO: 4731 - DNA, 3087 bp, Zea mays
  Clone ID: TF_ZmC951_387
ttaagttggtggagattcttgcatggaggaagatggttgatcttgtgcatttggaggttcttcggattccttaggacatacatccccaatggacatgttccttagcgcgacgcacaaagcctcttcatcacctatctcatcaacatcaacttgctctacttgagagccgttagtctcatcaaacacaatgtcacaagaaacttcaactagtctagaggacttgttaaagactctatatgcccttgtgtttgaatcatatcctagtaaaaagtcttctacagccttaggagcaaatttggattttctacctcttttaacaagaataaagcatttgctaccaaagactctaaaatatgagacattgggctttttaccggttaggagttcatatgatgtcttcttgaggattcggtgtagatacaaccggttgatggcgtagcaagcggtgttgaccgcctctgcccaaaaccgatctgaagtcttgtactcatcaagcatggtccttgccatgtccaatagagttctattcttcctctccactacaccattttgttgtggcgtgtagggagaagagaactcatgcttgatgccctcctcctcaagaaagccttcgatttgagagttcttgaactccgtcccgttgtcgcttctaattttcttgatccttaagccgaactcattttgagctcgtctcaagaatccctttaaggtctcttgggtatgagatttttccttggcggatttgttagtcaaaacataggatgcatcaaaagttttaaatgaaatgttagaatcatttgatgcaataggagttttcttcttaggcaattttgcacgggttgattgcctagagctagatgtctcacccttatacataaaagcatgactagggccagagtgagactttctagaatgaattctcctaatgttgtgctcgggataaccgacagggtacaaaatgtaaccctcgttatcctgaggcatgggagccttgcccttaacaaagttagataatcttttaggagggacattaagtttgacattgtctcctttttggaagccaatgtcatcgttgatgccagggcatctcccactatagagcatgcttctagcaaatttgaatttttcattttctaagtcatgctcatttattttggcattaaattgagctatgtgatcattttgtttcttaattaaatctaggtgatcatggatagcatcaacattaatgtctctacatctagtgcaaatagaaacatgctcaacggtagatgtagagggtttgcaagattttagttcaacaatcttaacatgtaaaatgtcattttcacttctaagattggaaattgtaacattgcaaacatctaggtctttagccttagcaatcaaattttcattttcatttctaagcctaataagagaatcattcaatttttcaatcctagcaagcaaattagcattatcatctctaaaattggaaattgaatcatcacatacatttgaatcaaccttagctattaaactagcattctcatttctaaggttggtaataatatcatggcacttgcttagctcactagatattttttcacatttttgtacttctagagcataagcatccttaaccttaacatgcttcttattttccttaattaggaagtcctcttgggagtccaagagttcatccttctcatgaatagcactaattaattcatttaatttttctttttgttgcatgttaaggttggcaaaaagaatacacaaattatcttcctcatcactaaaatgatattcatcactagaggatgcatatttagtggaggatcttgattttaccttctttcttttgccgtcctttgccatgaggcacttgtggtcgacgttggggaagaggagtcccttggtgacagcgatgtgggcggcgtcctcgtcggaggaggagtcgaaggagctctcttcggagtcccactcgcggcacacatgggcatcaccgcccttcttcttgtagtacctcttcttttctctcctcttgcctttcttgtcgtcgcccctgtcactgtcactagatagtggacattttgcaataaaatgaccgggcttaccacacttgtagcaaactttcttggagcggggcttgtaatccttccccctcctttgcttgaggatttggcagaagctcttgatgatgagcgtcatttcctcgttgtcgagcttggaggcgtcgatgggtagtctacttgaggtagactcctccttcttctcctctgttgccttgaatgcgacgggttgcacctcgagtgtggaggcgccaccttgctccaagttgatgatttgtttgaagcctttgatcatcaattcaaagctcacaaactttcctataacctcctcgggagacattagcttgtatctaggatcaccacgtattaattgaacttgagtaggattacgaaatacgagtgatctaagaataaccttgaccatttcatggtcatcccacttggtgctcctgaggttgcgcacttggttcaccaaggtcttgagccggttgtacattgcttgtggcttctctccttcgttgaggatgaatcgaccgagctccccctcgatcgtctcccgcttggtgatcttggtcacctcgtctccttcgtgcgcggtcttgagcacgtcccaaatctccttggcgctcttcaacccttgcactttgttatactcctgcgctccaaattcaacaatgtcccatatacttgcgtggagtgacgttaggtgatgtctcattttgtcactccacatacaataatcctcaccatcaaagaatggtggtttgctatacttattgcgctcatggcgcttagaagtgacggacgacgcgtcggagccagatgtagaaggtgatgatgaatcggtctcgtagtagaccaccttcctcatcttctttttcttgtcgccactccgatgtgatttgtgggaagaggctttcttctccttccccttttcctttttgcgggactcctccgatgaagctttcccgtggcttgtagcgggcttgtcgccggtctccatctccttcttggcgtgatctcccgacat

SEQ ID NO: 4732 - DNA, 7735 bp, Zea mays
  Clone ID: TF_ZmC951_391
ctagtggttaccccctttatgaatgtcgccgaggatggtgtcggcggggtgatctcgttggattgcttggtggactcttgggtgtggcggtcttggttcttcatcctccttgtcttgatcatttgcatctcccccttgatcattgccgtcatcttgaggtggctcatttgcttgatcttctacttcatcaacttgagcttcatcctcattttgagtcggtggagatgctggcgtggaggaggatggtttatcttgtgcatttggaggctcttcggattccttaggacacacatccccaatggacatgttccttagcgcgatgcatggagcctcttcaacacctatctcatcaagatcaacttgctctacttgagagccgttagtctcatcaaacacaacgtcacaagaaacttcaacttgtccagaggacttgttaaagactctatatgcctttgtgtttgaatcatatcctagtaaaaagccttctacagttttaggagcaaatttagattttctacctcttttaacaagtataaagcatttgctaccaaagactctaaaatatgaaatattgggctttttatcggttaggagttcgtatgatgtcttattgaggattcggtgtagatacaaccggttgatggcgtagcaagcggtgttgaccgcctcggcccaaaaccgatccgaagtcttgtactcatcaagcatggttcttgccatgtctaatagagttctattcttcctctccactacaccattttgttgtggcgtgtagggagaagagaactcatgcttgatgccctcctcctcaaggaaaccttcaatttgagagttcttgaactctgtcccgttgtcgcttcttattttcttgatccttaagccgaactcattttgagcccatctcaagaatccttttaaggtttcttgggtatgagatttttcccaaatggttttgggtcctttggcattagacacaagaactttggttacccaaacacaagtttttgaccccttgtgcttgcccccaacatatttggcaactaacttgccggatttgttagttaacacatatgatgcatcaaaagttttaaatgaaatgtcatgatcatttgatgcactaggagttttcttcttaggcaacttagcacgggttggttgcctagaactagatgtctcacccttatacataaaagcatggttcgggccagagtgagacttcctagaatgaattctcctaattttgttattgggataaccggcagggtataaaatgtaaccctcattatcctgaggcataggagccttgcccttaacaaagttagataatttcttaggaggggcattaagtttgacattgcctccttgttggaaaccaatgtcgtccttaatgccagggcgtctccctctataaagcatgcttctagcaaatttaaatttttcgttttctaagtcatgctcggcaattttagcatctaactttgttctaaggtcggaaattgtaacattgcaaacatctagttctttagccttagcaagcaatttttcattttcaatcctaaggctagcaagagtactagtgtttaattcttcaatcttagcaagcaaattatcattatcatttctaagattgggaattgaaacatcacaaacatttgaatcaaccttagctaacaaattagcattctcatttctaaggttgtctatagtctcatggcaagtgcgtagctcactagatagtttttcacatttttctacttctagagcataagcatttttcaccttaacatgctttttgttttctttaataaggaagtcctcttgggagtccaagagatcatccttctcatggatagcactaatcaattcatttaatttttctttttgttgcatgtttaagttggcaaaaagagtacgtaaattatcttcctcatcactagcattatcatcgctagaggactcatatctagtggaggatttggatttaaccttcttctttttgtcgtcctttgccatgaggcacttgtggccgacgttggggaagagaagtcccttggtgacggcgatgttggcggcgtcctcgtcgtcggaggagtcgctagagctttcgtcggagtcccactcgcggcatacatgagcgtcgccacccttcttcttgtagtattttttcttttcctttcttctcctcttcttgttgtcgcccctatcactgtcactagatagtggacattttgcaataaaatgaccgggcttaccacatttgtagcacactttcttggagcggggcttgtaatctttccccctcctttgcttgaggatttggcggaagcttttgatgacaagcgtcatttcctcgttgtcgagcttggaggcgtcgatgggtgttctactcggtgtagactcctccttcttctcctccgtcgccttaaatgcgactggttgtgcttcggacgtggaggggtcgtcaagctcgttgatctttcttgagcctttgatcataaactcaaagctcacaaaattcccgattacttcctcgggagtcattagtgtgtatctaggattgccacgaattaattggacttgagtagggttaaggaaaataagtgatcttaaaataaccttaaccacctcgtggtcatcccatttcttgctcccgaggttgcgcacttgattcaccaaggttttgagccggttgtacatgtcttgaggctcctctccttggcggagacggaagcgaccgagctccccctcgatcgtctcccgcttggtgatcttggttagctcatctccttcgtgcgcggtcttgagcacgtcccaaacttccttggcgctctttaatccttgcaccttgttatactcctctcgacttagagaggcgaggagtatagttgtggcttgggagttgaagtgctcgatttgggccacctcgtcctcatcataatcctcatcccctactgatagtcgcctagagggggggtgaatagggcgaaacttttgatcgacggatttacctccttcgtcgagatcgagatgcccattggttcccatgggtgtcttgatgggtttggcatccttcattccaaacttgtttagaatatcttgagtgtactttgtttggctaaggaaggtgccctcttggagttgcttcacttgaaatcctaagaaatacttgaactcccccatcatagacatctcgaacttttgtgtcatgatcctactaaattcttcacatgtagactcgttagtagacccaaatataatatcatcaacataaatttggcatacgaacaagtcattttcgagagttttagtaaataaagtaggatcggcctttccgactttgaatccattagtgataagaaaatccctaaggcattcataccatgctcttggggcttgcttgagcccataaagcgccttagagagcttataaacatggttagggtactcactatcttcaaagtcgggaggttgctcaacatagacctcttccttgattggtccattgaggaaggcacttttcacgtccatttgataaaagcttaaagccatggtaagtagcataggccaataatatacgaattgactcaagcctagctacgggtgcataggtttcaccgaaatccaaaccttcgacttgggagtatcccttggccacaagtcgagctttgttccttgtcaccacaccatgctcatcttgcttgttgcggaagacccatttggttcctacaacattttgattaggacgtggaactaaatgccatacctcattcctagtgaagttgttgagcttctcttgcatcgccaccacccaatccgaatcttgaagtgcttcctctaccctgtgtggctcaatagaggaaacaaaggagtaatgctcacaaaaatgtgcaacacgagatctagtggttacccccttatgaatgtcgccgaggatggtgtcgacggggtgatctcgttggattgcttggtggactcttgggtgtggcggcctttgttcttcatcctccttgtcttgatcatttgcatctcccccttgatcattgccgttatcttgaggtggctcatttgcttgatcttctatttcatcaacttgagcttcatcctcattttgagtcggtggagatgcttgcgtggaggaggatggttgatcttgtgcatttggaggctcttcggattccttaggacacacatccccaatggacatgttccttagcgcgatgcgtggagcctcttcattacctatctcatcaagatcaacttgctctacttgagagccgttagtctcatcaaacacaacgtcacaagaaacttcaacttgtccagaggacttgttaaagactctatatgcccttgtgtttgagtcatatcctagtaaaaagccttctactgtcttaggagcaaatttagattttctacctcttttaacaagtataaagcatttgctaccaaagactctaaaatatgaaatattgggctttttaccggttaggagttcatatgatgtcttcttgaggattcggtgtagatataaccggttgatggcgtagcaggcggtgttgaccgcctcggcccaaaactgatccgaagttttgtactcatcaagcatggttcttgtcatgtccaatagagttctattctttctctccactacaccattttgttgtggcatgtagggagaagagaactcatgcttgatgccctcctcctcaaggaagccttcgatttgagagttcttgaactccgtcccattgtcgcttcttattttcttgatccttaagccgaactcattttgagtccgtctcaagaatccctttaaggtctcttgggtttgagatttttccctgtctttctcaaaatgaacattggttagtcctaaaatgtgctctccctttagaagcttatgaagattcttcatcccaacataggctagtcggcggtgccagagccaacccatgttagtcttagcaattaagcatgtgtcgagttcagctctatcaaaatctactaagtatagctgaccctctaacacacccttaaatgctattgaatcatcacttcttctaaagacagtgacacctttgaccaatccttgatttccatccccgaatgtgatagctcgttggggatcttggtttttctcgtaggaggagaacatcttcttctcccttgtcatatggtttgtgcacctgctgtcaattatccaacttgagaccccggatgcataaaccttgccggatttgttagttaaaacatatgatgcatcaaaagttttaaatgaaatgtcatgatcatttgatgcactaggagttttctttttaggcaacttagcacgggttggttgcctagaactagatgtctcacccttatacataaaagcatggttagggccagagtgagacttcctagagtgaattctcctaattttactctcaggataaccgacagggtacaaaatgtaaccctcgttatcctgagacatgggagctttgcccttgacaaagttggacaatttcttaggaggggcattaattttgacattgccttcctgttgaaagccaatgccatccttaatgccaggacgtctccctctatagagcatgcttctagcaaatttaaaattttcattctctaagtcatgctcggcaattttagcatctaattttgctatatgatcattttgttgtttaattaaagccatgtgatcatgaatagcatcaatgttaacatctctacatctagtacaaatagaagtgtgctcaacgatagatgtagagggtttgcaagatttcaattctacaaccttagcatgcaatatatcatttttagttctaaggtcggaaattgtagcattgcaaacatctaattctttagccttagcaagcaatttttcattttcaatcctaaggctagcaagagacatgtttaattcttcaatcttagcaagcaaatcatcattatcatttctaagattgggaattgaaacattacaagcaatagaatcaaccttagctaacaaattagaattctcatttctaaggttgtctatagtctcatggcaagtgcttagctcactagataattttttacatttttcaacttctagagcataagcatttttaactttaacatgctttttgttttccttgattaggaagtcctcttgggagtccaagagatcatccttctcatggatgacactaattaactcatttaatttctctttttgttgcatgtttaagttggcaaaaagagtacgcaaattatcttcctcgtcactagcattatcatcactagaggactcatatctagtggaggatttagatttaaccttcttctttttgccgtccttcgccatgaggcacttgtggccgacgttggggaagaggagtcccttggtgacgacgatgttggcggcgtcctcgtcgtcggaggagtcgctagagctttcgtcggagtcccactcccgacaaacatgggcatcgccgcccttcttcttgtagtacctcttcttttcctttcttctcccttttttgtcgtcgcccctgtcattgtcactagaaataggacattttgctataaagtgaccgggcttaccacacttgtagcaaaccttcttggagcggggcttgtaatctttccccctcctttgcttgaggatttggcggaagcttttgatgacaagcgccattttctcgttgtcgagtttggaggcgtcgatgggtgttctactcggtgtagactccttctcttccgtcgctttgaatgcgatcggttgagcttcggacgtagaaggaccgtcaagctcgttgatcttccgtgagcccttgatcataaattcaaagctcacaaaattcccgattacttcctcgggggtcattagtgtatatcttgggttgccacgaattaattgtacttgagtagggttaaggaaaataagtgatcttaaaataaccttaaccatctcgtggtcatcccactttttgctcccgaggttgcgcacttgattcaccaaggttttgagccggttgtacatgtcttgtggctcctccccttggcgaagacggaagcgaccgagctccccctcgatcgtttcccgcttggtgatcttggtgagctcatcaccctcgtgcgcggtcttgagcacgtcccaaacttccttggctctttttaatccttgcaccttgttgtactcctccctacttaaagaggcgaggagtatggttgtagcttgggagttgaagtgctcgatttgggccacctcgtcttcatcataatcctcatcccctacagatggtacctgtgctccaaactcaacaacattccatatacttttgtggagtgaggttagatgaaatttcattaattcactccacctagcataatcttcaccgtcaaaggttggcggtttgcctaatggaacggaaagtaatggagtatgtctagaagtgcgagggtaatgtaaggggatcttactaaacttcttgcgctcatggcgcttagaagttacgaagggcgcgtcggagccggaggtagatggcgatgaggtgtcggtctcgtagtagaccaccttcctcatcttctttttcttgtccccactccgatgcgacttgtgggaagaggctttcttctccttcccctttccctttttgtgggactcttccgatgaagctttcccgtggcttgtagcgggcttgtcgccggtctccatctctttcttggcgtgttctcccgacat

SEQ ID NO: 4733 - DNA, 4239 bp, Zea mays
  Clone ID: TF_ZmC951_392
ctaagggtttgcctcatccaaagtaattgcgcgcaacaatggcccgcggcaatatactcggcttcggcggtagaaagagctacggaattttgcttctttgaagcccaagacaccaaggatcttcccaagaactggcaagtccccgatgtgctctttctttggatcgacggttttacctcccgtgtcgaggtcgagatgcccattggttcccatgggtgtcttgatgggcttggcatccttcatcccaaacttgtttagaatgtcttgaatatacttcgtttggctaatgaaggtgccctcttggagttgctttacttgaaatcctaagaagtatttcaactcccccatcatcgatatcttgaacttctgtgtcatgatcctactaaattcttcacatgcagattcgtttgtagatccaaatatgatatcatcaacgtaaatttggcatacaaacaaatcattgtcaagagttttagtgaacaaagtaggatcggcttttccgactttgaagccattagtgataaggaaatctcttaggcattcataccatgctcttggggcttgcttgagcccataaagcgccttagagagtttatagacatggttagggtactcactatcttcaaagccgggaggttgctcgtcttgcttgttgcggaagacccacttggttcctacaacattttggttaggacgtggaactaaatgacatacctcattcctagtgaagttgttgagctcctcttgcatcgccaccacccaatccgaatcttgtagtgcttcctctaccctgtgtggttcaatagaggaaacaaaagagtaatgctcacaaaaatgtgcaacacgagatctagtggttacccccttatgaatgtcaccgaggatggtgtcgacggggtgatctcgttgtattgcttggtggactcttgggtgtggcggtcttggttcttcatcctccttgtcttggtcatttgcatctcccccttgattattgtcgtcatcttgaggtggctcatctgtttgatcttctccttcatcaacttgagcctcatcctcattttgagttggtggagatgcttgcgtggaggaggatggttgatcttgtgcatttggaggctcttcggattccttaggacacacatctccaatggacatgttccttagcgcgatgcatggagcctcttcatcacctatctcatcaagatcaacttgctctacttgagagccgttagtctcatcaaacacaatgtcacaagaaacttcaacttgtccagaggacttgttaaagactctatatgcccttgtgtttgaatcatatcctagtaaaaagccttctacagccttaggagcaaatttggattttctacctcttttaacaagaataaagcatttgctaccaaagactctaaaatatgaaacattgagctttttaccggttaggagttcgtatgatgtcttcttgaggatccggtgtagatataaccggttgatggcgtagcaagcggtgttgaccgcctcggcccaaaaccgatctgaaatcttatattcatcaagcatggttcttgccatgtccaatagagttctattcttcctctccactacaccattttgttgtggcgggtagggagaggagaactcatgcttgatgccctcctcctcaaggaagccttcaatttgagagttcttgaacttcgtcccgttgtcgcttctaattttcttgatccttaagccgaactcgttttgagcccgtctcaagaatccctttaaggtttcttgggtatgagatttttccagcaaaaataacacccaagtgaagcgataataatcatccacaataactagacagtacttactcccgccgatgcttatgtaagctatcgggccgaatacgtccatgtgtaggagctcgagtggcgtgtcagttgtcataatgttcttgtgtggatgatgaacaccaacttgctttcctgcctgacatgcactacaaaccctgtctttctcaaaatgaacatttgttagtcccaaaatgtgttctccctttagaagcttgtgaagattcttcattccaacatgtgctagtcggcggtgccagagccagcccatgttagtcttagcaattaagcaagtgtcgagttcagctctatcaaaatctactaagtatagctgaccctctaacactcccttaaatgctattgaatcatcacttcttctaaagacagtaacacctacatcttgatttccatccccgaatgtgatagctcgttggggatcctggtttttttcgtaggaggagaacatcttcttctcccctgtcatgtggtttgtgcacccgctatcgatgatccaacttgagcccccggatgcataaacccaaacacaagtctttgatcccttgtgtttgcccccaacatacttggcaactatcttgtcggatttgttagttaaaacataagatgcatcaaaagttttaaatgaaatgttatgatcatttgatgcactaggagttttcttcttaggcaattttgcacaggttgattgcctagagctagatgtctcacccttatacataaaagcatgattagggccagagtgagacttcctagagtgaattctcccaattttgctctcgggataaccggcagggtacaaaatgtaacccttgttatactgaggcatgggagccttgcccttaacaaaattagacaatcttttaggagggtcattaagtttgacattgtcccccttttggaagccaatgtcatcctttatgccagggcgtctcccactatagagcatgcttctagcaaatttaaatttttcgttttctaagtcatgctcggcaattttagcattaagttgagctatgtgatcattttgtttcttaattaaggctaggtgatcacggatagcatcaacattaatgtctctacatctagtacaaatggaagtatgttcaacggtagatgtagagggtttgcaggattttaattctacaaccttaccatgcaatatatcatttttacttctaaggtcggaaatggaagcattgcaaacatctaattctttagccttagcaagcaatttttcattctcaatcctaaggctagcaagagagatattcaattcttcaatcttagcaagcaaatcaacattatcatttctaagattgggaattgaaacatcacaaacatttgaatcaaccttggcaattaaattagcattctcatttctaaggttggtaatgacatcatggcaagtgcttagctcactagatagtttttcacaattttctacttctagagtgtaagcatttttaaccttaacatgcttcttgttttctttaatgaggaagtcctcttgggtgtctaagagatcatccttctcatgaatagcactaatcaattcattcaatttttctttttgttgcatgtttaggttggcaaaaaggatgcgcaagttatcctcctcattactagcattatcctcatcactagaggtttcatatttagtggaggatcttgattttaccttcttccttttgtcgtcctttgccatgaggcacttgtggccgacattggggaagagaagacccttggtgacggcgatgtttgcggcgtcctcgtcggaggaggagtcggtggagctctcatcggagtcccactcccggcaaacatgagcatcgccgcccttcttcttgtagtatctcttcttctcctttcttctccccttcttgtcgtcgcccctgtcactgtcactagatagtggacattttgcaataaaatgaccgggcttaccacatttgtagcacactttcttggagcggggcttgtaatccttccccttcctttgcttgaggatttggcggaagctcttgatgatgagcgtcatttcctcgttgtcgagcttggaggcgtcgatgggtgttctacttgatgtagattcctctttcttttctttcgtcgccttgaatgcgaccggttgtgcttcggacatggaggggccatctagctcgttgattttctttgagcctttgatcatcaactcaaagctcacaaagtttcctatcacttcctcgggagtcattagtgtatatctaggattaccacgaattaattgaacttgagtagggttaaggaaaacaagtgatctaagaataaccttaaccacttcgtggtcatcccattttttgctcctgaggttgtgcacttggttcaccaaggttttaggccggttgtacat

SEQ ID NO: 4734 - DNA, 4077 bp, Zea mays
  Clone ID: TF_ZmC951_393
tcaaatcaaatgtggatccccttccgtgtcaaggtcgagatgcccattagttcccatgggtgttttgatgggcttggcatccttcatcccaaacttgtttagaatatcttgaatatacttcgtttggctaatgaaggtgccctcttggagttgctttacttgaaatcccaagaagtacttcaactcccccatcatcgacatctcgaatttttgtgtcatgatcctactaaattcttcacatgtagattcgttagtagacccaaatataatatcatcaacataaatttggcatacaaacaaatcattttcaagtgttttggtaaagagtgtaggatcgacctttccgactttgaatccattagtgataaggaaatctctaaagcatttataccatgctcttggggcttgcttgagcccataaagcgccttagagagtttataaacatggttagggtactcactatcttcaaagccgggaggttgctcaacatagacctcttccttgattggtccattgaggaaggcacttttcacgtccatttgataaagcttgaagccatggtaagtagcataggctaataatatacgaattgactcaagcctagctacgggtgcataggtttcaccgaaattcaaaccttcgacttgtgaatatcctttggccacaagtcgtgctttgttccttgtcaccacaccatgctcgtcttgcttgttgtggaacacccacttggttcctacaacattttgattaggacgtggaactaaatgccaaacctcatttctagtgaagttgttgagctcctcttgcatcgccaccacccaatccgaatcttgaagtgcttcctctaccctgtgtggctcaatagaggaaacaaaagagtaatgttgacaaaaatgagcaacacgagatctagtggttacccccttatgaatgtcgtcgaggatggtgtcgacggggtgatctcgttggattgcttggtggactcttgggtgtggcggtcttggttcttcatcctctttgtcttgatcatttgcatctcccccttgattattgccatcatcttgaggtggctcatcttcttgattttctccttcatcaaattgagcctcattctcattttgagttggtggagatgcttgcggggaggaggatggttgatcttgtgcatttggaggctcttcggattccttaggacacacatccccaatggacatgttccttaacgtgatgcacgaagcctcttcatcacctatctcatcaagatcaacttgctcggttaggagttcatatgatgtcttcttgaggattcggtgtagatataatcggttgatggcgtagcaggcggtgttgaccgcctcggcccaaaaccgatccgaagtcttgtactcatcaagcatggttcttgccatgtccaaaagatttctatttttcctctccactacaccattttgttgtggtgtgtagagagagaagaactcatgcttgatgccctcctcctcaaggaagccttcgatttgtgagttcttgaactccgtcccgttgtcgcttcttattttcttgatccttaagccgaactcgttttgagcccgtctcaagaatccctttaaggtctcttgggtatgagatttttcatttgttagtcccaaaatgtgttctccctttagaagtttgtgaagattcttcattccaacatgtgctagtcgacgatgccagagccagcccatgttagtcttagcaattaagcaagtgtcgagttcagctctatcaaaatctactaagtatagctgaccctctaacactcccttaaatgctattgaatcatcactccttctaaagacagtaacaccttgatttccatccccgaatgtgatcgctctttggggatcttggtttttctcgtaggaggagaacattttcttctcccctgtcatgtggtttgtgcatccgctgtcgattatccaacttgagcccccggatgcataaaccttgccggatttgttagttaagacataagaggcatcaaaagttttaaataaaatgctatggtcatttgatgcactaggagttttcttcttaggcaacttagcacgggttggttgcctagagctagatgtctcacccttatacataaaagcatgatttgggccagagtgagacttcctagagtgaattctcctaatcttgtcctcgagataaccggcagggtacaaaatgtaaccctcgttatcctgaggcatgggagccttgcccttaacaaagttggacaattttttaggaggggcattaagtttgacattgcctccctgttggaagccaatgccatccttaatgccagggcgtctcccattataaagcatactacgagcgaacttaaatttttcattttctagttcatgctcggcaattttagcatctaatttggctatatgatcattttgttgtttaatcatggaaaggtgatcatgtatagcactaacatcaacatctctacatctagtgcaaatagtgacatgctcagtaatagatgtagagggtttgcaagaattgagttcaacaatcttagcacgcaatatatcatttttatctctaagatcggaaattgtaacattgcaaacatctagttctttagccttagcaattaatttctcattttcaatcctaaggctggcaagagtaacatttaattcttcaatcttagcaagtaaatcaacattatcatctctaagattggaaattgaaacattacaagcatttgaatcaaccttagcaattaaactagcattctcatttctaaggttgtcaatagtctcatggaaagtgcttagctcactagatagtttttcacatttttcaacttctagagcgtaagcatttttaattttaacatgcttcttgttttctttaataaggaagtcttcttgggtgtccaagagatcatccttctcatggatagcactaattaattcatttagtttttctttttgttgcatgtttagattggcaaaaagaatgcacaagttgtcctcctcattgctagcattttcctcatcactagaggtttcatatttagtggagaatcttgattttaccttcttccttttgccgtcttttgccatgaggcacttgtggccgacgttggggaagagaagacccttggtgacggccatgtttgcggcgtcctcgtcggaggaggagtcggtggagctctcgtcggagtcccactcccggcaaacatgggcatcgccgcccttcttgtagtacctcttcttttcctttcttctccccttcttgtcgtcgcccctgtcactgtcactagatagtggacattttgcaataaaatgaccgggcttaccacatttgtagcaaactttcttggagcggggcttgtaattcttccccctccttagcttgaggatttggcggaagctcttgatgacgagcgccatttcctcattgtcgagcttggaggcgtcgatgggtgttctactcgatgtagactcttccttcttctcctccgtcgccttaaatgcgaccggttgtgcttcgaacgtggaggggccatcaagctcgttgatcttctttgagcctttgatcatcaattcaaagctcacaaagtgtcctatcacttcctcgggagacattagtgtgtatctaggattaccacgaattaattgcacttgtgtagggttaaggaaaacaggtgatctaagaataaccttaaccatttcgtggtcatcccatttcttgctcccgaggttgcgcacttggttcaccaaggttttgagccggttgtacatgtcttgtggctcctccctaaacttcttgcgctcatggcgcttagaagtgatggacggcgtgtcagagccgaaggtggatggcgatgaggtgtcggtctcgtagtagaccactttcctcatcttcttcttcttgtcaccgctccgacacgacttgtgtgaaggggattccttttccttccccttccctttgttgtaggactctcccgatggagccttcccgtggcttgtagcgggcttcctgccggtcaccatatccttcttggcgtgatctcccgacat

SEQ ID NO: 4735 - DNA, 3685 bp, Zea mays
  Clone ID: TF_ZmC951_397
ctaagggtttgcctcatccaaagcaattgcgtgcaacaatggcctgtggcaatataatcggcctcggtggtagaaagagctacggaattttgcttctttgaatcccaagacaccagagaccttcccaagaactggcaagtccccgatgtgctctttcttttgatctacggatttacctcccgtgtcgaggtcgagatgcccattggttcccatgggtgtcttgatgggcttggcatccttcatcccaaacttgtttagaatgtcttgaatatacttcgtttggctaatgaaggtgcccgcttggagttgcttcacttgaaatcccaagaagtacttcaactcccccatcatagacatctcgaatttttgtgtcatgatcctactaaattcctcacatgtagattcgttagtagacccaaatataatatcatcaacataaatttggcatacaaacaaatcattttcaagagttttagtaaataaagtaggatccgccttttcgactttgaagccattagtgataagaaaatctcttaggcattcataccatgctgcttggggcttgcttgagcccataaagcgccttagagagtttgtaaacatggttaggatactcactatcttcaaagccgggaggttgctcaacatagacctcttccttgattggtccattgaggaaggcactcttcacgtccatttggtaaagcttgaagccatggtaagtagcataggcaagtaaaatgcgaattgattctagcctagctacgggtgcataggtttcaccaaaatccaaaccttcgacttgtgaatatcccttggccacaagtcgggctttgttccttgtcaccacaccatgctcatcctgtttgttgcggaagacccacttggttcctacaacattttggttaggacgtggaactaaatgccatacctcgttcctagtgcagttgttgaggtcctcttgcatcgccaccacccaatccgaatcttgtagtgcttcctctaccctgtgtggctcaatagaggaaacaaaagagtaatgttcacaaaaatgagcaacacgagatcgagtagttacccccttttgaatatcgccgaggatggtgttcacggggtgatctcgttggattgcttggtgaactcttgggtgtggcggtcttggaacttgttcatcttccttaacttgatcatgggcatctcccccttgatcattgctctcctcttgaggtggctcaacttcttgatcttctcctttatctttttgagcctcatcctcatcttgagttggtggagatgcttgtgtgtaggaagatggttgatcttgtgcttgtggaggctcttcggattccttaggacatacatccccaatggacatgttccttagcgcgacgcacggagcctcttcatcatctaactcatcaagatcaacttgctctacttgagagctgttagtctcatcaaacacaatgtcacaagaaacttcaactagtccagtggacttgttaaagactctatatgcccttgtgtttgaatcatatcctagtaaaaagccttctacagccttaggagcaaatttggattttctacctcttttaacaagaataaagcatttgctaccaaagactcgcctccgcccaaaaccgatctgaagtcttgtatcatcaagcatggtccttgccatgtccaatagagttcgattcttcctctccactacaccattttgttgtggcgtgtagggagaagagaactcatgcttgatgccctcctcctcaaggaagccttcgatttgtgagttcttgaactccattccgttgtcgcttcttattttcttgatccttaagccaaactcgttttgagcccgtctcaagaatccctttaaggtttcttgggtgtgagatttttccaaaccttgatttccatccccgaatgtgatagctcgttggggatcttggtttttctcgtaggaggagaacatcttcttctcccatgtcatgtggtttgtgcatccgctgtcgatgatccaacttgagaccccggatgcataaaccttgccggatttgttagttaaaacataagatgcatcaaaagttttaaatgaaatgttagaatcatttgatgcaatagaagttttctttctaggcaatttggcacgggttgattgcctagagctagatgtctcacccttatacataaaagcatgattagggccagagtgagacttcctagagtgaattctcctaattttgtgctcgggataaccggcagggtacaaaatgtagccctcgttatcctgaggcatgggagccttgcccttaacaaaattagacaatcttttaggagaggcattaagtttgacattgtctcccttttggaagccaatgccatccttgatgccagggcgtctcccactatagagcatgcttctagcaaatttaaatttttcattttctaagtcatgctcatttattttggcattaagttgagctatgtgatcattttgtttcttaattaaagctaggtgatcatgaatagcatcaacattaatggaaacatgctcgacagtagatgtagagggtttgcaagatttaagttcaacaatcttagcatgtaaaatgtcattttcacttctaagattggaaattgtaacattgcaaacatctaagtctttagccttagcaattaatttttcattatcatttctaaggctagcaagagaatcattcaatttttcaatcttagcaagcaaattagcattatcatctctaagattggaaattgaatcatcacatagatttgaatcaaccttagctattaaactagtattctcatttctaaggttggtaataatatcatggcacttgcttagctcactagataatttttcacatttttctacttctagagcataagcatccttaaccttaacatgcttcttattctccttaattaggaagtcctcttgggagtccaagagttcatccttctcatgaatagcactaattaactcatttaatttttctttttgttgcatgttaaggttggcaaaaagagtgcgcaaattatcctcctcatcactagaattatcttcatcactagaggatgcatatttagtggaggaccttgattttaccttcttccttttgtcgtcctttgccatgaggcacttgtggccgacgttggggaagaggagtcctttggtgacgacgatgttggcggcgtcctcgtcggaggaggagtcggaggagctctcgtccgagtcccactcgcggcatacatgggcatcgccgcccttcttcttgtagtatctcttcttttctctcctctttcctttcttgtcgttgcccctgtcactatcacttgataatggacattttgcaataaaatgaccgggcttaccacacttgtagcacactttcttggtgcgggacttgtagtccttccctctcctttgcttgaggatttggcggaagctcttgatgatgagcgccatttcctcgttgtcgagcttggaggcgttgatggggagtctacttgatgtagattctttcttcttctcctctgtcgccttgaatgcgaccggttgtgcttcgggcgtggagggaccatcttgctcgatgattttatttgagcctttgatcatcaattcaaagctcacaaattttcctattacttcctcgggagacat

SEQ ID NO: 4736 - DNA, 4752 bp, Zea mays
  Clone ID: TF_ZmC951_406
ctaagacaccagggaccttcctaagaactggcaagtccccgatgtgctctttctattaattttacaccctcccgtgtcgaggtcgagatgcccattggttcccatgggtgtcttgatgggcttggcgtccttcatcccaaacttgtttagaatgtcttgtatatacttcgtttggctaatgaaggtgccctcttggagttgcttcacttgaaatcccaagaagtacttcaactcctccatcatagacatctcgaatttctgtgtcatgatcctactaaactcttcacatgtagattcgttagtagacccaaatataatatcatcaacataaatttggcatacgaacaaatcattttcaagtgttttagtaaagagtgtaggatcggcctttccaactttgaagccattagtgataagaaaatctcttaggcattcataccatgctcttggggcttgcttgagcccataaagcgccttagagagtttatatacataattaggatactcactatcttcaaagctgggaggttgctcaacatagacctcctccttgattggtccattgaggaaggcacttttcacgtccatttggtagagcttaaagccatggtaagtagcataggcaagtaatattcgaattgactcaagcttagctatgggtgcataggtttcaccgaaatccaaaccttcgacttgtgaataccccttggccacaagtcgggctttgttccttgtcaccacaccattctcatcttgcttgttgcggaagacccacttggttcctacaacattttggttaggacgtggaactaaatgccatacctcattcctagtgaagttgttgagctcctcttgcattgccaccacccaatccgaatcttgaagtgcttcctctaccctgtgtggctcaatagaggaaacaaaagagtaatgttcacaaaaatgagcaacacgagatcgagtagttacccccttttgaatatcgccgaggatggtgttcacggggtgatcacgttggattgcttggtggactcttgggtgtggcggctttggagcttgttcatcttcctcatcttgatcatgggcatctcccccttgatcattgctctccccttgaggtggctcaacttcttgatctacgacttcatcattttgagcctcatcctcatcttgagttggtggagatgcttgcattgaggaagatggttgatcttctgcatgtggtggctcttcggattccttaggacacacatccccaatggacatgttccttagtgcgacgcacgaagcctcttcatcacctatctcatcaagatcaacttgctctacttgagagccgttagtctcatcaatcacaatgtcacaagaaacttcaacttgtccagaggacttgttaaagactctatatgcccttgtgtttgaatcatatcctagtaaaaagccttctacagctttaggagcaaatttagattttctacctcttttaacaagaataaagcatttgctaccaaagactctaaaatatgaaacattgggctttttaccggttaggagttcatacgatgtcttcttgaggattcggtgtagatacaaccggttgatggcgtagcaagcggtgttgaccgcctcgacccaaaaccgatccgaagtcttgtactcatcaagcatggttcttgccatgtccaatagagttctgttcttcctctccactacaccattttgttgtggcgtgtagggagaagagaactcatgcttgatgccctcctcctcaaggaagccttcaatttgagagttcttgaactccgtcccgttgtcgcttctaattttcttgatccttaagccgaactcgttttgagcccgtctcaagaatccctttaaggtctcttgggtatgagatttttccaaaccttgatttccatccccgaatgtgatagctcgttggggatcttgatttttctcgtaggaggagaacatcttcttctcccctgtcatgtggtttgtgcacccgctatcgatgatccaacttgagcccccggatgcataaaccttgcctgatttgttggttagcacataagatgcatcaaaggttttaaatgaaatgttatgatcatttgatgcagtaggagttttctttttaggcaattttgcacgggttgattgcctagagctagatgtctcacccttatacataaaatcttgattagggctagagtgagacttcttagaatgaattctcctaattttgctctcgggataaccggcagggtacaaaatgtaaccctcgttatcctgaggcatgggggccttgcccttaacaaagttggacaatcttttaggaggggcattaagtttgacattgtcccccttttggaagccaatgccatccttaatgccagggcatctcccactatagagcatgcttctagcaaatttaaattttccattttctaagtcatgctcattaatcttagcattaagttgagctatgtgatcattttgtttcttgattaaggctaggtgatcatggatagcatcaacattaatgtatctacatctagtgcaaatggaaacatgctcaatggtagatgtagagggtttgcaagattttagttcaacaatgttagcatgtaaaatgtcattttcacttctaaggttggaaattgtaacattgcaaacatctaaatctttagccttagcaatcaattcttcattttcaatcctaaggctagcaagtgaatcattcaacttttcaatcttagcaagcaaattagcattatcatcactaagattgggaattgaatcattacaaacatttgaatcaaccttagcaattaatttagcattctcatttctaaggttgacaatagtatcatggcaagtgcttagctcactagatagtttttcacatttttctacttctagagcgtaggcatttttaaccttaacatgcttcttattttccttaattaggaagtcctcttgggtgtccaagagttcatccttcttccttttgccgtcctttgccatgaggcacttgtggccgacgttggggaagaggagtcccttggtgacggcgatgttggcggcgtcctcgtcagaggaggagtcggaggagctctcatcggagtcccactcgcggcacacatgggcatcgccgcccctctttttgtggtacctcttattttctgtcctctttcccttcttgtcgtcgcccctgtcactgtcactagatagtggacattttgcaataaaatgaccaggcttaccacacttgtagcacactttcttggagcggggcttgtaatccttccccctcctttgcttgaggatttggcggaaactcttgatgatgagcgccatctcctcattgtcgagcttagaggcgtcgatgggttgcctacttgatgtagactcctcctttttctcctccgttgccttgaatgcgatgggttgcacctcgggtgtggaggtgccgccttgctccaagtcgacgatgtgtttggaacctttgatcatcaactcaaagctcacaaacttcccaattacctcctcaggagacattagcttatatctaggatcaccacgtattaattgaacttgagtaggattacaaaatacgagggatctaagaataaccttgaccatctcatggtcatcccattttttgctcccgaggttgcgcacttgattcaccaaggctttgagccagttgtatattgcttgtggctcctctccttggtggaggacgaatcgacctagctccccctcgatcgtttcccgcttggtgatcttggtcactgtggggggacggatatcccctgggtccactagaaggcaagaaggcctcgcgaaaggccttgggcctgttgactcgcgaggccatcccttcgtgggccaagggagaactgcgggcagaatgggccggcgtagggaatgagcagactcgggtccaggtggctcgttggatttaaacgttatccacatccttgatccgattctcccgcgcgacacctctcgaggggtaaccccaggtgcacggtcgggctccaaacactgacaactggtgcaccaggaagggggtgtgttgttgatccaagctagctcaatggctgtcactttccaatgccagattgctttctgccctggatccgtattttgctttgcgaccatctcgtccgtagcggatgagaagggagttcgcgacactgcatcaatgactggagcgacttcagtcggtgcttcatcgccaactttcagttcctctccgacaagccggcgcagccatgggacctcaaatccatcaggcatcggggcgatgaaacacttcggtcgtacctcaagaggttttagaccatgagaaatcgcataaccgtggtcactgaggcagtggtaattgaggatttctaccggggatctaatgacttggcctttgttcgagccatactgcataaggcgccaaccacctccgagcagctgtttcgggaagtggacctctacatcaccgccgacgaacgggctcaagacctcatctggggagcgaagcctgcaccgtcggacttcggtcttccgccgccgtgcgtggaccgagctatccagtgagtctccgcccaattcctcgcgctcatatcttctctggcatcccgtggacctctctgacccatttgattgaactatctcgccgtgaccaggccggtctcctcgccgccgacgagcatccccgcctgcgcgcgtggaccgaccgactccggccat

SEQ ID NO: 4737 - DNA, 4642 bp, Zea mays
  Clone ID: TF_ZmC951_409
ctaagggtttgcctcatccaaagtagttgtgcgcaacaatgacctgcggcaatatactcggcttcggcggtagaaagagctacggaattttgcttctttgaagcccaagacaccaaggatcttcccaagaactggcaagtccccgatgtgctctttcttttgatcgacagatttacctcccgtgtcgaggtcgagatgcccattggttcccatgggtgtcttgatgggcttggcatccttcatcccaaacttgtttagaatgtcttgaatatacttcgtttggctaatgaaggtgccctcttggagttgctttacttgaaatcccaagaagtacttcaactcccccatcatagacatctcgaatttttgtgtcatgatcctactaaattcctcacatgtagattcgttagtagacccaaatatgatatcatcaacataaatttggcatacaaacaaatcattgtcaagagttttagtaaataaagtaggatcgacctttccgactttgaagccattagtgataagaaaatctcttaggcattcataccatgctcttggggcttgcttgagcccataaagtgccttagagagtttgtaaacatggttagggtactcactatcttcaaagccgggaggttgctcaacatagacctcttctttgattggtccattgaggaaggcactcttcacatcgatttgataaagcttaaagccatggtaagtagcataggcaagtaatatacgaattgactcaagcctagctacgggtgcataggtttcaccgaaatccaaaccttcgacttgtgagtatcccttggccacaagtcgggctttgttccttgtcaccacaccatgctcgtcttgcttgttgcggaagacccacttggttcctacaacattttgattaggacgtggaaccaaatgccatacctcattcctagtgaagttgttgagctcctcttgcatcgccactacccaatccgaatcttgtagtgcttcctctatcccccttatgaatgtcgccgaggatggtgtcaacggggtgatctcgttagattgcttggtggactcttgggtgtggcggtcttggaacttgttcatcttcctcatcttgatcgtgggcatctcccccttgatcattgcactcctcttgaggtggctcaacatcttgatcttctccttcatcattttgagccttatcctcatcttgagttggtggagatgcttgcatggaggaagatggttgatcctgtgcttgtggaggctcttcgggttccttaggacacacatccccaatggtcatgttccttagcgcgacgcacggggccttctcatcatctagctcatcaagatcaacttgctctacttgagagccgttagtctcatcaaacacaatgtcacaagaaacttcaactagtccagaggacttgttaaagactctatatgcccttgtgtttgaatcatatcctagtaaaaagccttctacagccttaggagcaaatttggattttcttcctcttttaacaagaataaagcatttgctaccaaagactctaaaatatgaaacattgggctttttaccggttaggagttcgtatgatgtcttcttgaggattcggtgtagatacaaccggttgatggcgtagcacacggtgttgaccgcctccgcccaaaaccgatccgaagtcttgtactcatcaagcatggtccttgccatgtctagtagagttcgattcttcctctccactacaccattttgttgtggcgtgtagggagaagagaactcatgcttgatgccctccttctcaaggaagccttcgatttgtgagttcttgaacttcgtcccgtttcgcttcttattcccgctgatgcttatgtaagctatcgggccgaataggtccatgtgtaggagctcgagtggcctgtcagtcgtcatgatgttcttgtgtggatgattaacaccaacctgctttcctgcctgacatgcactacaaattctgtctttctcaaaatgaacatttgttagtcccaaaatgtgttctccctttagaagcttgtgaagattcttcattccaacatgtgctagtcggcgatgccagagccagcccatgttagtcttagcaattaagcaagtgtcgagttcaactctaccaaaatctactaagtatagctgaccctctaacactcccttaaatgctactgaatcatcacttcttctaaagacagtaacaccttgattcccatccccgaatgtgatagctcgttggggatcttgatttttctcataggaggagaacatcttcttctcccctgtcatgtggtttgtgcacccgctatcgatgatccaacttgagcccctggatgcataaacttggcaactacccttatacataaaagcatgattagggccagagtgagacttcctagagtgaattctcctaatcttgtgctcgggataaccggcagggtacaaaatgtaaccctcgttatcctgaggcatgggagccttgcccttaacaaagttagataattttttaggaggggcattaagtttgacattgtctcccttttggaagccaatgccatccttgatgccagggcgtctcccactatagagcatgcttctagcaaatttaaaattttcattttctaagtcatgctcattaattttggcattaagttgagctatgtgatcatttcgtttcttaattaaagctagttgatcatgaatagcattaacattaatgtctctacatctagtacaaatgaaaacatgctcaacggtagatgtagagggtttgcaagattttagttcaacaatcttagcatgcaaaatgtcattttcacttctaagattggaaatggtaacattgcaaacatctaagtccttagccttagcaattaatttttcattctcatttctaaggctagcaagagagacattcaattcttcaatcttagcaagtaaactaacattatcatctctaagattgggaattaaaacatcacaaacatttgaatcaaccttaacatgcttcttgttttctttaattaggaagtcctcttgagagtccaagagttcatccttctcatgaatagcactaattaattcatttaatttttccttttgttgcatgtttaggttggcaaaaagagtgcgcaaattatcctcctcatcactagaattgtcttcatcactagaggatgcatatttagtggaggatcttgattttaccttcttccttttgccggtctttgccatgaggcacttgtggccgacgttggggaagaggagtcctttggtgacggtgatgttggcggcgtcctcgtcggaggaggagtcggtggagctctcgtcgaagtcccactcgcgacacacatgggcatcgtcgcccctcttcttgtggtacttcttcttttctctcctcttgcccttcttgtcgttatccctgtcactgtcacttgataatggacattttgcaataaagtgaccgggcttaccacacttgtagcacactttcttggagcgggacttgtagtccttccctctcctttgcttgaggatttggcggaagctcttgatgatgagcgccatttcctcgttgtcgagcttggaggcgtcgatggggagtctacttgatgtagactcttccttcttctcctccatcgccttgaatgcgaccggttgtgcttcgggcgtggaggggccatcttgctcgatgattttctttgagcctttgatcatcaattcaaagctcacaaatttttctattacttccttgggagacattagtgtgtatctaggatcaccacgtattaattgtacttgcatagggttaagaaaaacgagtgatctaagaataaccttgaccatttcatggtcatcccattttttgctcccgaggttgcgcacttggttcaccaaggtcttgagccggttgtacatctcttgtggctcctccccttggcgaagccggaagcgaccgagctccccctcgatcgtctcccacttggtgatcttggtcacctcgtctccttcgtgcgcggtcttcagtacgtcccaaatatccttggcactcttcaatccttgcaccttgttatactcctctcgacttagagaggtgaggagtatagtggtggcttgggagttgaagtgcacgatttgggccacctcgtcctcatcataatcttcatcccctacggatggtacctgtacaccaaactcaacaacatcccatatgcttttgtggagtgaggttaggtgatatctcatcatatcactccttctagaataatcttcaccgtcaaatgtcggtggtttgcctaatgggacggaaagtaatggagtatccttaggaatgcgaggatagcgtaggggggtcttactatacttcttgcgctcttggcgcttagaagtgacggacgcggcgtcggatccggatgtagagggcgaggaagaatcagtctcgtagtagaccactttcttcattttcttcttcttctcgccactcttgtgcgatcgaatgcgtgaaggggatccatccttcttgttgttggcggactcccttgatggagccttcccgtggcttgtagcggacttctcaccgccgatcaccatcttcttggcgtcatctcccgacat

SEQ ID NO: 4738 - DNA, 3219 bp, Zea mays
  Clone ID: TF_ZmC951_414
ctaagggtttgcctcatccaaagtagttgcgcgcaacaatggcctgcggcaatgtactcggcctcggcggtagaaagagctacgaaattttgcttctttgaagcccaagacaccaaggatcttcccaagaactgacaagtcctcgatgtgctctttcttttgatctacggatttacctcccgtgtcgaggtcgagatgcccattggttcccatgggtgtcttgatgggcttggcatccttcattccaaacttgcttagaatgtcttgagtatactttgtttggctaatgaaggtgcctcttggagttgcttcacttgaaatcccaagaagtacttcaactcccccatcatcgacatctcgaatttttgtgtcatgatcaaacaaatcattgttaagagttttagtgaatagagtaggatcggcttttccgactttgaagccattagcaataaggaaatctcttaggcattcataccatgctcttgggtcttgcttgagcccataaagcgccttagagagtttataaacatggttaggatacttactatcttcaaagccgggaggttgctcaacatagacttcttctttgattggtccgttgaggaaggcactctttacgtccatttgataaagcttgaagccatggtaagtagcataagtcccgccgatgcttatgtaagctatcaagccgaataggtccatgtgtaggagctccagtggcctgtcagtcgtcatgatgttcttgtgtggatgatgagcaccaacttgcttccctgcttggcatgcgctacaaatcctgtctttctcaaaatgaacatttgttaatcctaaaatgtgttctccctttagaagtttatgaaggttcttcatcccaacatgggctagtcggcggtgccagagccaacccatgttagtcttagcaattaagcaagtgtcgagttcagctctatcaaaatctaagtatagctgaccctctaacactcccttaaatgctattgaatcatcacttcttctaaagacagtgacacctttgaccaaaccttggtttccatccccgaatgtgatcgctctttggggatcttggtttttctcataggaggagaacatctttttctcccctgtcatgtggtttgtgcacccgctgtcgatgatccaacttgagcccccggatgcataaaccatatgatcacgaatagcatcaatatcaacatctctacatctggtgcaaataggaacatgctcaacggtagatgtagagggtttgaaggattttaattctacaaccttagcatgtaatatatcattttcacttctaaggttagaaatagtaacattgcaaacatcaaaatctttaaccttagcaagcaatttttcattctcaatcctaaggctatcaagagatatatttaattcttcaatcttagcaagcaaatcaacattttcatctctaagattgggaattgaaacatcacaagtattagaatcaactttagcaattagtttatcattttcatttctaaggttggtaatagtgtcatggcaagtgcttagctcactagataatttttcacatttttctacttctagagcgtaagcatttttaaccttaacatgcttcttgttttccttaattaggaagtcctcttgagagtccaagagatcatccttctcatgaatagcactaattaattcatttaatttttccttttgttgcatgttgaggttggcaaaaagggtgcgcaaattatcctccttatcactagcattatcctcatcactagaggtttcatatttagtagaggatcttgattttaccttcttctttttgtcgtcctttgccatgaggcacttgtggccgacgttggggaagagaagtcccttggtgatggcgatgttggcggcgtcctcgtcggaggaggagtcggtggagctctcgtcggattcccactcgcggcacacatgggcattgccgcccttcttcttgtggtacctcttcttttcctttcttctccccttcttgtcgtcgcccctgtcactatcactagacaaaggacatttagcgataaaatgaccgggcttaccacatttgtagcaaaccttcttggagcgggacttgtagtctttccccctcctttgcttgaggatttggcgaaagctcttgatgatgagcgccatttcctcgttgtcgagcttggaggcgtcgatggggaccctacttggtgtagagtcttctttcttctcctctgttaccttgaagtcgacgggttgcacctcgggtgttgaggtggcgccttgctcgatgatcttcttggagcctttgatcatcaattcaaagctcacaaattttcctataacttcctcgggagacattagcttatatctaggatcaccacgaattaattgtacttgagtaggattaagaaatacaagtgatcttagaataaccttgaccatttcatggtcatcccacttggagctcccgaggttgagcacttggttcaccaaggtttttagccggttgtacatggcttgcagttcttctccttggttgagcataaagcgaccgagctccccctcgatcgtttcccgcttggtgattttggtcacctcatctccctcgtgcgcggtcttgagtacgtcccaaatctctttggcgctcttcaacccttgcaccttattatactcctctcgacttagagaggtgaggagtatagtagttgcttgagagtagaagtgctcgatttgggccacctcgtcctcatcataatcttcatcccctacggatggtacctgtactccaaactcaacaacatcccatatgcatttgtggagtgaggttaggtgatatctcatcatatcactccacctagaataatcttcaccgtcaaacgtcggtggtttgcctaatgggatcgaaagtaatggagtatgtctaggaatgcaagggtagcgtagggggatcttactatacttcttgcgctcttggcgcttagaagtgatggacgcggcgtcggatcccaatgtagagggcgatgaagagtcggtctcgtagtagaccactttcttcattttcctcttcttttcgccactcttgtgcgtcctaatgcgtgaaggggatccctccttctttttgttgccggactcctttgatggaaccttcccatggcttgtggcgggtttctcgccggtcaccatctccttggcgtgatctcccgacat

SEQ ID NO: 4739 - DNA, 4298 bp, Zea mays
  unsure (1)..(4298): unsure at all n locations
  Clone ID: TF_ZmC951_418
ctttccgactttgaagccattagcgataagaaaatctcttaggcattcataccatgctcttggggcttgcttgagcccataaagcgccttagagagtttgtaaacatggttagggtactcactnatcttcaaagctgggaggttgctcaacatagacctcccttcttgattggtccattgaggaaggcacttttcacgtccattggtaaagcttaaagccatggtaagtagcataggcaagtaatatgcgaattgactcaagcctagctacgggtgcatagggtttcaccgaaatccaaacctttgacttgtgaataacccttggccacaagtcgggctttgttccttgtcaccacaccatgcatcatcttgcttgttgcggaagacccacttggttcctacaacattttgattaggacgtggaacaagatgccataccttattcctcatgaagttgttgagttcctcttgcattgccaacacctaatttaatcccttaatgcgtcttccaccctgtatggctcaatagaagacacaaaagagtaatgttcacagaaatgagcaacacgagatcgagtagttacccccttatgaatatcgccgaggatggagttcacggggtgatctcgttgtattgcttggtggactcttgggtgtggcggtcttggaccgtcatcatcttccttgtcttgatcatttgcatctcctcctcgatcattgttctcctcctgaggtggctcctcttgatcgtcatcttcatcatcttgagcttgatcctcatcttgagttggtgtagatgcttgcatggaggaagatggttgatcttgtgcatgtggaggctcttcggattccttaggacacacatccccaatggacatgttccttagtgcgacgcatggagcctcttcatcatctagctcatcaagatcaacttgctctacttgagagccgttagtttcatcaaacacaatgtcacaagaaacttcaactagtccagtggacttgttaaagactctatatgcccttgtgtttgaatcataaccaagtaaaaagccttctacagccttaggagcaaatttagattttctacctcttttaacaagaataaagcatttgctaccaaagactctaaaatatgagacattgggctttttaccggtgaggagttcatatgatgtcttcttgaggattcggtgaagatataaccggttgatggcgtagcaagcggtgttgaccgcctcggcccaaaaccgatccaaagtcttgtactcatcaagcatggttcttgccatgtccaatagagttctattcttcctctccactacaccattttgttgtggcgtgtagggagaagagaactcatgcttgatgccctcatcctcaaggaagccttcaatttgagagttcttgaactccgtcccgttgtcgcttcttattttcttgatcctcaagccgaactcattttgagcccgtctcaggaatccctttaaagtctcttgggtttgagatttttcatccgtaaaaagacaattgtagcccattttgcataattgagaaacagaaagcaaattgtaatctaatgaatcttgatttccatccccgaatgtgatggctcgttggggatcttggtttttctcataggaggagaacatccttttctcccctgtcatgtggtttgtgcacccgctatcaatgatccaacttgagcccccgaatgcataagccttgggtacccaaacacaagtctttgaccccttgtgtttgcctccaacatatttggcaactactttgcctgatttgttagtcaaaacataagatgcatcaaaagtcttaaatgaaatgttatgatcatttgatgcaataggagttttcttcttaggcaatttagcatgggttgattgcctagaactagatgcctcactcttatacataaaagcataattagagccagagtgagacttcctagagtgaattttcctaattttgtgctcgggataaccggcagggtataaaatgtaaccctcgttatcctgagccatgggagtcttgcccttaacaaagttagataatcttttaggaggggcattgagtttgacatttcctccctgttggaagccaatgccatccttaatgccagggcgtctcccactatagagcatactacgagcaaatttaattttttcattttctaattcatgctcggtaattttagcatctaattttactatatgatcattttgttgtttaatcatagccatgtgatcatgaatagcatcaatgttaacatctctacatctagtgcaaatagtaacatgctcaatggtagatgtagagggtttgcaagaatttaattcaacaatcttagcatgtaatatggcattttcatctctaagactggaaatggaaacattgcaagcatttaattccttagccttagcaattaatttttcattctcatttctaaggctagcaagagaggcatttaatttttcaaccttagcatgtgaactagcattatcatttctaagattgtcaattgaatcattacagacatttgatttctcaaccttagcaattaatttggcattttcatttctaaggttggaaataacatcatggcaagtgcttagctcactagataatttttcacatttttctacctctagagcataagcatttttaaccttaacatgttttttgttttctttaattaggaagtcctcttgggtgtccaagtgttcatccttctcatgaatagcactaattaactcatttaatttctccttttgttgcatgtttaggtgggcaaaaagtgttaataaatcatcctcattatcactagagctagcctcatcactagatgttgcgtacttagtggaggatttagattttaccttcttccttttgtcgtcctttgccatgaggcacttgtggccgacgttggggaagaggaggcctttggtgacgacgatgttggtggcgtcctcgtcggaggaggagtcggtagagctctcgtcggagtcccactcccggcaaacgtgggcatcgccgcccttcttcttgtagtacctcttcttttctcttctctttcccttcttgtcgtcgcccctgtcactatcacttgataatggacattttgcaataaaatgaccgggcttaccacacttgtagcaaactttattggagcggggcttgtagtccttccccctcctttgcttgaggatttggcgaaagctcttgatgatgagcgtcatttcctcattatcgagcttggaggcgtcgatggggaccctactaggtgtagggttttctttcttctcctctgttgccttgaatgccacgggttgcacatcgggtgtggaggaggtgccttgctcgatgattttcttggagcctttgatcatcaactcaaagctcacaaattttcctattacttcctcgggagacattagtgtgtatctagaatcaccacgaattaattgaacttgcgtagggttaaggaaaacgagtgatctaagaataaccttgactatttcatggtcatcccatttggtgctcccgaggttgcgcacttggttcaccaaggtcttgagccggttgtacatcgcttgtggctcctctccttggtgaagcatgaagcgaccgagctccccctcgatcgtctcccgcttggtgatcttggtcacctcgtctctttcgtgcgcggtcttgagtacgtcccaaatctcctttgcgctcttcaatccttgcaccttattatactcctctcgacttagagaggcgaggagtatagtagtggcttgggagttgaagtgttggatttgttcgacctcctccgagtcgtaatccttgtctcccttctttggtacctgcggtccatactcaacaatatcccatatgcttttgtggagtgaggttaggtgatgcctcattttatcactccatattgaataatcttcaccttcaagcataggtggtttgcctaatggaacggaaagtaatggagtgcgttttgaaatacgagaatagcgaaggggcatcttactatacttcttgcgctcatggcgcttagaagtggcgaatgccgattccgagccggaggttgagggtgacgaagagtcggtctcgtagtagaccaccttcttcatcttcttcttcttgtcaccctttcgttgggacttgatggaggaagaggattcctccttgtgcttgtgggcggactcccttgagtgtgttctccccgagcttgcggacttgtcgtcggtcccgatctccctcttggcggatgctcccgacat

SEQ ID NO: 4740 - DNA, 4470 bp, Zea mays
  Clone ID: TF_ZmC951_440
ctaggttagaatatcttgaatatacttcgtttggctgatgaaggtgccctcttggagttgcttcacttgaaatcccaagaagtacttcaactcccccatcatagacatctcgaatttttgtgtcatgatcctactaaactcttcacatgtagattcgttagtagacacaaatataatatcatcaacataaatttggcatacaaacaaattattttcaagtgttttggtaaagagtgtaggatcggcctttccgactttgaatccattagtgataaggaaatctctaaggcattcataccatgctcttggggcttgcttgagcccataaagcgccttagagagtttataaacatggttagggtactcactatcttcaaagccgggaggttgctcaacatagacctcttccttgattggtccattgaggaaggcacttttcacgtctatttgataaagcttgaagccatggtaagtagcataggctaataatatacgaattgactcaagcctagctacgggtgcataggtttcaccgaaatccaaaccttcgacttgggagtatcccttggccacaagtcgagctttgttccttgtcaccacaccatgctcatcttgcttgttgcggaacacccacttggttcctacaacattttgattaggacgtggaaccaaatgccatacctcattcctagtgaagttgttgagctcctcttgcatcgccaccacccaatctgaatcttgaagtgcttcctctaccttgtgtggctcaatagaggaaacaaaagagtaatgttcacaaaaatgagcaacacgagatcgagtagttacccccttttgaatatcgccgaggatagtgttcatggggtgatctcgttggattgcttggtggactcttgggtgtggcggccttggaacttgtttatcttcctcatcttgatcatgggcatctcccccttgatcattgctctcctcttgaggtggctcaacttcttgatcttctctttcatcattttgagcctcatcctcatcttgagttggtggagatgcttgcgtggaggaagattgttgatcttgtgcttgtggaggctcttcggattccttaggacacacatccccaatggacatgttccttagtgcgacgcacaaagcctcttcatcatctagctcatcaagatcaactttctctacttgagagccgttagtctcatcaaacacaatgtcacaagaaacttcaactagtctagaggacttgttaaagactctatatgcccttgtgtttgaatcatatactagtaaaaagccttctacagccttaggagcaaatttggattttctacctcttttaacaagaataaagcatttgctaccaaagactcgatccgaagtcttgtactcatcaagcatggtccttgccatgtccaatagagttctattcttcctctccactacaccattttgttgtggcgtgtagggagaagagaactcatgcttgatgccctcctcctcaaggaagccttcaatttgagagttcttgaactccgttccgttgtcgcttcttattttcttgatcctcaagctgaactcattttgagcatgtctcaagaatccctttaaggtctcttgggtatgagatttttcctgcaaaaagaacacccaagtgaagcgagaatagtcatccacaataactagacagtacttactcccgccgatgcttatgtaagctatcgggccgaataggtccatgtggaggagctccagtggcctgtcagtcgtcatgatgttcttgtgtggatgatgaacaccaacttgtttccctgcttggcatgcgctacagatcctatctttctcaaaatgaacatttgttagtcgtaaaatgtgttctccctttagaagcttgtgaagattctttatcccaacatgtgctagtcggcgatgccagagccagcccatgttagtcttagcaatcaagcaagtgtcgagttcagctctattgaaatcaactaagtatagctgaccctccaacactcccttgaatgctactgaatcatcactccttctaaagacagtgacaccttgatttccatccccgaatgtgatagctctttggggatcttggtttttctcataggaggagaacatcttcttctcccctgtcatgtggtttgtgcacctgctgtcgatgatccaacttgagcccccggatgcataaaccttgccggatttgttagttaaaacataagatgcattaaaagtcttaaatgagatgttagaattatttgatgcaataggagttttcttcttaggcaattttgcacgggttgattgcctagagctagatgtctcacccttatacataaaagcatgattagggccagagtgagacttcctagaatgaattctcctaatcttgtgcttgggataaccgacagggtacaaaatgtaaccctcgttatcctgaggcatgggagccttgcccttaacaaagtttgacaatcttttaggaggggcattaagtttgacattgtctcccttttggaagccaataccatccttgatgccagggcgtctcccactatagagcatgcttcttgcaaatttaaaattttcattttctaagtcatgctcattaattttggcattaagttgagctatgtgatcattttgtttcttaattaaagctaggtgatcattaatagcatcaacattaatatctctacatctagtgcaaatggaaacatgctcaacgatagatgtagagggtttgcaagattttagttcaacaatcttagcatgtaaaatgtcattttcacttctaagattggaaattgtaacattgcaaacatctaagtctttagccttagcaattaatttttcattttcaatcttaaggctagcaagagagacattcaattcttcaatcttagcaagtaaactaacattatcatctataagattgggaattgaaacatcacaaacatttgaatcaaccttaacaattactttagcattttcatttctaaggttggaaataacatcatgacaagtgcttagctcactagataatttttcacatttttctacttctagagcataagcattcttaaccttaacatgcttcttgttttctttaattaggaagtcctcttgagaatccaagagttcatccttctcatgaatagcactaattaattcatttaatttttctttttgctgcatgtttaggttggcaaaaagggtgcgcaaattatcctcctcaacaccagagttatcctcatcactagaggtttcatatttagtggaggattttgattttaccttcttccttttgccgtcctttgccatgaggcacttgtggccgacgttggggaagaggaggcccttggtgacggcgatgttggcggcgtcctcgtcagaggaggaatcggtggagctctcgtcggagtcccactcgcggcacacatgggcatcgccacccttcttcttgtagtatctcttcttttctcccctctttcctttcttgtcgtcgcccttgtcactatcagtagataatggacatttagcaatgaaatgaccgggcttaccacacttgtagcacaccttcctggaacggggcttgtaatctttccccttcctttgtttgaggatttgacggaagctcttgatgatgagcgccatctccttattgtcgagcttagaggcgtcgatggggattctacttggagtagaatcttctttcttctcctccgttgctttgaatgcaacgagttgtgcttcgggcgtggaggagtcgccttgctcgatgatcattttggagccgagctccccctcgatcgtctcccgcttggtgattttagtcacctcatctccttcgtgcgcggtcttgagcacgtcccaaatctccttggcgctctttaatccttgcaccttgttatactcctctcgacttagagaggcgaggagtatagtggtggcttgagagttgaagtgtcggatttgggcgacctcgtccgaatcatagtcttcatcccccggtgatggtacctgtactccaatctcaacaacatcccaaatgctagtgtggagtgaggttagatgatgcctcattttatcactccacatattataatcttcaccatcaaacatgggtggtttgcctagtgggacggaaagtaatggagtacgtatggaaatgcgagggtagcgtagggggatcttactaaacttcttgcgctcatggcgcttagaagttacggacggtgtgttagagccggaggtggatggtgacgaagagtcggtgtcgtagtagaccaccttcttcatctttttcttcttgtcaccgctctgacgcgacttgttgtgtgaagaagatcccttcaccttgttggcggactccccggatggagccttcccattgcttgtggcgggcttctcgccggtcccgatctccctcttggcggatgctcccgacat

SEQ ID NO: 4741 - DNA, 5007 bp, Zea mays
  Clone ID: TF_ZmC951_453
ttacagaggtctcagacggtccacgcttatcctccggacggtccatagtgcagactcggatttttgcattggttctgtccgagggtcatccttgtgtcgcggacgatccgctgcaagggcccggacggtccgcgcttggcctgtttttccaaaaagcttctcctgtccggaataatctatggtattccggacagtcgatttagtatagttgtagatgaacctttgacacttttgcaaattcttttgtaaatccttttcaaaggtcttttgcaaaatagtcaaaggtaaatgaataagattttgcgaagcatctcccgtgtcgaggtcgagatgcccatttgttcccatgggtgtcttgatgggcttggcatccttcatcccaaacttggttagaatgtcttgagtgtacttcgtttggctaatgaaggtgccctcttggagttgcttgacttggaatcctagaaaatacttcaactcccccatcatagacatcacgaatttttgtgtcatgatcctactaaattcttcacatgtagattcgttagtagacccaaatataatatcatcaacataaatttggcatacaaacaaatcattgtcaagagttttagtgaataaagtaggatcggccttgccgactttgaagccattagcaataaggaaatctctaaggcattcataccatgctcttggggcttgctttagcccataaagcgccttagagagcctatagacatggttagggtactcactatcttcaaagccgggaggttgctcaacatagacctcttccttgattggtccgttgaggaaggcacttttcacgtccatttgatacagctcattcctagtaacgttgttgagctcctcttgcatcgccaccacccaatccgaatcttgaagtgcttcctctaccctgtgtggctcaatagaggaaacaaaagagtaatgctcacaaaaatgtgcaacccgagatctagtggttacccccttatgaatgtcgtcgaggatggtgtcgacggggtgatctcgttggattgcttggtggactcttgggtgtggcggccttggttgttcatcctccttgtcttgatcatttgcatctctcccttgatcgttgtcgtcatcttgaggaggctcatctctttgatcttctccttcatcaacttgagcctcgtcctcattttgagttggcggagatgcttgcgtggaggaggatggttgatcttgtgcatgtggaggctcttcggattctttgggacacacatccccaatggacatgttccttagcgcgatgtacggagcctgttcttcacctatctcatcaagatcaacttgctctacttgagagccattagtctcatcaaacacaacgtcacaagaaacttcaacaagtcctgaggacttgttaaagactctatatgcctttgtgtttgagtcatatcctagtaagaagccttctacagttttaggagcaaatttagattttctacctctcttaacaagaataaaacatttgctaccaaaaactctaaaataagaaatatttggctttttaccggttaggagttcataggatgtcttcttgaggattcggtgtagatataaccggttgatggcgtagcaggcagtgttgacggcctcggcccaaaaccgatccggtgtcttgtactcatcaagcatggtcctcgccatgtccaaaagagttcgattcttcctctccactacaccattttgttgtggggtgtagggagaagagaactcatgcttgatgccctcctcctcaaggaagccttcaatttgagagttcttgaactccatcccgttatcgcttctaattttcttgatccttaagccgaactcaatttgagctcgtctcaagaatccctttaaggtctcttgggtatgagatttttcctgcaaaaagaacacccaagtgaagcgagaataatcatccccaataactagacagtacttacttccgccgatgcttatgtaagcgatcgggccgaataaatccatgtgtaggagctccagtggcctgtcacttgtcataatgttcttgtgcggatgatgagtgccaacttgctttcctgcttggcatgcgctacaaatcctgtctttctcaaaatgaacatttgttagtcccaaaatgtgctctcccttcagaagcttatgaagattcttcatcccaacgtgggctagtcggcgatgccagagccaacccatgttagtcttagcaattaagcatgtgtcgagttcagctctatcaaaatctaccaagtatagctgaccctctaacacacccttaaatgctattgaatcatcacttcttctaaaaacagtgacaccttggtttccatccccgaatgtgatagctcgttggggatcttggtttttctcatatgaggagaacatcttcttctcccctgtcatgtggtttgtgcacccgctgtcgatgatccaacttgagcccccagatgcataaaccttgccggatttgttagtcaaaacataagatgcatcaaaagtcttaaatgagatgctaggttcatttgatgcactaagagttttcttcttaggcaattttgcatgggttgatttcctagaactagatgtctcacccttatacataaaagcatgatttgggccagagtgagacttcctagagtgaattctcctaattttgctctcaggataaccggcagggtacaaaatgtaaccctcgttatcctgaggcatgggagccttgcccttaacaaaattagataatcttttaggaggggcattaagtttgacattgtcccctttttggaagccaatgccatccttgatgccagggcgtctcccactataaagcatactacgagcaaacttaaatttttcattttctagttcatgctcggcaattttagcatctaatttagctatatgatcattttgttgtttaatcatggaaaggtgatcatgtatagcattaacatcaatatctctacatctagtgcaaatagtgacatgctcagtggtagatgtagagggtttgcaagaattaagttcaacaatcttagcacgcaatatatcatttttatctctaagatcggaaattgtaacattgcaaacatctagttctttagccttagcaagcaatttttcattctcaatcctaaggctagcaagagaaatgtttaattcttcaatcttagcaagcaaatcatcattatcatttctaagatttggaattgaaacatcacaagcatttgaatcaaccttagcaattaaactagcattttcatttctaaggttgttaatggtctcatggcaagtgcttagctcattagatagtttttcacatttttctacttctagagcataagcatttttaaccttaacatgcttcttattttctttaataaggaagtcctcttgggtgtctaagagatcatccttctcatgaatagcactaatcaattcatttaatttttccttttgttgcatgtttaggttggcaaaaagaatgcgtaggttatcctcctcattgctagcattatcctcatcactagaggtttcatatttagtggaggatcttgattttaccttcttccttttgtcgtcctttgccatgaggcacttgtggccgacgttggggaagagaagacccttggtgacggcgatgtttgcggcgtcctcgtcggaggaggagtcggtggagctctcgtcggagtcccattcccggcaaacatgggcatcgccgcccttcttcttgtaatacttcttcttctcctttcttctccccttcttgtcgtcgcccctgtcactatcactagataatggacatttagcaatgaaatgaccgggcttaccacatttgtagcaaactttcttggagcggggcttgtaatcttcccccctcctttgcttgaggatttggcggaagctcttgatgatgagcgccatctcctcattatcgagctttgaggcgtcgattggttgtctacttgatgtagactcctccttcttctcctccgtcgctttgaatgcgatcggttgtgcttcggacgtggaggggccatcaagctcgttgattttctttgagcctttgatcatgcactcaaaacttacaaaatgcccgataacttcctcgggggtcattttagtatatctaggattaccacgaatcaattgaacttgagtgggattaagaaaaatgagagatcttaagataacatttaccacttcgtgatcgtcccacttcttgctcccgaggttgcgcacttggttcaccaaggttttgagccggttgtacatgtgttgcggctcctctcctttgtgaagccggaaccgaccgagctccccctcgatcgtttcccgcttggtgatcttggtgagctcgtctccctcgtgcgcggttttgagtacatcccaaatctctttagcactcttcaacccttgcaccttattatactcctctttgcttaaagaggcgaggagtatcgttgttgcttgagagttgaagtgctcgatttgggccacttcgtcctcatcataatcatcatcccctacgaaaggtacctgtacaccaaactcaacaacatcccatatacttttatggagcgaggttaggtgatatcgcatcatatcactccacctagcataatcttcaccatcaaacgttggtggtttgcctaatgggacagaaagtaaaggtgtatgtttaggaatgcaaggatagcgtagggggatcttactaaacttcttgcgctcatggcgcttagaagtgacggacggtgcgttggagccggaggtggaaggtgatgaagtatcagtctcgtagtagaccaccttcctcatcttctttttcttgtcgccatttcgatacgacttgtgggaagaggatttcttctctttccccttccccttgttgcgggactcttccgatgaagccttctcgtggcttgtagtgggcttgtcgccggtctccatctccctcttggtgtgatctcccgacat

SEQ ID NO: 4742 - DNA, 2697 bp, Zea mays
  Clone ID: TF_ZM3615.C3.o9.fg
atgtcgggagatcacgccaagaaagagatggagaccggcgacaagcccactacaagccaaggaagcacttcatcggaagagtcccgcaccaagaggaaggagaagaaaaaggactcctccaaacggaaggagaaaagattttcttcctcacatcacaaagagaagaaggaaaaatcttcttcccacaagtcgcatcggaaaggcgacaagcacaagaggatgaggaaagtggtctactacgagaccggcacttcatcaacatcgacctccgactccgatgcgccctccgtaacttctaaacgccaagagcgtaagaagtttagtaagatccccttacactatcctcgtacatctagacatactccattactttccgttccattaggcaaaccgccaacctttgacgatgaagattatgctaggtggagtgatttaatgaaatttcatctaacctcactccacaaaagtatatggaatgttgttgagtttggagcacaggtaccatccgtaggggatgaggattatgatgaggacgaggtggcccaaatcgagcacttcaactctcaagctacaaccatactcctcgcctctctaagcaaggaggagtacaacaaggtgcaagggttgaagaatgcaaaggagatttgggacctactcaagaccacgcacgaaggtgatgaactcaccaagatcaccaagcgggaaacgattgagggggagctcggtcgcttcagtcttcgccaaggggaggagccacaagatatgtacaaccggctcaaaaccttggtgaaccaagtgcgcaacctcgggagcaagaaatgggatgaccacgaggtggttaaggttattttgagatcacttattttccttaaccccactcaagttcaattaattcgtggtaatcctagatatactcaaatgacccccgaggaagttatcgggaattttgtgagctttgaatgtatgatcaagggctccaagaagatcaacgagcttgatgaaccctccacgtccgaagcacaaccggtggcatttaaggcgacggaggagaagaaggaggagtctacaccgagtagacaaccaattgacgcctccaagctcgacaatgaggagatggctttaatcatcaaaagctttcgccaaatcctcaagcaacggaaggggaaggattacaaatcccgttccaagaaggtttgctacaagtgtggtaagcccggtcactttatcgctaaatgtccattatcaagtgacagtgacagggataacgacaagaagggaaagaggaaagaaaagaagagataccacaagaggaggggcgatgcccacgtatgccgcgagtgggactccgacgagagctccaccgactcctcctcagacgaggacgccgccaacatcgccgtcaccaaggggcttctcttccccaacgtcggccacaagtgcctcatggcaaaggacggcaaaaggaagaaggtaaaatcaagatcctccactaaatatgaaacctctagtgatgaggatgatgctagcaatgaggaggataacttgcgcgttctttttgccaaccttaacatggaacaaaaagaaaaactaaatgagctaattagtgccatccatgagaaggatgatctcttgcactcacaagaagacttccttattaaggaaaacaaaaagcatgttaaggttaaaaatgcttatgctctagaggtagaaaaatgtgaaaaattgtctagtgagctaagtacttgccatgagaccattgacaaccttagaaatgaaaatactagattaaatgctaaggttgattctcatgtttgtgatgtttcaattcccaatcctagagataataatgatgatttgcttgccaggattgaagaattaaacatttctcttgctagccttaaaatcgttgaacttaactcatgcaaaccctctacatctagtgttgagcatgtttccatttgtactagatgtagagatgttgatattaatgctattcatgatcacatgactttgattaaacaacaaaatgatcatatagcaatattagatgcaaaaattgccgagcataacttagaaaatgaaaagtttaaatttgctagaagtatgctatataatgggagacaccctggcattaaggatggcattggctaccaaaggggagacaatgtcaaacttaatgcccctcctaaaaatttgtctaactttgttaagggcaaagctcccatgcctcaggataacgagggttacattttgtaccctgccggttatcccgagagcaaaattaggagaattcactctaggaagtctcactctggccctaatcatgcttttatgtataagggtgagacatctagttctaggcaaccaacccgtgctaagttgcctaagaagaagactcctaatgcatcaaatgatcatgacatttcatttaaaacttttgatgcatcttatgttttgactaataaatccggcaaggtttacgcatccgggggcacaagttggatcatcgatagcggatgcacaaaccacatgaccggggagaagaagatgttctcctcatatgagaaaaaccaagatccccaaagagcgatcacattcggggatggaaatcaaggtttggtcaaaggtgtcactgtctttagaagaagtgatgattcaatagcatttaagggagtgttagagggtcaactatacttg

SEQ ID NO: 4743 - DNA, 2238 bp, Zea mays
  Clone ID: TF_ZM4166.C5.o13.fg
atgtcgggagatcacgccaagaaagagatggggaccggcgagaagtccattacaagccacgggaaggctccatcgggagagtcctacaacaaagggaaggggaaggaaaaggaatcctcttcacacaagtcgcgtcggagcggtgacaagaagaagaagatgaggaaggtggtctactacgagaccgactcctcgtctccatccacctctggctttgacacgccgtccgtaacttctaagcgccatgagcgaaagaagtttaattatgctaggtggagtgatatgatgcgatatcacctaacctcactccacaaaagtatatgggatgttgttgagtttggtgtacaggtaccatccgtaggggatgaagactatgatgaggacgaagtagcccaaattgtgcacttcaactctcaagccaccactatactcctcgcctctctaagtcgagaggagtataataaggtgcaagggttaaagagcgcaaaggagatttgggacatgctaaagaccgagcacgaaggagacgaggtgaccaagatcaccaagcgggagacgatcgagggggagctcaatccggatgaccacgaagtggttaaggagccacaagacatgtacaactggctcaaaaccttggtgaaccaagtgtgtaacctcgggagcaaaaaatgggatgaccacgaagtggttaaggttattcttagatcacttgttttccttatccctactcaagttcaattaatttgtggtaatcctagatatacactaatgactcccgaggaagtgataggaaactttgtgagatttgagttgatgatcaaaggctcaaagaaaatcaacgagctagatggcccctccatgttcgaagcacaaccggtcgcattcaaagcgacagaagaaaagaaggaggaatctacatcaagtagaacacccatcgacgcctccaagctcgacaacaaggaaatggcgctcatcatcaagagcttccgccaaatcctcaagcaaaggaaggggaaagattacaaaccccgttccaagaaggtgtgctacaaatgtggtaagcccggtcatttcattgcaaaatgtccgctatctagtgccagtgacagggataacgacaagaagggcaagaggtaccacaagaagaggggcggcgatgcccatgtgtgtcgcgaatgggactccgacgagagctctagcgactcctcctccaacgaggacgccgccaacatcgtcgtcaccaaaggactcctcttccccaacgtcggccacaagtgcctcatggcaaaggacggcaaaaggaagaaggtaaaatcaaaatcctccactaaatatgaaacctctagtgatgaggataatgctagtgatgaggaggataatttacacatcctttttgccaaccttaacatgcaacaaaaggaaaaattgaatgaattaattagtgctattcatgagaaggatgaactcttggacacccaagaggacttcctaattaaggaaaataagaagcatgttaaggttaaaaatgcttatgctctagaaatagaaaaatgtgaaaaactatctagtgagctaagcaattgccatgacactattgccaaccttagaaatgaaaatgctaaattaattgctaaggttgattctaatatttgtgatgtttcaattcccaatcttagagatgaaaatgttgatttgcttgctaagattgaagaattgaatatctctcttgctagccttagaaatgaaaatgaaaaattgattgctaaggctaaagattttgatgtttgcaatgttactatttctaaccttagaagtgaaaatgatatattacatgctaaggttgtagaattaaaatcttgcaaaccttctacatctaccgttgagcatacttccatttgtactagatgtagagacattaacattgatgctattcatgatcatatggctttaattaaacaacaaaatgatcatatagccaaattagatgccaaaattaccgagcatgacttagaaaatgaaaaatttaaatttgctagaagcatgctctatagtgggagacgccctggcatcaaggatggcattggcttccaaaagggagacaatgtcaaaattaatgcccctcctaaaagattgtctaactttgttaagggcaaggctcccatgcctcaggataacgagggttacattttgtaccctgccggttatccccgagaacaaaataaggagaattcattctag

SEQ ID NO: 4744 - DNA, 2796 bp, Zea mays
  Clone ID: TF_ZM4328.C1.o1.fg
atgtcgggagatcacgccaagaaggagatggagaccggcgaaaagcccactacaagccacgggagcacttcatcggaagagtcccgcaccaagaggaaggagaagaagaagagctcctccaacaaagggaaggagaagaaatcttcttctcaccacaaagagaagaaggaaaaatcttcttcccacaagccgcatcggaaaggcgacaagcacaagaggatgaggaaagtggtctactacgagaccgacacttcatcaacatccacctccgactctgatgcaccgtccgtaacttctaagcgccaagagcgcaagaagtttagtaagatccccttacactatcctcatacatctagacatactccattactttccgttccattaggcaaaccgccaacctttgacggtgaagattatgctaggtggagtgatttaatgaaatttcatctaacctcactccacaaaagtatatggaatgttgttgagtttggagcacaggtaccatccgtaggggatgaggattatgatgaggacgaagtagcccaaatcgagcacttcaactcccaagccacaaccatactcttggcctctctaaatagagaggaatacaacaaggtgcaagggttgaagaatgcaaaggaaatttgggacctcctcaagaccgcgcacgagggtgatgaactaacaaagatcaccaagcgggaaacgatcgagggggagctcggtcgctttcaacttcgccaaggggaagagccacaagatatgtacaaccggctcaaaaccttggtaaaccaagtgcgcaacctcgggagcaaaaagtgggacgatcacgaggtggttaaggttattctaagagctctcattttccttaaccccactcaagttcaattaattcgtggtaatcctagatacccactaatgacccccgaggaagttatcgggaattttgtgagctttgaatgtatgattaaaggatcaaagaagatcaacgagcttgacgaactctccacatccgaggcgcaaccggtggccttcaaggcgacggaggagaagaaggaggagtctacaccaagtagacaaccaattgacgcctccaagctcgacaatgaggagatggctttaatcatcaaaagctttcgccaaatcctcaagcaacggaaggggaaagactacaaatcccgttccaagaaggtttgctacaagtgtggtaagcccggtcactttatcgctaaatgtccattatcaagtgacagtgacagggacaacgacaagaagggcaagagaagagaaaagaagaggtaccacaagaagaggggcgacgatgcccacgtgtgccgcgagtgggactccgacgagagctccaccgagtcctcctccgacgaggacgccgccaacatcgccgtcaccaaggggcttctcttccccaacgtcggccacaagtgcctcatggcaaaggacggcaaaaagaagaaggttaaatctaaatcctccacaaaatatgaatcctctagtgatgataatgctagtgatgaggaggataacttgcttaccctttttgccaatcttaacatggaacaaaaggaaaaattaaatgaattgattagtgctattcatgaaaaggatgaccttttggattcccaagaggattttctaattaaagaaaacaagaaacatgttaaggttaaaaatgcttatgctctagaagtagaaaaatgtcaaaaactatctagtgagctaagcacttgccatgacactattgccaaccttagaaatgaaaatgctagtttaattgctaaggttgagtctcatgtttgtgatgcttcaattcccaatcttagaaatgataataatgacttgcttgctaagattaaggaattgaatgattctcttgctaacattagagtagaaaatgaaaatttgattgctaaggctaaagattttgatgtttgcaattctattatttccgaccttagaactaagaatgatatgttacatgctaagattgttgaattaaaatcttgcaaaccctctacatctaatgttgagcatgtttctatttgtactagatgtagagatgttgatatcaatgctattcatgatcacatgtccttaattaaacaacaaaatgatcatatagcattattagatgcaaaaattgccgagcataacttggaaaatgaaaagtttaaatttgctagaagtatgctctataatgggagacgcccgggcatcaaggatggcattggcttccaaaggggagacaatgtcaaacttaatgcccctcctaaaaatttgtctaactttgttaagggcaaggctcccatgcctcaggataacaagggttacattttgtaccctgccggttatcccgagagcaaaattaggagaattcactctaggaagtctcactctggccctaatcatgcttttatgtataagggtgagacatctagttctaggcaaccaacccgtgccaagttgcctagaaagaaaactcctaatgcatcaaatgatcatgctatttcattcaaaacttttgatgcatcatatgtgcttactaacaaatccggcaaggtttatgcatccgggggcacaagttggatcatcgatagcggatgcacaaaccacatgaccggggagaagaagatgttctcctcatatgagaaaaaccaagatccccaaagaacaatcacattcggggatggaaatcaaggtttggtcaaaggtgtcactgtctttagaagaagtgatgattcaatagcatttaagggagtgttagagggtcagctatacttg

SEQ ID NO: 4745 - DNA, 5079 bp, Zea mays
  Clone ID: TF_ZM4398.C2.o1.fg
atgtcgggagaacacgccaagagggagatggagaccggcgacaaacccatcggcgacaagcccactacaagccacgagaaggcttcatcagaagagtcccacaacaaaaagaaaggtaaggaaaagaaagcttcttcccacaagtcgcatcagagtggcgacaagaaaaagaagatgaggaaggtggtctactacgagaccgatacttcatcaccttccacctccggctccgacgcgtcgtccgttacttctaagtgtcatgagcgcaagaagtttagtaagatccccctacgctatcctcgcattcctaaacatacacctttactttccgtcccattaggcaaaccaccaacatttgatggtgaagattatgctaggtggagtgatatgatacgatatcacctaacctcactccacaaaagtatatgggatattgttgagtttggtgtacaggtaccatccgtaggggatgaggattatgatgaggacgaagtagcccaaatccaacacttcaactcccaagccacaactatactccttacctctctaagtcgggaggagtataataaggtgcaagggttgaagagtgctaaagagatttgggacgtgctaaagaccgcgcacgaaggagacgaggtgaccaaaatcaccaagcgggaaacgatcgagggggagctcggtcgctttcgtcttcgccaaggggaggagccacaagacatgtacaaccggctcaaaaccttggtgaaccaagtgcgcaacctcgggagcaaaaaatgggatgaccacgaagtggtaaaggttattcttagatcacttgttttccttaaccctactcaagttcaattaatttgtggcaatcctagatatacactaatgactcccgaggaagtaatcgggaattttgtgagctttgaattgatgatcaaaggctcaaagaagatcaacgagctcgatggcccctccacgcccgaggcacaaccggttgcattcaaggcaacggaggagaagaaggaggagtctacatcaagtagacaaccaatcgatgcctccaagctcgacaatgaggagatggctttaatcatcaaaagctttcgccaaatcctcaagcaacggaaggggaaggactacaaatcccgttccaagaaggtttgctacaagtgtggtaagcccggtcactttatagctaaatgtccattatcaagtgatagtgacagggacaacgacaagaaggggagaagaaaggagaagaagagatactacaagaagaagggcggcgatgcccatgtttgccgggagtgggactccgacgagagctccaccgactcctcctccgacgaggacgccgccaacatcgccgtcaccaaaggcctcctcttccccaacgttggccacaagtgcctcatggcaaaggacggcaaaaagaagaaggttaaatccaaatcctccactaaatatgagtcctctagtgatgataatgctagtgatgaggaggataatttacgtaccctttttgccaacctaaacatgcaacaaaaggaaaagttaaatgaattaattagtgccatccatgagaaggatgacctcttggacacccaagaggacttcctaatcaaggaaaacaaaaagcatgttaaggttaaaaatgcttatgctctagaagtagaaaaatgtgaaaaactatctagtgagctaagcacttgccatgagactattgacaaccttagaaaagagaatcctaatttgttagctaaggttgattcaaatgtttgtgatgtttcaattcccaatcttagaaatgataataatgatttgcttgctaagattgaagaattaaacacttctattgctagccttaggattgagaatgaaaaattgcttgctaaggctaaagaacttgatgtttgcaatgttacaatttccgatcttagagataaaaatgatatattgcgtgctaagattattgaacttaattcttgcaaaccctctacatctaccactgagcatgtcactatttgcactagatgtagagatgttgatattgatgctattcatgatcatatggtattaattaagcaacaaaatgatcatatagaaaaattagatgctaaaattgccgagcatgaacttgaaaatgaaaaatttaaatttgctcgtagtatgctttatagtgggagacgccctggcattaaggatgacattggcttccaaaagggggacaatgtcaaacttaatgcctctcctaaaaaattatctaactttgttaaggggaaggctcccatgcctcaggataacgagggttacattttatatcctgccggttatcccgagagcaagattaggagaattcattctaggaagtctcactctggccctaaccatgcttttatgtataagggagagacatctagttctaggcaaccaacccgtgctaagttgcctaagaagaaaactcctagtgcatcaaatgaccatagcatttcctttaaaacttttgatgcttcttatgtgttaactaacaaatccggcaaggtagttgccaagtatgttgggggcaaacacaaggtttatgcatctgggggctcaagttggatcatcgacagcgggtgcacaaaccacatgacaggggagaagaaaatgttctcctcctacgagaaaaaccaagatccccaacgagctatcacattcggggatggaaaccaaggtttggtcaaaggtgtcattgtctttagaagaagtgatgattcaatagcatttaagggagtgttagagggtcagctatacttggtagattttgatagagctgaactcgacacttgcttaattgctaagactaacataggttggctctggcatcaccgactagcccatgttgggatgaagaatcttcataagcttctaaaaggagagcacattttgggactaactaatgttcattttgagaaagacagggaaaaatctcatacccaagaaaccttaaagggattcttgagacgggctcaaaacgagttcggcttaagagtcaagaaaattagaagcgacaacgggacggagttcaagaactctcaaatcgaaggcttccttgaggaggagggcatcaagcatgagttctcttctccctacaccccacaacaaaatggtgtagtggagaggaagaatagaactctattggacatggcaagaaccatgcttgatgagtacaaaacttcggatcggttgggcggaggcggtagaaaaactaaatttgctcctaagactatagaaggctttttgctaggatatgattcaaacacaagggcatatagagtctttaacaagtcttcgggactagttgaagtttcttgtgacgttgtgtttgatgagactaacggctctcaagtagagcaagttgatcttgatgagataggtgatgaagaggctctgtgcatcgcgctaaggaacatgaccattggggatgtgtgtcctaaggaatccgaagagcctccaaatgcacaagatcaaccatcctcctccacgcaagcatctccaccaactcaaaatgaggatgaggctcaagttgatgaaggagaagatcaaagagatgagccacctcaagatgacggcaatgatcaagggggagatgcaaaggatcaaaacaaggaggatgaagaaccaaggccgccacacccaagagtccaccaagcaatccaacgagatcaccccgtcgacaccatcctcggcgacattcataagggggtaaccactagatcttgtgttgctcatttttgtgaacattactcttttgtttcctctattgagccacacagggtagaggaagcactacaagattcggattgggtggtggcgatgcaagaggagctcaacaacttcactaggaacgaggtatggcatttagttccacgtcctaatcaaaatgttgtaggaaccaaatgggtcttccgcaacaagcaagacgagcatggtgtggtgacaaggaacaaagcccgacttgtggacaagggatactcccaagtcgaaggtttggatttcggtgaaacctatgcacccgtagctaggcttgagtcaattcgtatattgttagcctatgctacttaccatggctttaagctttatcaaatggacgtgaaaagtgccttcctcaatggaccaatcaaggaagaggtctatgttgagcaatctcctggctttgaagatagtgagtatcctaaccatgtctacaaactctctaaggcgctttatgggctcaagcaagccccaagatcatggtatgaatgcctaagagatttccttattactaatggcttcaaagtcggaaaagtcgatcctactttatttactaaaactcttgacaatgatttgtttgtatgccaaatttatgttgacgatattatatttgggtctactaacgaatctacatgtgaagaattcagtaggattatgacacagaaattcgagatgtcaatgatgggggagttgaagtatttcttaggatttcaagtgaagcaactccaagagggcaccttcattagccaaacgaagtatacccaagacattctaaacaagtttggaatgaaggatgccaagcccatcaagacacccatgggaaccaatgggcatctcgacctcgacacggaagggtgtaaaataaatagaaagagcacatcggggacttgccaattcttgggaagatccttggtgtcttgggcttcaaagaagcaaaattccgtagctctttctaccgctgaagccgagtatattgtcgcaggccattgttgcgcgcaattgctttggatgaggcaaacccttagggactatggttacaaattaaccaaagttcctcttttatgtgataatgagagtgcaatccgcatggcggataatcgcgttgagcatagccgcactaaacacatagtcattcggtatcattttctaagggatcaccaacaaaagggagatatcgacattgcatatattaacactaaagatcaattagccgatatctttaccaagccactagatgaacaaacttttaacaaacttaggcatgagctaaatattcttgattctaggaatttcttttga

SEQ ID NO: 4746 - DNA, 1914 bp, Zea mays
  Clone ID: TF_ZM4406.C6.o3.fg
atgtcgggagatcacgccaagaaggagatggaaaccggcgacaagcccactacaagccaagggagcacttcatcggaagagtcccgcaccaaaaggaaggagaagaagaagagctcctccaacaaagggaaggagaagaaaccttcttctcatcacaaagagaagaaggagaaatcttcctctcacaagccgcatcagagtggggacaagcataagaggatgaggaaagtggtctactacgagaccgacacttcatcaacatcgacctccggctccgatgcgccctccgtaacttctaaacgccaagagcgggatgaggattatgatgaggacgaagtggcccaaatcgagcacttcaactctcaagctacaaccatactccttgcctctctaagcaaggaggagtacaacaaggtgcaagggttgaagaatgcaaaggagatttgggacctactcaagaccgcgcacgagggtgatgaactcaccaagatcaccaagcgggaaacgatcgagggggagctcggtcgcttccgtcttcgccaaggggaggagccacaagatatgtacaaccggcttaaaaccttggtgaaccaagtgcgcaacctcgggagcaagaaatgggatgaccacgaggtggttaaggttattttgagatcacttattttccttaaccccactcaagttcaattaattcgtggtaatcctagatatactcaaatgacccccgaggaagttatcgggaattttgtgagctttgaatgtatgatcaagggctccaagaagatcaacgagcttgatgaaccctccacgtccgaaacacaaccggtggcatttaaggcaacggaggagaagaaggaggagtctacaccaagtagacaaccaattgacgcctccaagctcgacaatgaggagatggctttaatcatcaaaagctttcgccaaatcctcaagcaacggaaggggaaggattacaaatcccgttccaagaaggtgtgctacaaatgtggtaagcccggtcactttatcgctaaatgtccattatcaagtgacagtgacagggataacgacaagaagggaaagaggaaagaaaagaagaggtaccacaagagaaggggcggcgatgcccacgtatgccgcgagtgggactccgacgagagctccaccgactcctcctccgacgaggacgccgccaacatcgccgtcaccaagggactcctcttccccaacgtcggccacaagtgcctcatggcaaaggacggcaaaaggaagaaggaaaaatctcaaacccaagaaaccttaaagggattcttgagacgagctcaaaatgagttcggcttaaggatcaagaaaataagaagcgacaacgggacggagttcaagaattctcaaattgaaggcttccttgaggaggagggcatcaagcatgagttctcttctccctacacgccacaacaaaatggtgtagtggagaggaagaatcgaactctattagacatggcaagaaccatgcttgatgaatacaagacttcggatcggttttgggcggaggcggtcaacaccgcttgctacgccatcaaccggttgtatctacaccgaatcctcaagaagacatcatatgaactcctaaccggaaccaaatgggtcttccgcaacaagcaagatgagcatggtgtggtgacaaggaacaaagctcgacttgtggccaagggatactcccaagttgaaggatttcaagtgaagcaactccaagaaggcaccttcatcagccaaacaaagtacactcaagacattctaaacaagtttgggatgaaggatgccaagcccatcaagacacccatgggaactaatgggcatctcgacctcgacacgggagatttcaagccgaccctaaggaagctcaccttacggccgtaa

SEQ ID NO: 4747 - DNA, 2131 bp, Zea mays
  Clone ID: TF_ZM4444.C4.o5.fg
atgtcgggagatcacgccaagaaggagatggagaccggcgaaaagcccactacaagccacgggagcacttcatcggaagagtcccgcaccaagaggaaggagaagaaagactcctccaaaggaaaagagaagaaatcttcttcacacaaagagaagaaggagaagtcttcctcccacaagcctcgtcggagtggggacaagaaaaagaggatgaggaaagtggtctattacgagaccgattcttcatcggcatccacctccggctccgacgcggcatccgtcacttctaagcgccaagagcgcaagaagtatagtaagattcccctacgctaccctcgcatttctaaacatacacctttactttccgtcccattaggcaaaccaccaacttttgatggtgaagattacgctaggtggagtgatttaatgcgatttcatctaacctcactccacaaaagtatatgggatgttgttgagtttggtgcacaggtaccatccgtaggggatgaagattatgatgaggacgaggttgcccaaatcgagcacttcaactctcaagcaacaacaatactcctcgcttctctaagtagagaggagtataacaaagtacaagggttgaagagcgccaaggaggtttgggatgtgctcaaaaccgcacacgaaggagatgagcttacaaagatcaccaagcgggagacgatcgagggggagctcggtcggttccggcttcgcaaaggggaggagccacaaaatatgtacaaccggctcaagaccttggtgaatcaagtgcgcaacctcgggagcaagaaatgggatgatcacgaaatggttaaggttattttaagatcacttatttttcttaaccctactcaagttcaattaattcgtggcaaccctagatatacactaatgactcccgaggaagtaatcgggaattttgtaagttttgagtgcatgatcgaaggctcgaggaagatcaacgagcttgatgatccctccacgtccgaagctcaacccgtcgcattcaaggtgacggaggaaaagaaggaggagtctacatcaagtagaacacccatcgacgcctccaagctcgacaacgaggaaatggcgcttgtcatcaaaagctttcgccaaatcctcaagcaaaggagggggaaagactataagtcccgctccaagaaggtttgctacaagtgtggtaagcccggtcactttatagctaaatgtccattatcaagtgatagtgacaggggcgacgacaagaagggaagaagaaaggagaagaagaggtactacaagaagaagggcggcgatgcccatgtttgtcgggagtgggactccgacgaaagctctagcgactcctccgacgacgaggacgccgccaacatcgccgtcaccaagggacttctcttccccaacgtcggccacaagtgcttcatggcaaaggacgacaaaaagaagaaggatgatctcttggacacccaagaggacttccttattaaagaaaataagaagcatgttaaggttaaaaatgcttatgctctagaaattgagaaatgtgaaaaattatctagtgagctaagcacttgccatgagacactagacaaccttagaaatgaaaatgctaatttgttagctaaggttgattctcatgtttgtacttcaaatcctagagatgttaatgatgatttgcttgctaggattgaagaattgaacatttctcttgatagccttagaattgagaatgaaaaattgcttgctaaggctaaagattttgatgtttgcaatgttctatttctaaccttagaagtgaaaacgatatactacatgctaagatgtagagatgttgatattaatgctattcatgatcacatgtctttaattaaacaacaaaatgatcatatagcaaaattagatgctaaaattgccaagcataacttagagaatgaaaaatttaaatttgctagaagtatgctctacaatgggagacgccctggcatcaaggatggcattggcttccaaaggggagacaatgtcaaacttagtgtccctcctaaaagattgtctaatttggtaaagggcaaggctctcatgcctcaggataacgagggttacattttgtatcctgccg

SEQ ID NO: 4748 - DNA, 2391 bp, Zea mays
  Clone ID: TF_ZM4491.C2.o4.fg
atgaagaaagtggtctactacgagaccgactcttcctcgccctctacatccgaatccgacgccgcgtccgtcacttctaagcgccaagagcgcaagaagtatagcaaaccacctatgtttgatggtgaagattataatatgtggagtgataaaatgaggcatcatctaacctcactccacactagcatttgggatgttgttgagattggagtacaggagtataacaaggtgcaagggttaaagagcgccaaggagatttgggacgtgctcaagaccgcgcacgaaggagatgaggtgaccaaaatcaccaagcgggagacgatcgagggggagctcggacgcttccggcttcgccaaggggaggagccacaagacatgtacaaccgcttgaaaaccttggtgaaccaagtgcgcaacctcgggagcaccaaatgggatgaccatgagatggtcaaggttattctaagatccctcgttttccttaaccctacgcaagttcaattaattcgaggtgatcctagatatatgctaatgtctcccgaggaagtaataggcaaatttgtgagctttgagttgatgatcaaaggctcaaagaagatcatcgagcaagatggcccctccatgcccgaagcacaaccggtcgcattcaaggcaacggaggagaagaaggaagagtctacatcaagtagagtctccatcgacgcctccaagctcgacaacgaggaaatggcgctcatcatcaagagcttccgccaaatcctcaagcaaaggagggggaaggattacaaatcccgctccaagaaagtgtgctacaagtgtggtaagcccggtcattttattgcaaaatgtccattatcaagtgatagtgacaggggcgacgacaagaagggaaaaaggagagaaaagaagaggtaccacaagaagaggggcgaagatgcccatgtgtgccgcgaatgggactccgacgagagctccaccgacgaggacgccgccaacatcgccgtcaccaaagggctcatcttccccaacatcggccacaagtgcctcatggcaaaagacgacaaaaggaagaaggtcaaatcaaaatcctccactaaatatgaaacctctagtgatgaggataacttgcgcaccctttttgccaaccttaacatgcaacaaaaagaaaaattaaatgaattaattagtgctattcatgagaaggatgaacacttggactctcaagaggacttcctaattaaagaaaacaagaagcatgttaaggttaagaatgcttacgctctagaagtggaaaaatgtgaaaaattatctagtgagctaagcaagtgccatgatattattatcaaccatagaaatgagaatgctagtttaatagctaaggttgattcaaatgtatgtgatgattcaatttccaatcttagagatgataatcctaatttgcttgctaggattgaaaaattgaatgattctcttgctagccttagaaatgaaaatgaaaatttgattgctaaggctaaagacttagatgtttgcaatgtcacaattttcaatcttagaagtgaaaatgacattctacatgctaagattgttgaacttaaatcttgcaaatcctctacatctactactgagcatgtttccaattgcactagatgtagagacattaatgttgatgctattcatgatcacctagctttaattaagaaacaaaatgatcacatagcccaacttaatgccaaaattaatgagcatgacttagaaaatgaaaaatttaaatttgctagaagcatgctctatagtgggagacgccctgacatcaaggatggcattggattccaaaagggagacaatgtcaaacttaatgcccctcctaaaagattgtctaactttgttaagggcaaggctctcatgcctcaggataacgagggttacattttgtaccctgccggttatcccgagcataaaattaggagaattcactccaggaagtctcactctggccctaatcatgcatttatgtataagggtgagacatctagctctaggcaatcaacccgtgctaaattggctagaaagaaaactcctattgcatcaaatgattctaacatttcatttaaaacttttgatgcatcttatgttttaactaacaaatccggcaaggtttatgcatctgggggctcaagttggatcatcgatagcgggtgcacaaaccacatgacaggggagaagaaaatgttctcctcctacgagaaaaaccaagatccccaacgagctatcacattcggggatgggaatcgaggtttggtcaaaagattgggtaaatgttggggcgaaggcaaagccgccacccttcgctcgaagtcttcgccgttgtcgctggtccgacggagataa

SEQ ID NO: 4749 - DNA, 1671 bp, Zea mays
  Clone ID: TF_ZM4545.C15.o1.fg
atgtcgggagatcacgccaagaaggagatggagaccggcgaaaagcccactacaagccacgggagcacttcatcggaagagtcccgcaccaaaaggagggagaagaagaagagctcctccaacaaagggaaggagaagaaatcgtcttctcaccacaaagagaagaaggaaagatcttcctcccacaagccgcaccggagtggggacaagcaaaagaggatgaggaaagtggtctactacgagaccgacacttcatcaacatctacctccgactccgatgcgccctccgtaacttctaaatgccaagagcgtaagaagtttagtaagatccccctacactatcctcgcatttctaaacatgcacctttactttccgtcccattaggcaaaccaccaacttttgatggtgaagattatgctaggtggagtgatttaatgcgatttcatctaacctcactccacaaaagtatatgggatgttgttgagtttggtgcacaggtaccgtccgtaggggataaggattatgatgaggatgaggtggcccaaatcgagcacttcaactctcaagcaacaacgatactccttgcctctttaagtagagaggagtataacaaagtacaagggttgaagagtgccaaggaggtttgggatgtgctcaaaaccgcacacgagggagacgagctcaccaagatcaccaagcgggagacgatcgagggggagctcggtcggttccggcttggcaaaggggaagagccacaacacatgtacaaccggctcaagaccttggtgaaccaagtgcgcaacctcgggagcataaagtgggatgaccacgaagtggttaaggttattctaagatctcttattttccttaaccctactcaagttcaattaattcgtggtaatcgtagatatactaaaatgacccccgaggaagtaatcgggcattttgtaagttttgagtgcatgatcgaaggctcgaggaagatcaacgagcttgatgatccctccacatccgaagctcaacccgtcgcattcaaggcgacggaggacaagaaggaggagtctacaccaagtcgacaaccaatagacgcctccaagctcgacaatgaggaaatggcgctcgtcatcaagagcttccgccaaatcctcaagcaaaggagagggaaagactacaagtcccgctccaagaaggtttgctacaagtgtggtaagcccggtcactttattgctaaatgtccattatcaagtgatagtgacaggggcgacgacaagaaggggagaagaaaggagaagaagaggtactacaagaagaagggcggcgatgcccatgtttgtcgagagtgggactccgacgaaagctctagcgactcctccgacgacgccaacatcgccgtcaccaagggactcctcttccccaacgtcggccacaagtgcctcatggcaaagaacggcaaaaagaagaaggtcaaatccaactcctccactaaatatgagtcttccagtgatgataatgctagtggtgaggaagataatttgcgtactctttttgccaaccttaacatggaacaaaaggagaaattaaatgaactaattagtgccatccatgagaaggatgatctcttggactcccaagaggacttcctaatcaaggaaaataaaaaacatgttaag

SEQ ID NO: 4750 - DNA, 1599 bp, Zea mays
  Clone ID: TF_ZM4550.C4.o1.fg
atgtcgagagatcacgccaagaaggagatggtgaccggcgagaagcccgccacaagccacgggaaggctccatcgggagagtccgacaacaaggtgaatggatccccttcacacaacaagtcgcaacggagcggcgagaagaaaaagaagatgaagaaagtggtctactacgagaccgactcctcatcgccatccacctccggctccgacgcgccgtccgtcacttctaagcgccatgagcgcaagaagtttagtaagatccccttacgttatcctcacatttccaaacgcacccctttactttccgtcccactaggcaaaccaccggtttttgacggtgaagattattgtatgtggagtgataaaatgaggcaccatctaacctcactccatgctagcatttgggacattgttgagtttggtgcgcaggaaccatccgtaggggatgaaggctatgattcggacgaggtagcccaaatccggcaattcaactcacaagccaccactatactcctcgcctctctaagtcgagaggagtataacaagttgcaagggttgaaaagtgcaaaggagatttgggacgtactcaagaccgcgcacgaaggagacgaggtgaccaagatcaccaagcgggagacgatcgagggggagctcggtcgcttcatgcttcaccaaggggaggagccacaagcaatgtacaaccggctcaagactttggtgaaccaagtgcgcaacctcgggagcactaaatgggatgaccatgagatggtcaaggttattcttagatcactcatatttattaaccctactcaagttcaattaattcgtggtgatccaaggtataaactaatgtctcccgaggaagtgataggaaaatttctgagctttgaattaatgatcaaaggctctaagaaaatcatcgagcaaggcgtctcctccacaactgatgtgcaacccgttgcattcaaagcaacggaggagaagaaagatgagtctacgtcaagtaggctccccatcgacgcctccaagctcgacaacaaggagatgcaaagaagggggaaggactacaagccccgctccaagaaagtttgctacaagtgtggtaagcccggtcattttattgcaaaatgtccattatcaagtgatagtgacaggggcgacaacaagaaggggagaaggaaggagaagaagaaatattacaagaagaagggcggcgatgcccatgtatgccgcgagtgggactccaacgagagctccaccgactcctcctccgacgaggatgccgccaacatcgccgtcaacaagggccttctcttccccaacgtcgaccacaagtgcctcatggaaaaggacggcaagaagaagaaggtaaaatcaagatcctccgctaagtatgcaacttctagtgatgaggataattctagtgatgatgaggataacttgcttactctttttgccaatcttaacatgcaacataaaaagaaattgaatgaattgattagtgctattcatgagaaggatgaactcttggatagccaagaggacttccttattaaggaaaacaaaaaacatgttaaggttaaaatgcttatgctctag

SEQ ID NO: 4751 - DNA, 1923 bp, Zea mays
  Clone ID: TF_ZM4554.C3.o2.fg
atgtcgagagatcacgccaagaaggagatggtgaccggcgagaagcccgccacaagccacgggaaggctccatcgggagagtccgacaacaaggtgaatggatccccttcacacaacaagtcgcaacggagcggcgagaagaaaaagaagatgaagaaagtggtctactacgagaccgactcctcatcgccatccacctccggctccgacgcgccgtccgtcacttctaagcgccatgagcgcaagaagtttagtaagatccccttacgttatcctcacatttccaaacgcacccctttactttccgtcccactaggcaaaccaccggtttttgacggtgaagattattgtatgtggagtgataaaatgaggcaccatctaacctcactccatgctagcatttgggacattgttgagtttggtgcgcaggaaccatccgtaggggatgaaggctatgattcggacgaggtagcccaaatccggcaattcaactcacaagccaccactatactcctcgcctctctaagtcgagaggagtataacaagttgcaagggttgaaaagtgcaaaggagatttgggacgtactcaagaccgcgcacgaaggagacgaggtgaccaagatcaccaagcgggagacgatcgagggggagctcggtcgcttcatgcttcaccaaggggaggagccacaagcaatgtacaaccggctcaagactttggtgaaccaagtgcgcaacctcgggagcactaaatgggatgaccatgagatggtcaaggttattcttagatcactcatatttattaaccctactcaagttcaattaattcgtggtgatccaaggtataaactaatgtctcccgaggaagtgataggaaaatttctgagctttgaattaatgatcaaaggctctaagaaaatcatcgagcaaggcgtctcctccacaactgatgtgcaacccgttgcattcaaagcaacggaggagaagaaagatgagtctacgtcaagtaggctccccatcgacgcctccaagctcgacaacaaggagatgcaaagaagggggaaggactacaagccccgctccaagaaagtttgctacaagtgtggtaagcccggtcattttattgcaaaatgtccattatcaagtgatagtgacaggggcgacaacaagaaggggagaaggaaggagaagaagaaatattacaagaagaagggcggcgatgcccatgtatgccgcgagtgggactccaacgagagctccaccgactcctcctccgacgaggatgccgccaacatcgccgtcaacaagggccttctcttccccaacgtcgaccacaagtgcctcatggaaaaggacggcaagaagaagaaggtagaaaaatgtgaaaaattaactagtgagctaagcacttgccatgacactatttctaaccttagaaatgaaaattccaaaataattgctaaggttgagaagtcaaatgtttgtgatgattcaattgttgatcttagaaatgataatgctagtttaattgctaagattgacatgttgaatggttctcttgctagccttaagattgaaaatgaaaaattaattgctaaggctaaagatttaaatgtttgcaatgctactattaccaatcttagagacgataatgctattttacaaactaacattgttgaattaaatacttgcaaaccctctacatctaccgttgagcatgtctcaatttgcactaaatgtagagatattaatgttgatgctattcatgatcacttagctttaattaagaaacaaaatgatcacatagctcaacttagtgctaagattaatgagcatgacttagaaaatgaaaaatttaaatttgctagaagcatgctctatagtgggagacgccctgacattaaggatggaattggcttccaatag

SEQ ID NO: 4752 - DNA, 4086 bp, Zea mays
  Clone ID: TF_ZM4579.C1.o1.fg
atgtcgggagatcacaccaagagggagatggagaccggcgacaagcctactacgagtcacgggagcacttcatcggaagagtcccgcaccaagaggaaggagaagaagaaggactcctccaacaaagggaaggggaaggagaagaaatcttcttcccacaagtcgcatcggagaggcgacaagaacaagagaatgaggaaagtggtctactacgagaccgacacttcatcaacgtcgacctccgactccgacgtgccgtcggtaacttctaagcgccaagagcgcaagaagtatagtaagatccccctacgctacccccacatttcaaagcgtacttctttactctccgttccattaggcaaaccaccggtttttgacgatgaagattataatatgtggagtgacaaaatgaggcaccatctaacctcactccacacaagcatatggaatgttgttgagtttggtgtacaggtaccatccgtaggggatgaagactacgactcggacgaggtggcccaaattcaccactttaactcccaagcaaccactatactcctcgcctctctaagtcgagaggagtataataaggtgcaagggttaaaatgtgcgaaggaaatttgggacgtactcaagaccgcgcacgagggagacgaggtgacaaagatcaccaagtgggagacgatcgagggggagctcggtcgcttcatgcttcaccaaggggaggatccacaagctatgtacaaccgcttgaagaccttggtgaaccaagtgcgcaacctcgggagcgaaaaatgggatgaccatgagatggtcaaggttattcttagatctctcgtatttcttaaccctacacaagttcaattaattcgaggtgatcctagatataagctaatgtctcccgaggaagttataggcaaatttgtgagctttgagctaatgattaaaggctcaaagaaaatcatcgagcaaggcacctcctccacgcccgaggcacaaccggtcgcattcaaggcgacggaggagaagaaggaagagtctacatcaagtagacaactcatcgacgcctccaagctcgacaacgaggaaatgacgctcatcatcaagagtttccgccaaatcctcaagcaaaggagggggaaagactacaagccccgctccaagaaagtatgctacaaatgtggtaagcccggtcatttcattgctaaatgtccattatctagtgatagtgacagggacgatgacaagaaggggagaagaagggaaaagaagagatatcacaagaagaagggcggcgatgcccacgtatgccgcgagtgggactccgacgagagctccaccgattcctccttcgacgaggacgccaccaatatcgccatcaccaagggacttctcttccccaacgtcggccacaagtgcctcatggccaaggacagcaaaaggaagaaggttaaatccaaatcctccactaaatatgagtcctctagtgatgataatgctagtgatgaagaggataatctgcgtactctttttgtcgacctcaacatgcaacaaaaggaaaaactaaatgagctaattagtgtcatccatgagaaggatgatctcttagactcccaagaggacttcctaatcaaggaaaacaaaaagcatgttaaggtaaaaaatgcttatgctctagaagtagaaaaatgtgagaaattatctagtgagctaagcacatgccataacactattgccaaccttagaaatgaaaatgccaaattaattgctaaggttgattctcatgtttgtgatgtttcaattcccaatcttagaaatgataatgatgatttgcttgctaagattgaagaattaaacatctctcttgctagccttagggttgaaaatgaaaaattaattgctaaggctaaagaattagatgtttgcaatgttacaatttccgatcttagagataacaatgatattttgcgtgctaagattgttgaactcaattcttgcaaaccctctacatctaccattgagcatgtttctatttgcactagatgtagagacgttgatattgatgctattcatgatcacatggtcttaattaaacaacaaaatgatcatatagcaaaattagatgctaaaattgccgagcataacttagaaaatgaaaagtttaaatttgctagaagtatgctctataatgggagacgccctggcatcaaggatggcattgacttccaaaggggagacaatgtcaaacttagtgcccctcctaaaagattgtctaattttgttaagggcaaggctcccatgcctcaggataacgagggctacattttgtactctgccggctatcctgagagcaatattaggagaattcattctaggaagtctcactctggccctaaccatgcttttatgtataagggtgagacatctagctctaggcaaccaacccgtgctaagttgcctaagaagaaaactcctaacgcatcaaatgatcatgacatttcattcaaaacttttgatgcatcatatgtgcttactaacaaatccggcaaggtttatgcatccgggggctcaagttggatcatcgacagcgggtgcacaaaccacatgacaggggagaagaaaatgttctcctcctacgagaaaaaccaagatccccaacgagctatcacattcggggatggaaaccaaggtttggtcaaaggtgtcactgtctttagaagaagtgatgattcaatagcttttaagggagtgttagagggtcagctatacttggtagattttgatagagctgaactcgacacttgcttaattgctaagactaacatgggttggctctggaaccgccgactagcccatgttgggatgaagaatcttcataagcttctaaaggaagaacacattttaggactaacagatgttcattttgagaaagacaggatttgtagcgcatgccaagccgggaagcaagttggtgttcatcatccacacaagaacatcatgacgactgacaggccactggaactcctacacatggatttattcggcccgatcgcttacataagcatcggcgggatggagaggaagaatcgaactctattggacatggaaagaaccatgcttgatgagtacaagacaccggatcggttttgggccgaggcggtcaacaccgcctgctacgccatcaaccggttatatctgcaccaaatcctcaagaagacatcctatgaactcctaactggtaaaaagcccaatatttcatattttagagtttttggtagcaaatgctttattcttgttaaaagaggtagaaaatctaaatttgctcctaaaactgtagaaggctttttactaggatatgactcaaacacaagggcatatagagtctttaacaagtcctcaggacttgttgaagtttcttgtgacgttgtgtttgatgaaactaacggctctcaagtagagcaagttgatcttgatgagataggtgacgaagaggctccgtgcatcgcgctaaggaacatgtccattggggatgtgtgtcctaaggaatccaaagagcctccaaatgcacaagatcaaccatcttcctccacacaagcatctccaccaactcaaaatgaggatgaagctcaagttgatggaggagaagatcaaagtggtgagccacctcaagatgacgacaatgatcaaggggaagatgcaaatgatcaagacaaggaggatgatgaaccaaggccgccacacccaagagtccaccaagcaatccaacgagatcaccccgtcgacaccatcctcggcgacattcataagggggtaaccactagatctcgtgttgcacatttttgtgagcattactcttttgtttcctctattgagccacacagggtagaggaagcacttcaagattcggattgggtgatggcaatacaagaggagctcaacaacttcattaggaacgaggtatggcatttagttccacgtcctaaccaaaatgttgtaggaaccgaatgggtcttccgcaacaagcaagatgagcatggtgtggtgacaaggaacaaagctcgactcgtggccaaggggtacaagtcgaag

SEQ ID NO: 4753 - DNA, 2313 bp, Zea mays
  Clone ID: TF_ZM4589.C2.o4.fg
atgtcgggagatcacaccaagaaggagatggagaccggcgaaaagcccactacaagccacgggagcacttcatcggaagagtcccgcaccaagaggaaggagaagaagaaggactcctccaagcggaaggagaaaaagtcctcctcttctcaccacaaagagaagaaggaaaaatcttcttcccacaagccgcatcggaaaggcgacaagcacaaaaggatgaggaaagtggtctactacgagaccgacacttcatcaacatcgacctccgactccgatgcgccctccgtcacttctaagcgccaagagcgcaagaagtatagggacgaggactatgatgaggatgaggtggcccaaatcgagcacttcaactctcaagcaacaacaatactcctcgcctctctaagtagagaggagtataacaaagtacaagggttgaagagcgccaaggagatttgggatgtgctcaaaaccgcgcacgagggagacgagctcaccaagatcaccaagcgggaaacgatcgagggggagctcggtcggttccggcttcgcaaaggggaggagccgcaacacatgtacaaccggctcaagaccttggtgaatcaagtgcgcaacctcgggagcgtaaaatgggatgaccacgagatggttaaggttattctaagatctcttattttccttaaccctactcaagttcaattaatccgtggtaatcctagatatactaaaatgacccccgaggaagttatcgggaattttgtgagttttgagtgcatgatcgaaggctcaagaaagatcaacgagcttgatgatgccaccacatccgaagctcaacccgttgcattcaaggcaacggaggagaagaaggaggagtctacaccaagtcgacaaccaatagacgcctccaaactcgacaatgaggaaatggcgctcgtcatcaagagcttccgccaaatcctcaagcaaaggagggggaaggattacaaatcccgctccaagaaggtctgctacaagtgtggtaagcccggtcactttattgctaaatgtccattatcaagtgatagtgacaggggcgacgacaagaaggggagaagaaaggagaagaaaaggtactacaagaagaagggcggcgatgcccatgtttgtcgggagtgggactccgatgaaagctctagcgactcctccgacgacgaggacgccgccaacatcgccgtcaccaagggactcctcttccccaacgtcggccacaagtgcctcatggcaaaggacggcaaaaagaagaaggaaaaatctcaaacccaagagaccttaaaaggattcttgagacgggctcaaaatgagttcggcttaaggatcaagaaaattagaagcgacaacgggacggagttcaagaactctcaaatcgaaggcttccttgaggaggagggcatcaagcatgagttctcctctccctacacgcctcaacaaaatggtgtagtggagaggaagaatcgaactcttttggacatggcaaggaccatgcttgatgagtacaagacttcgaaccggttttgggccgaagcagtcaacaccgcctgctacgccatcaaccgggtagaggaagctctccaagattcggattgggtggtggcgatgcaagaggagctcaacaacttcactagaaatgagagccgaggtgaccgccgtcactccaccgctccactggccaatctgacagaaggacagcgccgcctgcgccactccgactgcagtgccactcgacagagtgagtctgacaggcaattaggccttgccaaaggcgccacggcgaactccgctccgcccgaccccagggctcggactcgggctaagacccggaagacggcgaactccgctccgcccgaccccagggctcggactcgggctaagacccggaagacggcgaactccgctccgcccgaccccagggctcggactcgggctaagacccggaagacggcgaactccgctccgcccgaccccagggctcggactcgggctaagacccggaagacggcgaactccgctccgcccgaccccagggctcggactcgggctaagacccggaagacggcgaactccgctccgcccgaccccagggctcggactcgggctaagacccggaagacggcgaactccgctccgcccgaccccagggctcggactcgggctaagacccggaagacgacgaaactccgcctcgcccgaccccagggctcggactccgccctggcctcggccggacgacttccgcctcgcccgaccccctggctcgggctcggccacggcaactga

SEQ ID NO: 4754 - DNA, 2896 bp, Zea mays
  Clone ID: TF_ZM4590.C6.o1.fg
atgtcgggagatcacgccaagaaggagatggagaccgacgacaagcccactacgagtcacgggagcacttcatcggaagagtcccgcaccaagaggaaggagaagaggaaggactcctccaaagggaagaagtcttcttcacactccaaagggaaggagaagaaatcctcttctcaccacaaagagaagaaggaaaaatcttcttcccacaagccgcatcggagtggggacaagaagaagaggatgaggaaggtggtctactacgagaccgattcttcatcaacatccacctccggctccgacgcggcatccgtcacttctaagcgccaagagcgcaagaagtatagtaagattcccctacgctaccctcacatttctaaacatacacttttactttccgtcccattaggcaaaccaccaacttttgatggtgaagattacgctaggtggagtgatttaatgcgatttcatctaacctcgctccacaaaagtatatgggatgttgttgagtttggtgcacaggtaccatccgtaggggatgaagattatgatgaggatgaagtggcccaaatcgagcacttcaactcccaagccacaaccatactcctcgcctctctaagtaaggaggaatacaacaaggtgcaagggttgaagaatgcaaaggagatttgggacttactcaagaccgcgcacgagggtgatgaactcaccaagatcaccaagcgggaaacaatcgaaggggagctcggtcgcttccgtcttcgccaaggagaggagccacaagatatgtacaaccggctcaaaaccttggtgaaccaagtgcgcaacctcgggagcaagaaatgggatgatcacgaggtggttaaggttattttaagatcgcttattttccttaaccctactcaagtacaattaattcgtggcaacccaagatatacactaatgactcccgaggaagttatcgggaattttgtgagctttgaatgtatgatcaagggctcaaagaagatcaatgagcttgatgatccctccacgtccgaagcacaaccggtggcatttaaggcgacagaggaaaagaaggaggagtctgcaccgagtagacaaccaattgacgcctccaagctcgacaatgagaagatggctttaatcatcaaaagctttcgccaaatccacaagcaacggaaggggaaggattacaaatcccgttccaagaaggtttgctacaagtgtggtaagcccggtcactttattgctaaatgtccattatcaagtgacagtgatagggataacgacaagaagggcaagaggagagaaaagaagaggtaccacaagaagaggggaggcgatgcccacgtatgccgcgagtgggactccgacgagagctccaccgagtcctcctccgacgaggacgccgccaacatcgccgtcaccaagggactcctcttccccaacgtcggtcacaagtgcctcatggcaaatgacggcaaaaagaagaaggttaaatctaaatcctccactagatatgagtcttctagtgatgaaaatgctagtgatgaggaggataacttgcataccctttttgccaaccttaacatggaacaaaaagaaaaattaaatgaattgattagtgctattcatgagaaggatgatctcttggactctcaagaggacttccttattaaggaaaacaaaaagcatgttaaggttaaaaatgcttatgctctacaaattgaaaaatgtgaaaaattgtctagtgagctaagcacttgccatgagaccattgacaaccttagaaatgaaaatggtaaattacttgctaaggttgattcccatgtttgtattgattcaatttccaatcctagagatgataatgttgatttgcttgctaggattgatgaattgaatatttctcttgatagccttaggattgaaaatgaaaagttaattgctaaggctaaagattttgatgtttgcaatactactatttccgaccttagaactaagaatgatatgttgcatgctaaggttgtagaactaaaatcttgcaaaccctctacatctaccgttgagcacacttctatttgtactagatgtagagatgttgatatcaatgctattcatggtcacatggctttaattaaacaacaaaatgatcatatagcaatattagatgctaaaattgtcgagcataacttagaaaatgaaaaatttaaattcgctagaagtatgctctataatgggagacgccctagcatcaaggatggcattggctaccaaaagggagacaatgtcaaacttagtgcccctcctaaaagattgtctaattttgttaagggcaaggctcccatgcctcaggataacgagggttacattttgtaccctgccggctatcccgagagcaaaattaggagaattcactctaggaagtctcactctggctctaaccatgctttcatgtataagggtgagacatctagctctaggcaaccaacccgtgccaagttgcctagaaagaaaactcctaatgcatcaaatgatcatgatatttcatttaaaacttttgatgcatcttatgttttgactaacaaatccggcaagatagttgccaagtttgttgggggcaaacacaagggttccaagacttgtgtttgggtacccaaagttcttgtttctaatgccaaaggacccaagaccgtttgggtttatgcatccgggggctcaagttggatactcaacagcgggtgcacaaaccacatgacaggggagaagaagatgttctcctcatatgagaaaaaccaagatccccaacgagctatcacattcggggatggaaatcaaggtgtcactgtctttagaagaagtgatgattcaatagcatttaagggagtgttagagg

SEQ ID NO: 4755 - DNA, 1602 bp, Zea mays
  Clone ID: TF_ZM4611.C1.o1.fg
atggtgatcggcggtaagaagtccgctacaagccacaggaaggctccatcaagggagtccgccaacaacaagaaggatggatccccttcacgcattcgatcgcacaagagtggtgagaagaagaagaaaatgaagaaggtggtctactacgagaccgactcttcctcgccctctacatccggatccgacgccgcatccgtcacttctaagcgccaagagcgcaagaagtatagggatgaagattatgatgaggacgaggtggcccaaatcgtgcacttcaactcccaagccaccactatactcctcacctctctaagtcgagaggagtataacaaggtgcaaggattgaagagcgccaaggagatttgggacgtgctaaagaccgcgcacgaaggagacgaggtgaccaagatcaccaagcaggagacgatcgagggggagctcggttgcttccggcttcgccaaggggaggagccacaagaaatgtacaacaggctcaagaccttggtgaaccaagtgcgcaacctcgggagcaaaaaatgggatgaccatgaaatggtcaaggttattcttagatcactcgtttttcttaaccctacgcaagtacaattaatacgtggtgatcctagatatacactaatgtctcccgaggaagtaataagaaaatttgtgagctttgagttgatgatcaaagtctcaaagaaaatcatcgagcaagatgcgccctccacgtccgaagcacaaccggtcgcattcaaggcaacggagaagaagaaggaagagtctacatcaagtagactccccatcgacgcatccaagctcgacaacgaggaaatggtgctcatcatcaagagcttccgccaaatccttaagcaaaggagggggaaggactacaaatcccgctccaagaaagtgtgctacaagtgtggtaagcccggtcattttattgctaagtgtccattatcaagtaacaatgacagaggcgaagacaagaaaggaaagaggagagaaaagaagacatactacaaaaagaagggcggcgatgcccatgtgtgccgcgagtggaactccgacgagagctccaccgactcctccgacgacgaggacgccgccaacattgccgtcaccaagggactcctcttccccaacgtcggccacaagtgcctcatggcaaaagacgacaaaaggaagaaggtaaaatcaagatcctccactaaatatgcatcctctagtgatgaagataattctagtgatgaggaggataacttgcgcaccctttttgccaacctaaacatgcaacaaaaagaaaagttgaatgaattaattagtgctattcatgaaaaggatgaactcttggactcccaagaggacttcctaattaaggaaaataagaagcatgttaaggttaaaaatgcttacgctctagaagtagaaaaatgtgaaaaactatctagtgagctaaacacttgccatgatattattgccaaccttagaaatgagaatgctaaaataattgctaaggttgattcaaatgcttgtgatgtttcaattcccaatcttagagatgataatgttagttatttgctaagattgaagaattga

SEQ ID NO: 4756 - DNA, 3738 bp, Zea mays
  Clone ID: TF_ZM4618.C5.o1.fg
atgtacaaccggctcaagaccttggtgaaccaagtgcgcaacctcgggagcaccaaatgggatgaccatgaaatggtcaaggttattctaagatcacttgtatttcttaatcctacacaagttcaattaattcgtggtgatcctagatacaagctaatgtctctcgagaaggttataggaaaatttgtgagctttgaattgatgatcaaaggctccaagaaaatcatcgagcaaggcgcctcctccacacccaaaatgcaacccgtcgcattcaaggcgacggaggagaagaaagaagagtctacatcaagtagactccccatcgacgcctccaagctcgacaacgaggagatggcgctcatcatcaagagctttcgccaaatcctcaagcaaaggagggggaaggacttcaagccccgctccaagaaagtttgctacaagtgtggtaagcccggtcattttatcgctaaatgccctttatctagtgatagtggcagggataacgacaagagggggaagaagaaggagaagaagagatactacaagaagaagggtggcgatgcccatgtttgccaggagtgggactccaatgagagctccactgactcctcctccgatgaggatgccgcaaacatcaccatcaacaagggtcttctattccccaacgtcggccacaagtgcctcatggcaaaggacgacaaaaggaagaaggatgatttgctcaccctttttgccaacttaaacatgcaacaaaaagaaaaattgaatgaattgattagtgctattcatgagaaggatgaactcttggatagccaagaggacttccttattaaagaaaataagaatcatgttaaagttaaaaatgcttatgctcaggagatagaaaaatgtgaaaaattaactagtgagctaagcacttgccatgacactatttccaaccttagatttgaaaatgataaattgattgctaaggttgagaaagtaaatgttggtgatgattatcttgtcaaccttagaaatgataatgctaatttgattgctaagattgacaaattgaatgcatctctctctatccttaaaattgagaatgaaaaattaattgctaaggcaaaagatttaaatgtttgcaatgtttctatttccaatcttagagatgagaacgctattttacatgctaagattgttgaattaagtacttgcaaaccctctacatctgccgttgagcatgttactatttgcactagatgtagagacattaatgttgatgctattcatgatcacctagccctaattaaacaacaaaatgatcacatagctcaacttagtgccaaaattagtgagcatgacttggaaaatgaaaaatttaaatttgctagaagcatgctctatagtgggagacgcccaggcattaaggatggtattagcttccaaaagggagacaatgtcaagcttaatgcccccaagaaattatctaactttgttaagggcaaggctcccatggctcaggataacgagggttacattttataccctgccggttatctcgagcacaaaattaggagaattcattctaggaagtctcactctggctctcatcatgcttttatgtataagagtgaggcatctagctctaggcaatcaacccatgttaaattgcctaaaaagaagtctcctattgcatcaaatgaacctaatatttcatttaagacttttgatgcatcttatgtgctcactaacaaatcaggcaaagtagttgccaaatatgttgggggcaaacacaaggggtcaaagacttgtgtttgggtacccaaggtttatgcatccgggggctcaagttggatcattgatagcgggtgcacaaaccacatgacaggggagaaaaggatgttatcctcttacgagaaaaaccatgatccccaaagagctatcacattcggggatggaaatcaagattctttagattacaacttgctttctgtttctcaattatgcaaaatgggttacaactgtctttttacggatataggtgttactatctttagaagaagtgatgattcagtagcatttaaggaaaaatcacaaacccaagagaccttagagggattcttgagacgagctcaaaatgagttcggcttaaggatcaaaaagattagaagcgataatgggatggagttcaagaactcacaaatagaaggcttccttgaggatgagggcatcaagcatgagttctcttctccctacacaccacaacaaaatggtgtagtggagaggaagaatagaactctacttaacatggcgaggaccatgcttgatgaatacaagactttggaccggttttgggcggaagcaatcaacaccgcttgctacgccatcaactgtctctaccttcaccgaatcctcaagaagacatcatatgaactcctaaccggtaaaaatcctaatgtttcatattttagagtctttggtagcaaatgctttattcttgttaaaagaggtagaaaatctaaatttgctcctaaggctgtagaaggctttttacttggatatgattcaaacacaagggcatatagagtctttaacaagtccactggactagctgaagtttcttgtgacattgtgtttgatgagactaacggctctcaagtagagcaagttgatcttgatgagctagatgatgaagaggctccatgcgtcgcgctaaggaacatgtccattggggatgtgtgccctaaggaatccgaagagcctccacaagcacaagatcaaccatcttcctcaatgcaagcatctccaccaactcaagatgaggatcaagctcaagaggatgaaaatgaagatcaagaagatgagccacctcaagaaggggacaatgatcaagggagagatgcccatgatcaagacaaggaagatgatgacggtccaaggccgccacacccaagagtccaccgagcaatacaaagagatcaccccgtgaactccatccttggcgatattcataagggggtaactactcgatctcgtgttgctcatttttgtgaacattactcctttgtgtcttctattgagccatacagggtagaagatgcattaagggattcggattgggtgttggcaatacaagaggagctcaacaacttcacgaggaatgagctttatcaaatggacatgaagagtgccttcctcaatggaccaatcaaggaggaggtctatgttgagcaacctcccggctttgaggatagtgagtaccctaatcacgtctataaactctctaaggcactttatgggctcaagcaagccccaagagcatggtatgaatgcctaagagattttcttatagctaatggcttcaaagtcggaaaagccgatcctactctctttactaaaacaattgcaaatgatttgtttgtatgccaaatttatgttgatgatatcatatttggatctactaacaaatctacttgtgaagagtttagtaggattatggttcaaaaattcgagatgtctatgatgggggagttgaagtatttcttaggatttcaagtcaagcaactccaagagggcaccttcatcagccaaacgaagtacattcaagacatactcaccaagtttgggatgaaggatgccaagcccatcaagacacccatgggaaccaatgggcatctcgacctcgacacgggaggtaaatccgtagatcaaaaggtttgtgttggcatcaatcaccaaaaagggggagattga

SEQ ID NO: 4757 - DNA, 927 bp, Zea mays
  Clone ID: TF_ZM4630.C3.o1.fg
atgtctctcgagaaggttataggaaaatttgtgagctttgaattgatgatcaaaggctccaagaaaatcatcgagcaaggcgcctcctccacacccaaaatgcaacccgtcgcattcaaggcgacggaggagaagaaagaagagtctacatcaagtagactccccatcgacgcctccaagctcgacaacgaggagatggcgctcatcatcaagagctttcgccaaatcctcaagcaaaggagggggaaggacttcaagccccgctccaagaaagtttgctacaagtgtggtaagcccggtcattttatcgctaaatgccctttatctagtgatagtggcagggataacgacaagagggggaagaagaaggagaagaagagatactacaagaagaagggtggcgatgcccatgtttgccaggagtgggactccaatgagagctccactgactcctcctccgatgaggatgccgcaaacatcaccatcaacaagggtcttctattccccaacgtcggccacaagtgcctcatggcaaaggacgacaaagggaagaaggtaaaatccagagcttccactaaatatgagtcttctagcgatgataatgctagtgatgaggaagataatttgcgtactctttttgccaacttaaacatgcaacaaaaagagaaattaaatgaattgattagtgatatccatgagaaggatgatctcttggacacccaagaggacttccttattaaagaaaataagaagcatgttaaagttaaaaatgcttatgctctagaagtagaaaagtgcgaaaaattatctagtgagctaagcacttgccatgagactatagacaaccttagaagtgaaaatgctaatttgttagctaaggttgatttcaaatgtttgcaatgtttcaattcccaatctcggaaatga

SEQ ID NO: 4758 - DNA, 1596 bp, Zea mays
  Clone ID: TF_ZM4644.C10.o1.fg
atgtcgggagcatccgccaagagggagatcgggaccggcgagaagcccgccacaagcaatgggaaggctccatccggggagtccgccaacaaggtgaagggatcttcttcacacaacaagtcgcgtcagagcggtgacaagaagaaaaagatgaagaaggtggtctactacgacaccgactcttcgtcaccatccacctccggctctaacacaccgtccgtaacttctaagcgccatgagcgcaagaagtttagtaagatccccctacgctaccctcgcatttccatacgtactccattactttccgtcccactaggcaaaccacccatgtttgatggtgaagattataatatgtggagtgataaaatgaggcatcatctaacctcactccacactagcatttgggatgttgttgagattggagtacaggtaccatcaccgggggatgaagactatgattcggacgaggtcgcccaaatccgacacttcaactctcaagccaccactatactcctcgcctctctaagtcgagaggagtataacaaggtgcaaggattaaagagcgccaaggagatttgggacgtgctcaagaccgcgcacgaaggagatggaggctccaaaatgatcatcgagcaaggcgactcctccacgcccgaagcacaactcgttgcattcaaagcaacggaggagaagaaagaagattctactccaagtagaatccccatcgacgcctctaagctcgacaataaggagatggcgctcatcatcaagagcttccgtcaaatcctcaaacaaaggaaggggaaagattacaagccccgttccaggaaggtgtgctacaagtgtggtaagcccggtcatttcattgctaaatgtccattatctactgatagtgacaagggcgacgacaagaaaggaaagaggggagaaaagaagagatactacaagaagaagggtggcgatgcccatgtgtgccgcgagtgggactccgacgagagctccaccgattcctcctctgacgaggacgccgccaacatcgccgtcaccaagggcctcctcttccccaacgtcggccacaagtgcctcatggcaaaggacggcaaaaggaagaaggtaaaatcaaaatcctccactaaatatgaaacctctagtgatgaggataactctggtgttgaggaggataatttgcgcaccctttttgccaacctaaacatgcagcaaaaagaaaaattaaatgaattaattagtgctattcatgagaaggatgaactcttggattctcaagaggacttcctaattaaagaaaacaagaagcatgttaaggttaagaatgcttatgctctagaagtagaaaaatgtgaaaaattatctagtgagctaagcacttgtcatgatgttatttccaaccttagaaatgaaaatgctaaagtaattgttaaggttgattcaaatgtttgtgatgtttcaattcccaatcttatagatgataatgttagtttacttgctaagattgaagaattgaatgtctctcttgctagccttaagattgaaaatgaaaaattaattgctaaggctaaagacttagatgtttgcaat

SEQ ID NO: 4759 - DNA, 1794 bp, Zea mays
  Clone ID: TF_ZM4792.C4.o6.fg
atgaaggaggatgaggccaagagagaggcacaagaagaagaagaaaggaagaaagtcgaggaagatgaaaaagggaagacgaaggtggactacttcgacgacttggttgaactcttggtgtccaaggttcatcgcaatgctcaagcagtgagcgtaatcaaaggaagtttaggtcaggaagagtaccaaaaagtccaaggtagagaagatgctcgtgacatatggaatattctcaaaatgtcacatgagggcgatcctaaagccaagaggcataggatcgaggtgttggagagtgagttggcaagggaccgtgatgattatgatgagatgactcctcatcaactatttaccaaaatccaacaacatgagttagtggaagctccaatcaagacaagagattctcatgccttggttacaaatgatcaagagtcttccaagaagagttcaacaaacaaagatcacaagtctaagaagatgattgaaagctcaagtgaggatgagagctctagtgatgaggacatagttatgttcatcaagagctttagaaagtttgtcagaaaaggtgacaagtatcaaaggaaaggcaagaaaagggcatgttatgagtgtggcaaaactggccactccattgcagattgccccaacaagaaggaacaagaggaaaagaaggacttcaagaaagacaaatccaagaaaggagagagaagcaagggatgcttcaagaagaagaagaaagttagtccaaaggttgaagtcaaacaaatattgaagaaatgttctagcaatgatgggtcaagtgaagttgtgcccaagtacaagcccttaaggaacaacaatggaaagaagggacttgggtacaatatatttaaggcaaaccctagcatagaaggtaccaccttgtatgatgccttagggaggattcactcctctaatggtaatatcactcatgagaagatagatgtatactcctctggtgggtcaatttgggtgtttgacagtggatgtacaaaccatatgatcggagagaggaacatgtttcaatctttgcaactaaccaaagagtcacaagaaattgtgtttggcgatagtgtcaagggtgaggtgattggtattggtgaaacccaagagatcctcaagacgttcatgaggcatgcacaaaacgagtttgagctaaagatcaataaggtgagaagtgacaatggaacagagttcaagaactcatgtattgaagagttcttgggtgaagaagggatcaagcatgagttttcggttccttacactccacaacaaaatggtgttatggagaggaagagccaaactctcattgaggccgcaaaaaccatgcaagatgagtccaagacacatgacaactattgggtggaggcaatcaacacagcgtgccatgcaatcaaccgcctatatcttcacaagatctacaaaaagaccgcctatgagcttctcactggtaacaaacccaaagttgattactttcaagtttttggttgtaaatgctttattcttaacaagaaagccaagagctcaaagtttgctcctaaagtaaacgagggcttcttacatggctatgcatcaaatgtgcacggttactgtgttttcaacaacactatcggtcttgttgaaatagtgttaaacatgacatttgacgaatctaatggctcgcaagggcatgttgcaagtgatattgcaggtgatgagcaacaaccctgtgatgtgaccaagaagcttgctatcgctgaaataagaccgcgagagaaggagaatgaaggaaggatctag

SEQ ID NO: 4760 - DNA, 3540 bp, Zea mays
  Clone ID: TF_ZM4796.C4.o1.fg
atgaaggtggtctactacgagaccgactcttcgtcaccctccacctccggctcggaatcggcatctgccacttctaagcgccatgagcgcaagaagtatagtaagatgccccttcactatcctcgcatttcaaaacgcactccattactttccgtcccattaggcaaaccacctatgtttgaaggtgaatattattcaatgtggagtgataaaatgaggcatcacctaacctcactccacaaaagcatatgggatattgttgagtatggagcgcaggtaccgaagaagggggacaaggattatgattcggaggaggtcgaacaaatccaacacttcaactcccaagtcaccactatactcctcgcctctctaagtcgagaggagtataataaggtgcaagggttgaagagtgcaaaggagatttgggacgtgctcaagaccgcgcacgaaggagacgaggtgaccaagatcaccaagagggaaacgatcgagggggagctcggttgcttcatgcttcaccaaggagaggagccacaagtcatgtacaaccggctcaagaccttggtgaaccaagtgcgcaacctcgggagcaccaaatgggatgaccatgaaatggtcaaggttattcttagatcacttgtttttcttaatcctactcaagtacaattaattcgtggtgatccaagatataaactaatgtctctcgaggaagtgataggaaagtttgtgagctttgaactaatgatcaaaggctccaaacaaatcatcgagcgaggcgccacctccacacctgaggtgcaacccgtcgccttcaaagcgacggaggagaagaaggaagagtttacaccaagtaggcttcccatcgacgcctccaagctcgacaacaaggagatggctttaatcatcaaaagctatcgccaaatccttaagcaaaggaaggggagagattacaagctccgttccaagaaggtgtgctacaagtgtggtaagcccggtcatttcattgctaaatgtccattatctagtgatagtgacaggggcgacgacaagaagggaaagagaagagaaaagaagaggtactacaagaagaagggcggcgatgcccatgtttgccgagagtgggactccgacgagagctccaccgactcctcctccgacgaggacgccgcaaacatcgccatcaacaagggccttctcttccccaacgtcggccacaagtgccccatggcaaagtacggcaagaagaaggaaaaattaaatgaattgattagtgttattcatgagaaggatgaactcttggatagccaagaggatttccttattaaggaaaacaaaaggcatgttaatactaaaaatgcttatgctcaggagacaattgagaatgaaaaattaattgctaaggctaaagatctaaatgtttgcaatatttctatttccaatcttaagaatgaaaatgctattttacatgctaagattgatgaattaaatgcatgcaaaccctctacatctaccgttgagcatgttactatttgtactagatgtagagatattaatgttgatgctattcatgatcacctaactttaattaaacaacaaaatgatcacatagctcaacttagtgccaaaattaatgagcatgacttagaaaatgaaaattttaaatttgctagaagcatgctctatagtgggagatgcccaggcattaaggatggcattagcttccaacagggagacaatgtcaagcttaatgcccctaaaagattgtctaactttgttaagggcaaggctctcatggttcaggataacgagggttacattttataccctaccggttatcccgaacacaaaattaggagaattcactctaggaaatctcactctggctctcatcatgcttttatgtataagagtgaggcatctagttctaggcaatccactcatgctaaattgcctaaaaagaaaactcctattgcatcaaatgaacctaatatttcatttaagacttttgatgcatcttatgttttaactaacaaatcaggcaaagtagttgccaaatatgttgggggcaaacacaaggggtcaaagacttgtgtttgggtacccaaggtgcttgtttctaatgtgaaaggacccaagaccgtctgggtttatgcatccgggggatcaagttggatcattgatagcgggtgcacaaaccacatgacttgggagaaaaggatgttctcctcctacgagaaaaaccaagatccccaaagagctatcacattcagggatggaaatcaagcccatgttgggatgaagaatctttctaagcttctaaagggagagcacattttgggactaaccaatgttcattttgagaaagacagggataaatctcaaacccaagagaccttaaagggattcttgagacgggctcaaaatgagttcggcttaaggatcaaaaagattagaagcgataacgggacggagttcaagaactcacaaatagaaggcttccttgaggaggaaggcatcaagcatgagttctcttcttcctacacgccacaacaaaatggtgtagtggagaggaagaatagaactctacttgacatggtgaggaccatgcttgatgagtacaagacttcggaccgagtctttggtagcaaatgctttattcttgttaaaagaggtagaaaatctaaatttgctcctaaggttgtagaaggctttttactaggatatgattcaaacacaagggtatatagagtctttaacaagtccactggactagttgaagtttcttgtgacattgtgtttgatgagactaacggctctcaagtagagcaagttgatcttgatgagctagatgatgaagaggctccatgcgtcgtgctaaggaacatgtccattggggatgtgtgtcctaaggaatccgaagagcctccacaagcacaagatcaaccatcttcctccatgcaagcatctccaccaactcaagatgaggatcaagctcaagaggatgaaaatgaagatcaagaagatgagccacctcaagaggaggacaatgatcaagggggagatgctaataatcaagacaaggaagatgatgacgctaggcttgagtcaattcgtatattacttgcctatggtacttaccatggcttcaagctctatcaaatggacgtgaagagtgccttcctcaatggaccaatcaaggaggaagtctatattgagcaacctcccggctttgaagataagtttagtaggatcatggttcaaaagttcgagatgtctatgatgggggagttgaagtatttcttaggatttcaagtcaagcaactccaagagggcaccttcattagccaaacaaagtacattcaacacattcttaccaagtttgggatgaaggatgccaagcccatcaagacacccatgggaaccaatgggcatctcgacctcgacacgggaggcaacgagcagcccgtggttcttgactgtgttgctgaagaccttcctgagcaacaacctggtgaaggcaagtgtcctctgatagtctga

SEQ ID NO: 4761 - DNA, 969 bp, Zea mays
  Clone ID: TF_ZM4844.C2.o1.fg
atgaagaaagtggtctactacgagaccgactcttcctcgccctctacatccgaatccgacgccgcgtccgtcacttctaagcgccaagagcgcaagaagtataaggagtataacaaggtgcaagggttaaagagcgccaaggagatttgggacgtgctcaagaccgcgcacgaaggagatgaggtgaccaaaatcaccaagcgggagacgatcgagggggagctcggacgcttccggcttcgccaaggggaggagccacaagacatgtacaaccgcttgaaaaccttggtgaaccaagtgcgcaacctcgggagcaccaaatgggatgaccatgagatggtcaaggttattctaagatccctcgttttccttaaccctacgcaagttcaattaattcgaggtgatcctagatatatgctaatgtctcccgaggaagtaataggcaaatttgtgagctttgagttgatgatcaaaggctcaaagaagatcatcgagcaagatggcccctccatgcccgaagcacaaccggtcgcattcaaggcaacggaggagaagaaggaagagtctacatcaagtagagtctccatcgacgcctccaagctcgacaacgaggaaatggcgctcatcatcaagagcttccgccaaatcctcaagcaaaggagggggaaggattacaaatcccgctccaagaaagtgtgctacaagtgtggtaagcccggtcattttattgcaaaatgtccattatcaagtgatagtgacaggggcgacgacaagaagggaaaaaggagagaaaagaagaggtaccacaagaagaggggcgaagatgcccatgtgtgccgcgaatgggactccgacgagagctccaccgacgaggacgccgccaacatcgccgtcaccaaagggctcatcttccccaacatcggccacaagtgcctcatggcaaaagacgacaaaaggaagaagagatga

SEQ ID NO: 4762 - DNA, 1557 bp, Zea mays
  Clone ID: TF_ZM4887.C4.o3.fg
atgtcaggagcatccgccaaaagggatctcgagaccggcgacaagtccgcatgctcggggagaacacactcaagggagtccgcccacaagcacaaggaggaatcctcttcctccatcaagtcccatcggatgggtgacaagaagaagaagatgaagaaggtggtctactacgagaccgactcttcgtcaccctccacctccggctcggaatcggcctccactacttcaaagcgccatgagcgcaagaagtatagcaaaccacctatgtttgaaggtgaagattattctatgtggagtgataaaatgaggcatcatctaacctcactccacaaaagcatatgggatattgttgagtatggagtgcaggaggtcgaacaaatccatcacttcaactcccaagccacaactatactcctcgcctctctaagtcgagaggagtataataaggtgcaagggttgaagagcgcaaaggaaatttgggacgtgctcaagaccgcgcacgaaggagatgaggtgaccaagatcaccaagcgcgagtcgatcgagggggagctcggtcgtttccgacttcgccaaggggaagagccacaagatatgtacaaccggcttaagaccttggtgaaccaagtgagcaacctcgggagtaaaaaatgggatgaccatgaaatggtcaaggttattcttagatcactcgtttttcttaaccctacgcaagttcaattaattcgtggtaatcctagatatacactaatgtctcccgaggaagtaataggaaactttgtgagctttgagttgatgatcaaaggctcaaagaaaattatcgagcacgatggcccctccacgcccgaagcacaaccggtcgcattcaaggctacggaggagaaggaggaggaatctacatcaagtagactacccatcgacgcctccaagctcgacaacgaggaaatggcgctcatcatcaagagcttccgccaaatcctcaagcaaaggagggggaaggactacaaatcccgctccaagaaagtgtgctacaagtgtggtaagcccggtcatttcattgctaaatgtccattatctagtgatagtgacaggggcgacgataagaagggaaagaagagagaaaagaagagatactacaagaagaaaggcggcgatgcacatgtgtgtcgcgagtgggactccgacgagagctcctccgactcatcctccgacgaggacgccgccaacatcgccgtcaccaagggactcctcttccccaacgtcggccacaagtgcctcatggcaaagtacggcaaaaggaagaaggatgaactcttggactctcaagaggacttccttattaaagaaaacaagaagcatgttaaggttaagaatgctcatgctctagaagtagaaaaatgtgaaaaattatctagtgagctaagcacttgtaatgatattattgtcaaccttagaaatgaaaatgctaaattaattgctaaggttgattctaatgttaatgatgtttcaattcccaatcttagagatgataatgttagtttacttgctaagatttga

SEQ ID NO: 4763 - DNA, 5088 bp, Zea mays
  Clone ID: TF_ZM4920.C3.o11.fg
atgtcgggagatcacgccaagaaggagatggagaccggcgacaagcccacaccaagccacgggaaggcttcatcagaagagtcccgcaacaaagggaaggggaaggagaagaaaccctcttcccacaagtcgcatcggagtggggacaagaaaaagaagatgaggaaggtggtctactacgagaccgatacttcatcaccttccacctccggctccgacgcgccatccattacttctaagcgtcatgagcacaagaagtttagtaagatccccttacgctaccctcgcattcctaaacatacgcctttactttccgttccattaggcaaaccaccaacgtttgatggtgaagattatgctaggtggagtgatttgatgcgatttcatctaacctcactccacaaaagtatatgggatgttgttgagtttggtgtacaggtaccatccgtaggggatgaagattatgatgaggatgaagtggcccaaatcgagcacttcaactcccaagccacaactatactcctcgcctctctaagtcgagaggagtataacaaggtgcaaggattaaagagcgccaaggaagtttgggacgtgctcaagaccgcgcacgaaggagatgagctaaccaagatcaccaagcgggaaacgatcgagggggagctcggtcgcttccgtcttcgccaaggggaggagccacaagacatgtacaaccggctcaaaaccttggtgaatcaagtgcgcaacctcgggagcaaaaaatgggatgaccacgaaatggttaaggttatttttagatcacttattttccttaaccctactcaagttcaattagttcgtggcaatcctagatatacactaatgactcccgaggaagtgatcgggaattttgtgagctttgagttcatgatcaaaggctcaaggaagatcaacgaacttgatggtccctccacgtctgaagcacaaccggtcgcatttaaggcgatggaggagaagaaggaggagtctacatcgactagaacacccatcaatgcctccaagctcgacaacgaggaaatgtcgctcgtcatcaaaagcttccgccaaatcctcaagcaaaggagggggaaagattacaagcgccgctccaagaaagtttgctacaagtgtggtaagcccggtcattttattgcaaaatgtccattatctagtgatagtgacaggggcaacgacaaaaaggggagaaaaaaggaaaagaagaagtactacaagaaaaagggcggcgacgcccatgtatgccgcgagtgggactcggacgagagctcctctgactcctcctctgacgaggacgccgccaacatcgccatcaacaagggccttctcttccccaacgtcggccacaagtgcctcttggcaaagaacggcaaaaagaagaaggttaaatccaaatcctccactagatatgagtcctctagcgatgataatgctagtgatgaggaagataatttgcgtactctttttgccaacctaaacatgcaacaaaaagaaaagttaaatgaattaattagtgccatccatgagaaggatgacctcttggacacccaagaggacatcctaatcaaggaaaacaaaaagcatgttaaggttaaaaatgtttatgctctagaagttgaaaaatgtgagaaattaactagtgagctaagcacatgccatgatgttatcaacaaccttagaaatgaaaatgctagtttaattgctaaggttgattcaaatgcttgtgatgttccaattcccaatcttagaaatgataatgatgatttgcttgctaagattgaagaattgaacatatctctagctagccttagaaatgaaaatgaaaaattaattgctaaggctaaagattttgatgtttgcaatgctaccatttccgaccttagaagtaaaaatgatatattgcatgctaaggttgtagaattaaaatcttgcaaaccctctacatctaccattgaacatacttctatttgcactagatgtagagatgttgatattgatgctattcatgatcatatggtattaattaagcaacaaaatgatcatatagcaaaattagatgctaaaattgccgagcatgaacttgaaaatgaaaaatttaaatttgctcgtagtatgttttataacgggagacgccctggcattaaggatggcattggcttccaacagggaggcaatgtcaaacttaatgcccctcctaagaaattgtccaactttgtaaagggcaaggctcccatgcctcaagataacgagggttacattttgtaccctgtcggttatcctgagagcaaaattaggagaattcattccaggaagtctcactctggccctaaccatgcttttatgtataagggtgagacatctagttctaggcaaccaacccgtgctaagttgtctaagaagaaaacacctagggcatcaaatgattctaacatttcatttaagacctttgatgcatcatatgttttaactaacaaatccggcaacgtagttgccaagtatgttgggggcaaacacaagggatcaaagacttgtgtttgggtacccaaagttcttgtgtctaatgccaaaggacccaaaaccatttgggtttatgcatccgggggctcaagctgggtaatcgacagcgggtgcacaaaccacatgacaggggagaagaagatgttctcctcctacgagaaaaaccatgatccccaacgagctatcacattcggggatggaaatcaaggtgtcactgtctttagaagaagtgatgattcaatagcatttaagggagtgttagagggtcagctatacttagaaaaatctcatacccaagagaccttaaagggattcttgagacgagctcaaaatgagttcggcttaaggatcaagaaaattagaagcgacaacgggatggagttcaagaactcacaaatcgaaggcttccttgaggaggagggcatcaagcatgagttatcttctccctacactccacaacaaaatggtgtagtggagaggaagaatagaactctattggacatggccagaaccatgcttgatgtgttggattacggggaggctacgctagcgcaaaacaaaattttcaaccccataaaaccaagaactactgcggttataggtcatggaattaccactagacgcgcagagcagcggaagacgtctcgatgtagacgaacgcgtcgagcagtgccgtgcagtcatcgacgtccttcacgtcctcgcacggttcgtcctagtgctccagatgcagcacctccgaggtatccacacgtacagggaggaagcgccgcgtaccgaactgctaggttcgcgacggcggcttggcgagggcgagaggcgagcggctactcgtttgttggtggcaaattaggagtctttggtagcaaatgctttattcttgttaaaagaggtagaaaatctaaatttgctcctaagactgtagaaggctttttactaggatatgattcaaacacaagggcatatagagtctttaacaagtccactggacaagttgaagtttcttgtgacgttgtgtttgatgagactaacggctctcaaatagagcaagttgatcttgatgagataggtgatgaagaggctccgtgcatcgcgctaaggaacatgtccattggggatgtgtgtcctaagcaatacgaagagcctccaaatgcacaagatcaaccatcctcctccacgcaagcatctccatcaacccgaaatgaggatgaggctcaagttgatgaaggagaagaacaaagagatgagccacctaaagatgacgccaatgatcaagggggagatgcaaatgaccaagacaaggaggatgaggaaccaaggccgccacacccaagagtccaccaagcaatccaacgagatcaccccgttgacaccatcctcggcgacatccataaggggggtagaggaagcactgcaagattcggattgggtggtggcgatgcaagagagctcaacaacttcactaggaacgaggtatggcatttggttccacgtcctaatcaaaatgttgtaggaaccaagtgggtgttccgcaacaagcaagacgagcatggtgtggtgacaaggaacaaagcccgacttgtggccaagggatactcccaagtcgaaggtttggatttcggtgaaacctatgcacccgtagctaggcttgagtcaattcgtatattattggcctgtgctacttaccatggcttcaagctttatcaaatggacgtgaagagtgccttcctcaatggaccgatcaatgaagaggtctatgttgagcaacctcccagctttgaagaaagtgagtaccctaaccatgtctataaactctctaaggcgctttatgggctcaagcaagccccaagagcatggtatgaatgccttagagattttctcatcactaatggattcaaagtcggaaaggccgatcctacactctttaccaaaacacttgaaaatgatttgtttgtatgccaaatttatgttgatgatattatatttgggtctactaacgaatctacatgtgaagagtttagtaggatcatgacacaaaaattcgagatgtcaatgatgggggagttgaagtatttcttaggatttcaagtaaaacaactccaagagggcaccttcattagccaaacgaagtatactcaagacattctaaacaagtttgggatgaaggatgccaagcccatcaagacacccatgggaaccaatgagcatctcgacctcgacacagaagatattatgctttccgtatgcatgtgtgcaagattccaagccaaccctaaggaagctcaccttacggccgtaaaacgaaccttgagatatttagtttatactcctaagtttgggctttggtatcctaggggatccacttttgatttgattggttattcggatgccaattgggaggggtgtaagattaataaaaagagcacatcggggacttgccagttcttgggaagatccttggtgtcttgggcttcaaagaagcaaaattccgtcgctctttctaccgccgaagccgagtacattgccgcagactttggatga

SEQ ID NO: 4764 - DNA, 1314 bp, Zea mays
  Clone ID: TF_ZM4921.C4.o1.fg
atgtcgggagatcacgccaagaaggagatggagaccgacgacaagcccactacgagtcacgggagcacttcatcggaagagtcccgcaccaagaggaaggagaagaggaaggactcctccaaagggaagaagtcttcttcacactccaaagggaaggagaagaaatcctcttctcaccacaaagagaagaaggaaaaatcttcttcccacaagccgcatcggagtggggacaagaagaagaggatgaggaaggtggtctactacgagaccgattcttcatcaacatccacctccggctccgacgcggcatccgtcacttctaagcgccaagagcgcaagaagtatagggatgaagattatgatgaggatgaagtggcccaaatcgagcacttcaactcccaagccacaaccatactcctcgcctctctaagtaaggaggaatacaacaaggtgcaagggttgaagaatgcaaaggagatttgggacttactcaagaccgcgcacgagggtgatgaactcaccaagatcaccaagcgggaaacaatcgaaggggagctcggtcgcttccgtcttcgccaaggagaggagccacaagatatgtacaaccggctcaaaaccttggtgaaccaagtgcgcaacctcgggagcaagaaatgggatgatcacgaggtggttaaggttattttaagatcgcttattttccttaaccctactcaagtacaattaattcgtggcaacccaagatatacactaatgactcccgaggaagttatcgggaattttgtgagctttgaatgtatgatcaagggctcaaagaagatcaatgagcttgatgatccctccacgtccgaagcacaaccggtggcatttaaggcgacagaggaaaagaaggaggagtctgcaccgagtagacaaccaattgacgcctccaagctcgacaatgagaagatggctttaatcatcaaaagctttcgccaaatccacaagcaacggaaggggaaggattacaaatcccgttccaagaaggtttgctacaagtgtggtaagcccggtcactttattgctaaatgtccattatcaagtgacagtgatagggataacgacaagaagggcaagaggagagaaaagaagaggtaccacaagaagaggggaggcgatgcccacgtatgccgcgagtgggactccgacgagagctccaccgagtcctcctccgacgaggacgccgccaacatcgccgtcaccaagggactcctcttccccaacgtcggtcacaagtgcctcatggcaaatgacggcaaaaagaagaagccttag

SEQ ID NO: 4765 - DNA, 2763 bp, Zea mays
  Clone ID: TF_ZM4951.C1.o3.fg
atgtcgggagatcacgccaagaaggagatggagaccggcgaaaagcccactacaagccatgggagcacttcatcggaagagtcccgcaccaagaggaaggagaagaagaactcctccaaagggaaggagaagaagtcttcttcacaccaaaaggagaagaaggagaaatcctcttctcacaagacgcgtcggagtggggacaagaaaaagaggatgaggaaagtggtctactacgagaccgattcttcatcaacctccggctccgacgcggcatccgtcacttctaagcgccaagagcgcaagaagtatagtaagatccccctacgctaccctcgcatttctaaacatacacctttactttctgtcccattaggcaaaccaccaacttttgatggtgaagattatgctaggtggagtgatttaatgcgatttcatctaacctcactccacaaaagtatatgggatgttgttgagtttggtgcacaggtaccattcgtaggggatgaagactatgatgaggatgaggtggcccaaatcgagcacttcaactctcaagcaacaacaatactcctcgcctctctaagtagagaggagtataacaaagtgcaagggtggaagagcgccaaggaggtttgggatgtgctcaaaaccgcacacgaaggagatgagctcacaaagatcaccaagcgggagacgatcgagggggagcttggtcggttccggcttcgcaaaggggaggagccacaaaacatgtacaaccggctcaagaccttggtgaatcaagtgcgcaacctcgggagcaaaaagtgggatgaccacgaggtggttaaggttattctaagatctcttattttccttaaccctactcaagttcaattaatctgtggcaacccaagatatacactaatgacccccgaggaagtaatcgggaattttgtaagttttgagtgcatgatcgaaggctcgaggaagatcaacgagcttgatgaaccctccacgtccgaagcacaaccggtggcatttaaggcgacggaggagaagaaggaggagtctacaccgagtagacaaccaattgacgcctccaagctcgacaatgaggagatggccttaatcatcaaaagctttcgccaaatcctcaaacaacgaaaggggaaggactacaaatcccgttccaaaaaggtttgctacaagtgtggtaagcccggtcactttattgctaaatgtccattatcaagtgacagtgacagggacaacgacaagaagggaaagaggagagaaaagaagaggtactacaagaagaagggcggcgatgcccatgtttgccgggagtgggactcggacgagagctccaccgactcctcctccgacgaggacgccgccaacatcgtcgtcaccaagggactcctcttccccaacgtcggccacaagtgcctcatggcaaaggacggcaaaaagaaaaaggttaaatctaaatcttccactagatatgagtcctctagtgataataatgctagtgatgaggaagataatttgcgtaccctttttgccaaccttaacatggaacaaaaggaaaaattaaatgaattaattagtgctattcatgaaaaggatgaccttttggattctcaagaggacttcctaattaaggaaaataagaaacatgttaaggttaaaaatgcttatgctctagaaattgagaaatgtgaaaaactatctagtgagctaagcacttgccatgagacaatagacaaccttagaaatgaaaatgctaatttgttagctaaggttgattctcatgtttgtaatgtttcaattgccaattctagaaataatgatgatgatttacttgctaggattgaagaattgaacatttctcttgctagccttaggattgaaaatgaaaaattgcttgctaaggctaaagattttgatgtttgcaatgctactatttctgaccttataactaagaatgacatgttacatgctaaggttgtagaattaaaatcttgcaaacccgctacatctattgttgagcatgtatctatttgtactagatgtagagatgttgatattaatgctattcatgatcacatgtctttaattaaacaacaaaatgatcatatagcaaaattagatgctaaaattgccgagcataacttagaaaatgaaaattttaaatttgctagaagtatgctctatagtgggagacgccctggcatcaaggatgacattggcttccaaaagggagacaatgtcaaacttaatacccctcctaaaagattgtttaactttgttaagggcaaggctcccatgcctcaggataacgagggttacattttataccctgccggttatcctgaggacaaaattaggagaattcattctaggaagtctcactctggccctaaccatgcttttatgtataagggtgagacatctagttctaggcaaccaactcgtgctaagctgcctaagaagaaaactcctagtgcatcaaatgaacatagtgtttcatttaaaacttttgatgcatcttatgtgttgactaacaaatccggcaaagtagttgccaaatatgttgggggcaaacacaaggggtcaaagacttgtgtttgggtacccaaagttcttgtatctaatgccaaaggacccaaaaccatttgggtttatgcatccgggggctcaagttggatcatcgacagcgggtgcacaaaccacatgacaggggagaagaaaatgttctcctcctacgagaaaaactaa

SEQ ID NO: 4766 - DNA, 4236 bp, Zea mays
  Clone ID: TF_ZM4959.C2.o1.fg
atgtcgggagaacacgccaagaaggagatggagaccggcaaaaagcccactacaagccacgggaaggcttcatcggaagagtcccgcaaaaaggggaaagggaaggagaagaaagcctcttcccacaagtcgcatcagagtggcgacaagaaaaagaagatgaggaaggtggtctactacgagaccgatacttcatcaccttccacctccgactccgacgcgccctccgtaacttctaagcgccatgagcgcaagaagtttagtaagattcccttacactaccctcgcacctctagacatactccattactttccattccattaggcaaaccgccaacctttgacggtgaagattatgctaggtggagtgatttaatgaaatttcatctaacctcactccacaaaagtatatggaatgttgttgagtttggagcacaggtaccatccgtaaaggatgaggattatgatgaagacgaggtggcccaaatcgagcacttcaactcccaagccacaaccatactcctcgcttctctaagtagggaggagtacaacaaggtgcaaggattaaagagcgccaaggaagtttgggacgtgctcaagaccgcgcacgagggtgatgaactaaccaagatcaccaagcaggaaacgatcaagggggagctcggtcgcttccgtcttcgccaaggggaggagccacaagacatgtacaaccggctcaaaaccttagtgaatcaagtgcgcaacctcgggagcaagaaatgggatgaccacgagatggttaaggttattctaagatcacttattttccttaaccctactcaagtacaattaattcgcggtaatcctagatatacactaatgactcccgaggaagtaatcgggaattttgtgagctttgagtttatgatcaagggctcacggaagatcaacgagcttgacggtccctccacgtccgaagcacaaccagtcgcattcaaggcgacggaggagaagaaggaggagtctacaccaagtagaacacccatcgacgcctccaagctcgacaacgaggaaatggcgcttgtcatcaaaagcttccgccaaatcctcaagcaaaggagggggaaagattacaagccccgcttcaagaaagtgtgctacaaatgtggtaagcccggtcattttatcgcaaaatgtccattatctagtgatagtgacaggggcgacgacaagaaggggagaagaaaggaaaagaagaaatactacaagaagaagggtggcgacgcccatatatgccgcgagtgggactcggacgagagctcctacgactcctctgacgaggacgccgccaacatcgccatcaacaagggccttctatttcccaacgtcggccacaagtgcctcatggcaaaggacggcaaaaggaagaaggttaaatctaaatcctccattagatatgagtcctctagtgatgataatgctagtgatgaggaagataatttgcgtactctttttgccaacctaaacatgcaacaaaaagaaaagttaaatgaattaattagtgccatccatgagaaggatgacctcttggacacccaagaggactttctaatcaaggaaaacgaaaagcatgttaaggttaaaaatgcttatgctctagaagttgaaaaatgtgaaaaattatctagtgagctaagcacctgccatgagactatagacaaccttagaattgaaaatgctaatttgttagctaaggttgactcaaatgtttgtaatgtttcaattcccaatcttagaaatgataatgatgatttgcttgctaagattgaagaattgaacatatctcttgctagccttggagttgagaatgaaaaattgcttgctaaggctaaagatttttatgtttgcaatgttaccatttccgaccttagaagtaaaaatgatatattgcatgctaaggttgtagaattaaaatcttgcaaaccatctacatctaccgtcgagcacacttctatttgtactagatgtagagatgttgatgttaatgctattcatgatcacatggctttaattaaacaacaaaattatcatatagcaaaattagatgctaaaattgccgagcatgaacttgaaaatgaaaaatttaaatttgctcgtagtatgctttatagtgggagacgccctggcatcaaggatggcattggcttccaaaagggggacaatgtcaaaattaatgcccctcctaagaaattatctaactttgttaagggcaaggctaccatgcctcaagataacgagggttacattttgtaccctgtcggttatcctgagagcaaaattaggagaattcattctaggaaatctcactctggccctaaccatgcttttatgtataagggtgagacatctagttctagccaaccaactcgtgctaagttgcctaataagaaaactcctagtgcatcaaatgatcatggcatttcatttaagacctttgatgcatcatatgtgttaactaacaaatccggcaaggtttatgcatccgggggctcaagttggatcatcgacagcgggtgcacaaaccacacgactggggagaagaaaatgttctcctcctatgagaaaaaccaagatccccaacgagctatcacattcggggatggaaatcaaggtttggtcaaaggattagattcattagattacaatttgctttccgtttcacaattatgtcaaatgggctacaactgtctttttactgaggaaaaatctcatacccaagaaaccttaaagggattcttgagacgggctcaaaacgagttcggcttaaggatcaagaaaattagaagcgacaacgggacggagttcaagaactctcaaattgaaggcttccttgaggaggagggcatcaagcatgaattatcttctccctacacgccacaacaaaatggtgtagtggagaggaagaatagaactctattagacatggcaagaaccatgcttgatgagtacaagacttcggatcgattttgggccgaggcggtcaacactgcctgctatgccatcaaccggttgtatctacaccaaatcctcaagaagtcatcatacgaactcctaaccgagcaagttgatcttgatgagataggtgatgaagaggctccgtgcatcgtgctaaggaacatgtccattggggatgtatgtcctaaggaatccgaagagcctccaaatgcacaagatcaaccatcctcctccacgcaagcatctccaccaactcaaaatgaggatgaggctcaagttgatgaagaagaagatcaaacaaatgagccacctcaagatgacgacaatgatcaagggggagatgcaaatgatcaagaaaaggaggatgaagaaccaaggccgccacacccaagaccacacaaggtagaagaagcacttcaagattcggattgggtggtggtgatgcaagaggagctcaacaacttcactaggaacgaggtatggcatttagttccacgtcctaatcaaaatgttgtaggaaccaaatgggttttccacaacaagcaagacgagcatggtgtggtgacaaggaacaaagctcgacttgtggccaaaggatactcccaagtcgaaggtttggatttcggtgaaacctatgcacccgtagctaggcttgagtcaattcacatattattagcctatgctacttaccatggcttcaagctttaccaaatggacgtgaagagtgccttcctcaatggaccgatcaaggaagaggtctatgttgagcaacctcccggctttgaagatagtgagtaccctaaccatgtttataaactctctaaggcgctttatgggctcaagcaagccccaagagcatggtatgaatgccttagagatttccttatagataatggcttcaaagtcggaaaggccgatcctacgctcttcactaaaacacttgaaaatgatttgtttgtatgccaaatttatgttgatgagattatatttggatctactaacgaatctacatgtgaagagtttagtaggatcatgacacaaaaattcgagatgtctatgatgggggagttgaagtacttcttaggatttcaagtgaagcaactccatgagggcaccttcattagccaaacgaagtatactcaagacattttaaacaagtttgggatgaaggatgccaaacccatcaagacacccatgggaaccaatgggcatctcgacctcgacacggaagggagaaagtag

SEQ ID NO: 4767 - DNA, 4038 bp, Zea mays
  Clone ID: TF_ZM4989.C5.o1.fg
atgtcgggagcatccgccaagaaggagatcggaaccggcgacaagtccgcaagctcggggagaacacactcaagggagtccgcccacaagcacaaggaggaatcctcttcctccatcaagtcccaatggaagggtgacaagaagaagaagatgaagaaggtggtctactacgagaccgactcttcgtcaccctccacctccggcaaaccacttatgcttgatggtgaagattattctatgtggagtgataaaatgaggcatcatctaacctcactccacaaaagcatatgggatatttttgagtatggagcgcaggtacaaaaggaaggggacaaggattatgattcggaggaggtcgaacaaatccaacacttcaactcccaagccactactatactcctcgcctctctaagtcgagaggagtataataaggtgcaaggattgaagagcgcaaaggagatttgggatgtgctcaagaccacgcacgaaggagacgaggtgaccaagatcaccaagagggagacgatcgagggggagctcggtcgattcatgcttcaccaaggggaggagccacaagcgatgtacaaccggctcaagaccttgatgaaccaagtgcacaacctcgggagcaccaaatgggatgaccatgagatgatcaaggttattcttagatcactcgtttttcttaaccctacacaagttcaattaattcgtggtgatccaaggtataaactaatgtctcccgaggaagtgataggaaagtttgtgagctttgaattgatgatcaaaggctccaagaaaatcatcgagcaaggcgccacctcaacacctgaggtgcaacccgtcgcattcaaggcgacggaagaagaaaagaaggattctacaccaagtaggattcccatcgacgcctccaagctcgacaacgaggaaatgacgctcatcatcaagagcttccgccaaatcctcaagcaaaggagggggaaggattacaaacccagctctaagaaggtttgctacaaatgtggtaagcccggtcattttattgcaaaatgtccattatcaagtgattgtgacaggggcgatgacaagaagggaaagagaagagaaaagaagaggtactacaaaaagaagggcggcgatactcatgtttgccgggagtgggactccgacgagagctccatcgacttctcctccgacgaggacgccacaaacatcgccgtcaccaaagggcttctcttccccaacgtcggccacaaccaagaggacttccttattaaagaaaacaaaaagcatgttaaggttaaaaatgcttatgctctggaggtagaaaaatgtgaaaaattaactagtgagctaagcacttgccatgacactaattccaaccttagaattgagaatgctaatttgattgctaaggttgagaagtcaaatatttgtgatgattcaattgtcaatcttagaaatgataatgctagttcaattgctaagattgaaaaattgaatgcctctcttgctagccttagaaatgagaatgaaaagttaattgctaaggctaaagacttagatgtttgcaatgtttctatttccaatcttagagatgagaacactattttacatgctaagattgttgaactaaaaacttgcaaaccctctacatctaccattgagcatgttacaatttgtactagatgtagagacattaatgttgatgctattcatgatcacttagctttaattaagaaacaaaacgatcacatagctcaacttagtgccaaaattaatgagcatgacttagagaatgaaaaaattaaatttgctagaagcatgcttatagtgggagacgccctggcattaaggatggcattggctttcaacagggagacaatgtcaagcttaatgcccctcctaaaagattgtctaattttgttaagggcaaggctcccatgcctcaggataacgagggttacattttataccctgccggttatcccgagcacaaaattaggagaattcactctagaaagtctcactctggctctcatcatgcttttatgtataagagaaaaatcacaaacccaagagacattgaaggaattcttgagacaggctcaaaatgagttcggcttaaggataaaaaagataagaagcgacaacggaacggagttcaagaactcacaaatagaaggcttccttgaggaggagggcatcaagcatgagttctcttctccctacacgccacaacaaaatggtgtagtggagaggaagaatagaactctattagacatggaaaggaccatgcttgatgagtacaagacttcggatcggttttgggccgaggcggtcaacaccgcttgctacgccatcaaccgagtctttggtagcaaatgctttattcttgttaaaagaggtagaaaaactaaatttgctcctaaggttgtagaaggctttttacttggttatgattcaaacacaagggcatatagagtctttaacaagtccactggactagttgaagtttcttgtgacattgtgtttgatgagactaacggctctcaagtagagcaagttgatcttgatgagctagatgatgaagaggctccatgcgtcgcgctaaggaacatgtccattggggatgtgtgtcctaaggaatccgaagagcctccacatgcacaagatcaaccatcttcctccatgcaagcatctccaccaactcaagacgaggatgggtctcaagatgatgaaggagaagatcaagaagatgagccacctcaagaagacgacaatgatcaaggggagatgcaaatgatcaagacaaggaagatgaacaagatccaagaccgccacacccaagagtccaccaagcaatccaacaagatcaccccggtagaggaagcacttcaagatttggattgggtgttggcgatgcaagaggatctcaacaacttcacgaggaatgaggtatggcatttagttccacgtcctaaccaaaatgttatagaaaccaagtgggtcttccacaacaagcaagatgagcatggtgtggtgacaagaaacaaagcccgacttgtggccaagggatattcacaagtcgaaggtttggattttggtgaaacctatgcacccatagctaggcttgagtcaatttgtatattacttgcctatgctacttaccatggcttcaagctttatcaaatggacgtgaagagtgccttcctcaatggaccaatcaaggaagaggtctatgttgggcaacctcccggctttgaagatagtgagtatcctaaccatgtctacaaactctctaaggtgctttatgggctcaagcaagccccgagagcatggtatgaatgcctaagagattttcttatcactaatagcttcaaagtcggcaaggccgatcctactctctttactaaaactattgaaaatgatttgtttgtgtgccaaatttatgttgatgatatcatatttgggtctactaacaaatctatttgtgaagagtttagtaggatcatgactcaaaaattcgagatgtcaatgatgggggagttgaagtatttcttaggattccaagtcaagcaactccaagaaggcaccttcattagccaaacgaagtacattcaagatattcttaccaagtttgggatgaaggatgctaaacccatcaagacacccatgggaactaatgggcatctcgacctcgacacgggagcgtgtaagattgatagaaagagcacatcagggacttgtcagttattgggaagatccctggtgtcttgggcttctaagaaacaaaattctgtagctctttctaccgccgaagccgagtatattgccgcaggccattgttgcgcgcaattgctttggataaggcaaactcatagggattatggttacaaattaaccaaagtccctctcctatgtgataatgagagtgcaatccgcatggcggataatcccgttgagcatagccgcactaaacacatagtcattcggtatcactttttgagggatcaccaacaacgggggatatcgtga

SEQ ID NO: 4768 - DNA, 1338 bp, Zea mays
  Clone ID: TF_ZM4997.C1.o12.fg
atgttgggagatcacgccaagaaggagttggagaccagcgacaagcccactacaagccacgggaaagcttcatcggaagagtcccgaaacaaggggaaggggaaggagaagaaatcctcttcccacaagtcgcatcagagtggcgacaagaaaaagaagatgaggaaggtaccattcgtaggggatgaggattatgatgaggacgaggtggcccaaattgagcacttcaactcccaagccacaactatactcctcgcctctctaagtcgagaggagtataacaaggtgcaaggattaaagagcgccaaggaagtttgggacgtgctcaagaccgcgcacgaaggagatgagctaaccaagatcaccaaacgggagacgatcgagggggagctcggtcgcttccgtcttcgccaaggggaggagccacaagacatgtacaaccggctcaaaaccttggtgaatcaagtgcgcaacctcgggagcaaaaaatgggatgaccacgaaatggttaaggttattctaagatcacttattttccttaaccctactcaagttcaattgattcgtggcaatcctagatatacactaatgactcccgaggaagtgatcgggaattttgtgagctttgagttcatgatcaaaggctcaagaaagatcaacgagcttgatggtccctccacgtccgaagcacaactggtcacatttaaggcgacggaggagaagaaggaggagtctacatcgagtagaacacccatcgacgcctccaagctcaacaacgaggaaatggcactcgtcatcaagagcttccgccaaatcatcaagcaaaggagggggaaagattacaagccccgctccaagaaagtttgctacaaatgtggtaagcccggtcattttattgcaaaatgtccactatctagtgacagtgacaggggcgacgacaagaaggggagaagaaaggagaagaagaggtactacaaaaagaagggcggtgatgcccatgtttgtcgcgagtgggactccgacaaaagctctagcgactcctcctccgacgaggacgccgccaacatcgccgtcaccaagggacttctcttccccaacgtcggccacaagtgcctcatggcaaaggacggcaaaaagaagaaggtttatgcatccgggggctcaagttggatcatcgatagcgggtgcacaaaccacatgacaggggagaataagatgttctcctcctacgagaaaaaccaagatccccaacgagctatcacattcggggatggaaatcaaggaaaaatctcatacccaagagaccttaaagggatacttaagacgagctcaaaatga

SEQ ID NO: 4769 - DNA, 6150 bp, Zea mays
  Clone ID: TF_ZM5031.C1.o8.fg
atgggcgcattggtaaggagtgcctttaagtttccgagggcttcctcggcctcgggggtccaagtgaagcgctcggccttcctcaagaggcggtacaagggcaatcctctctcgccaaggcgcgagatgaagcggctcagagccgcaaggcatccgatgaccctttgtactccctttaaatctttgatgggtcccatgttggtgatggctgcgattttctccgggttggcctcgatgcctcgttcggagacgatgaaccccaggagcatgcctcaggggacttcgaagacgcacttctcgagattgagtttcaatccttttgcacgcaggcacccgaaagttacttcgaggtcggagaggaggtgctgcttcacgggtcgggcaccggctcggatatccagcgagtgctcggcgacatccctcggtatgccgggcatgtccgagggactccacgcaaaaaatttaggcgtttgcgcggaggaagtcgacgagcactacttcctatttggggtcgagcttggagccgaccctgacgtgcttgcaggtgtcgttgctggggtcgagggcgacggtcttaaccgcctcggccggttcgaagttgccggtgtggcgcttcgcatcaggcgcctccttggagaggcaatccaggtcggcgatgagggcctcggactcggcgatgtcctcagcgtactccacgcattccacgtcgcactcgtaagcgtggcgtttgctctagattatgagttctacaggtgccaaagtgagaagaccgctacaagccacgggaaggctccatcgagtgagtccgccaacaagaagaaggatggatccccttcacgcattcgatcgcacaagagtggcgagaagaagaagaaaatgaagaaagtggtctactacgagaccgactcttcctcgccctctacatccggatctgacgccacgtccgtcacttctaagcgccaagagcgcaagaagtatagtaagatccccttacgctatcctcgcattcctaagcatattccattactttccgtcccattaggcaaaccaccgacgtttgacagtgaagattattctaggtggagtgatatgatgagatatcacctaacctcactccacaaaagcatatgggatgttgttgagtttggtgtacaggtaccatccgtaggggatgaagattacgatgaggacgaggtggcccaaatcgagcacttcaactctcaagccaccactatactcctcacctctctaagtcgagaggagtataacaaggtgcaagggttgaagagcgccaaagagatttgggacatgctcaaaaccgcgcacgaaggagacgaggtgaccaaaatcaccaagcgggagacgatcgagggggagctcagtcgcttcaggcttcgccaaggggaggagccacaagagatgtacaaccggctcaagaccttggtgaaccaagtgcgcaacctcaggagcaccaaatgggatgaccatgaaatggtcaaggaagtaataggaaaatttgtgagctttgagttgatgatcaaaggctcaaataaaatcatcgagcaagatgcctcctccacacccgaagcacaaccggtcgcattcaatgcaacagaggagaagaaggaagagtctacatcaagtagactccccattgacgcctccaagctcgacaatgaggagatggcgctcatcatcaagagcttctaccaaatcctcaagcaaaggagggggaaggactacaaatcccgctccaagaaagtgtgctacaagtgtggtaagcccggtcactttattgcaaaatgtccattatcaagtgacagtgacagggataacgacaagaagggcaagagaagagaaaataataggtatcacaagaagaagggcggcgatgcccatgtgtgccgcgagtggaactccgacgagagctccaccgactcctcctccgacgaggacgccgctaacatcaccgtcaccaaaggactcctcttccccaacgtcggccacaagtgcctcatggcaaaggacgacaaaaggaagaaggtaaaatcaagatcctccactaaatatgcatcctctagtgatgaggataactctagtgacaaggaggataatttgtgcaccctttttgccaacctaaacatgcaacaaaaagaaaagttaaatgaattaattattgttattcatgagaaggatgaactcttggacacccaagaggacttcctaattaaggaaaataagaagcatgttaaggttaagaatgctaatgctctagaggtagaaaaatgtgaaaaattatctagtgagctaagcacgtgccatgatattattaccaaccttagaaataagaatgctagattaattgctaagattgattcaaatgtttgtgatgattcaatttccaatcttagagatgataatgttagtttacttgctaagattgaagaattgaatgtatctcttgctagccttagaaatgagaacgaaaaattaattgctaagactaaagacttagatgtttgcaatgctaacatttccaatcttagaagtgaaaatgacattttacatgctaagattgttgaactaaaatcttgcaaaccctctacatctaccgttgagcatgtttctatttgcactagatgtagagacattaatgttgatgctattcatgatcacctagctttaattaagaaacaaaatgatcacatagctcaacttaatgccaaaattaatgagcatgacttagaaaatgaaaattttaaatttgctagaagcatgctctatagtgggagacgccctggcatcaaggatggcattggcttccaaaagggagacaatgtcaaacttaatgcccctcctaaaaaattgtctaactttgttaagggcaaggctcccatggctcaggataacgagggttacattttgtaccctgccgattatcccgagcacaagattaggagaattcactatatgaagtttcactctggctctaaccatgcttttatgtataagagtgagacatctagttctaggcaatcaacccgtgctaaattgcctaagaagaaaactcctattgcatcaaatgaaactagtatttcatttaaaacatttgatgcatcttatgttttaactaacaaatccggcaagatagttgccaaatatattgggggcaaacacaagggatcaaagacttgtgtttgggtacccaaagttcttgtatctaatgtcaaaggacccaaaaccatttgggtttatgcatccgggggctcaagttggatcatcgacagcgggtgcacaaaccatatgacaggggagaagaagatgttctcctcctacgagaaaaaccaagatccccaacgagctatcacattcggggatggaaatcaagatttggtcaaaggattgggtaaaattgttatatctcctgaccattccatttccaatgtttttcttgtagattttttagactacaacttcctttcagtttcgcaattatgtaaaatgggttacaactgtctttttacggatataggtgttaatgtctttagaagaagtgatgattcagttgcatttaagggagtgttagagggtcagctatacttagtagattttgatagagctgaactcgacacttgcttaattgctacgactaacatgggctggctctggcatcgccgactagcacatgttggaatgaagaatcttcacaagcttctaaagggagaacacattttgggactaacaaatgttcattttgagaaagacatgatttgtagcgcatgtcaggcagggaagcaagttggtgttcatcatccgcacaaaaacatcatgacgactgacaggccactcgagctcctacacatggacctattcggcccgatagcttacataagcatcgacgagagtaagtactgtctagttattgtggatgattattctcgcttcacttgggtattctttttgcaggaaaaatctcacacccaagaaactttgaaaggattcttgagacgggctcaaaatgagttcggcttgaggatcaagaagataagaagcgacaacgggacagagttcaagaactctcaaatcgaaggcttccttgaggaggagggcatcaagcatgagttctcttctccctacaccccacaacaaaatggtgtagtggagaggaagaatagaactctattggacatggcaaggaccatgcttgatgagtacaagacttcagatcggttttgggccgaggcggtcaacaccgcttgctacgccatcaaccggttgtatctacaccgaatcctcaagaagacatcgtatgaactcctaaccggtaaaaagccaaatatttcatattttagagtctttggtagcaaatgctttattctggttaaaagaggtagaaaatccaaatttgctcctaaggctgtaaaaggctttttactaggttatgattcaaacacaagggcatatagagtctttaacaagtcctctggactagttgaagtttcttgtgacattgtgtttgatgagactaacggctctcaagtagagcaagttgatcttgatgagctagataatgaagaggctccgtgcgtcgcgctaaggaacatgtccattggggatgtgtgtcctaaggaatctgaagagcctccaaatacaaaagatcaacaatcttcctccatgcaagcatctccaccaactcaagatgaggatgaggttcaagatgatgaaggagaagatcaagaagatgagccacctcaagaggagagcaatgatcaagggggagatgcccatgatcaagatgaggaagatgaacaagttccaaaaccgccacacccaagagtccaccaagcaattcaacgagatcaccccgtgaacaccatcctcggcgatattcaaaagggggtaactactcgatctcgtgttgctcatttttgtgaacattactcttttgtttcctctattgagccacacaaggtagaggaagcacttcaaggaaccaagtggttcttccgcaacaagcaagatgagcatggtgtggtgacaaggaacaaagcccgacttgtggccaagggatattcacaagtcgaaggtttggatttcggtgaaacctatgcacccgtagctaggctagaatcaattcgcattttacttgcctatgctacttaccatggcttcaagctttaccaaatggacgtgaagagtgccttcctcaatggaccaatcaaggaggaggtctatgttgagcaacctcccggctttgaagatagtgagtatcctaaccatgtatataaactctctaaggcgctttatgggctcaagcaagccccaagagcatggtatgaatgcctaagagactttcttatcactaatggcttcaaagtcggaaagaccgatcctactctatttactaaaacacttgcaaatgatttgtttgtatgccaaatttatgttgatgatattatatttgggtctactaacgaatctacatgtgaggaatttagtaggatcatgacacagaaattcgagatgtctatgatgggggagttgaagtacttcttaggatttcaagtgaagcaactccaaaagggcacctttattagccaaacaaagtatattcaagacattctaaacaagtttgggatgaaggatgccaagcccatcaagacacccatgggaaccaataggcatctcgacctcgacacgggagggtgtaaaattaatagaaagagcacatcggggacttgccaattcttgggaaggtctctggtgtcttgggcttcaaagaagcaaaattccgtagctctttctaccgccgaagccgagtatattgccgtaggccattgttgcgtgcaattgctttggatgaggcaaacccttagggactatggttacaaattaaccaaagttcctcttctatgtgataatgagagtgcaatccgcatggcggataatcccgttgaacatagccgcactaaacacatagccattcggtatcattttctaagggatcaccaacaaaagggggatatcgagattgcatatattaacaccaaagaacaattagccgatatctttaccaagccactagatgaacaaacatttaacaaacttaggcatgagctaaatattcttgattctcggaatttcttttga

SEQ ID NO: 4770 - DNA, 2859 bp, Zea mays
  Clone ID: TF_ZM5031.C3.o1.fg
atgtcgggagatcacgccaagaaggagatggagaccggcgaaaagcccactacaaaccacgggagcacttcatcggaagagtcccgcaccaagaggaaggagaagaagaagatctcctccaacaaagggaaggagaagaaatcttcttctcaccacaaagagaagaaggaaaaatcttcttcccacaagccgcgtcggagtggggacaagcaaaagaggatgaggaaggtggtctactacgagaccgacacttcatcaacatcaacctccgactccgatgcaccctccgtaacttctaaacgccaagagcgtaagaagtttagtaagatccccctacactaccctcgcatttctaaacatgcacctttactttccgtcccattaggcaaaccaccaacttttgatggtgaagattatgctaggtggagtgatttaatgcgatttcatctaacctcactccacaaaagtatatgggatgttgttgagtttggtacacaggtaccatccgtaggggacaaggattatgatgaggatgaggtggcccaaatcgagcacttcaactctcaagcgacaacaatactcctcgcctctttaagtagagaggagtataacaaagtgcaagggttgaagagcgccaaggaggtttgggatgtgctcaaaaccgcgcacgaaggagatgagctcaccaagatcaccaagcgggaaacgatcgagggggagctcggtcggttccggcttcgcaaaggggaagagccgcaacacatgtacaaccggctcaagaccttggtgaaccaagtgcgcaacctcgggagcgtaaagtgggatgaccacgaagtggttaaggttattctaagatctcttattttccttaaccctactcaagttcaattaattcgtggtaatcgtagatatactaaaatgacccccgaggaagtaatcgggcattttgtaagttttgagtgcatgatcgaaggctcgaggaagatcaacgagcttgatgatccatctacatccgtggctcaacccgtcgcattcaaggcgatggaagaaaagaaggaggagtctaccccaagtcgacaaccaatagacgcctccaagctcgacaatgaggaaatggcgctcgtcatcaagagcttccgccaaatcctcaagcaaaggagagggaaagactacaagtcccgctccaagaaagtttgctacaagtgtggtaagcccggtcactttattgctaaatgtccattgtcaagtgacagtgacagggataacgacaagaagggcaagaggagagaaaagaagaggtactacaaaaagaagggcggcgatgcccatgtttgtcgggaatgggattccgacgaaagctcaagcgactcctccgacgacgaggacgccgccaacatcgccgtcaccaagggactcctcttccccaacgtcggccacaagtgcctcatggcaaaggacggcaaacggaaaaaggttaaatctaactcgtccactaaatatgaatcttctagtgatgataatgctagtgatgaggaggataatttgcgttccctttttgccaaccttaacatagctcaaaaggaaaaattaaatgaattagttagtgctattcatgaaaaggatgaccttttggattcccaagaggattgtctaattaaagaaaacaagaaacatgttaaggttaaaaatgcttatgctctagaaattgagaaatgtgaaaaattatctagtgagctaagcacttgccgtgagatgattgacaaccttaggaatgaaaatgctagtttaaatgctaaggttgattcacatatttgtaatgtttcaattctcaatcctaaagataataatgataatctgcttgctaggattgaagaattaaacatttctcttgctagccttagagtagaaaatgaaaatttaattgctaaggctaaagaactagatgtttgcaatgctatcatttccaatcttagagataaaaatgatattcttcatgctaagattgttgaacttaattcctgcataccctctacatctattgttgagcatgtatctatttgtactagatgtagagatgttgatgttaatgctattcatgatcatatggctttaattaaacaacaaaatgatcatatagcaaaactagatgctaaaattgccgagcacaacttggaaaatgaaaaatttaaatttgctcgtagcatgctttataatgggagacgcccgggcattaaggatggcattggcttccaaaggggagacaatgtcaaaattagtgcccctcctaagagattgtccaactttgttaagggcaaggctcccatgcctcaggataacgagggttacattttataccctgccggttatcccgagagcaagattaggagaattcactctaggaagtctcactctggccctaatcatgcttttatgtataagggtgagacatctagttctaggcaaccaacccgtgctaagttgcctaagaaaactcctactgcatcaaatgaacataatctttcatttaaaacttttgatgcatcttatgtgttaactaacaaatccggcaaggtttatgcatccgggggctcaagttggatactcgacagcgggtgcacaaaccacatgacaggggagaaaaggatgttctcctcatatgagaaaaaccaagatccccaaagagcgatcacattcggggatggaaatcaaggtttggtcaaagattacaacttgctttctgtatcccaattatgtcaaatgggctacaactgtctattcactgatgttggtgtcactgtctttagaagaagtgatgattcaatagcatttaagggaatgttagagggtcagctatacttg

SEQ ID NO: 4771 - DNA, 2673 bp, Zea mays
  Clone ID: TF_ZM5043.C3.o2.fg
atgtcgggagatcacgccaagaaggagatggagaccggcgaaaagcccactacaagccacgggagcacttcatcggaagagtcccgcaccaagaggaaggagaagaagaagagctcctccaacaaagggaaggagaagaaatcttcttctcaccacaaagagatgaaggagagatcttcctctcacaagccgcatcggagtggggacaagaagaaaaggatgaggaaggtggtctactacgagaccgattcttcatcggcatccacctccggctccgacgcggcatccatcacttctaagcgccaagagcgcaagaagtatagtaagatccccctacactaccctcgcatttccaaacatacacctttgctttccgtcccattaggcaaaccaccaacttttgatggtgaagattatgctaggtggagtgatttaatgcgatttcatctaacctcacttcacaaaagtatatgggatgttgttgagtttggtgcacaggtaccatccataggggataaagattatgatgaggatgaggtggcccaaatcgagcacttcaactctcaagcgacaacaatactcctcgcctctttaagtagagaggagtataacaaagttcaaggattgaagagcgccaaggaggtttgggatgtgctcaaaaccgcgcacgagggagatgagctcacaaagatcaccaagcgggaaacgatcgagggggagctcggtaggttccggcttcgcaaaggggaagagccacaacacatgtacagccggctcaagaccttggtgaaccaagtgcgcaacctcgggagcaagaagtgggacgaccatgaaatggttaaggttattctaagatctctcattttccttaaccccactcaagttcaattaattcgtggtaatcctagatatactaaaatgacccccgaggaagttatcgggaattttgtaagttttgagtgcatgatcgaaggctcaaggaagatcaacgaacttgatgatccctccacatccgaagctcaacccgtcgcattcaaggcgacggaagaaaagaaggaggagtctacaccaagtaggcaaccaatcgacgcctccaagctcgacaatgaggaaatggcgctcgtcatcaagagcttccgccaaatcctcaagcaaaggagagggaaagactacaagtcccgctccaagaaagtttgctacaagtgtggtaagcccggtcactttattgcaaaatgtccattatcaagtgacagtgacagggataacgacaagaagggcaagaggagagaaaagaagaggtactacaagaagaagggcggcgatgcccatgtttgtcgggagtgggactccgacgaaagctctagcgactcctcctccgacgaggacgccgccaacatcgtcgtcaccaagggacttctcttccccaacgtcggccacaagtgcctcatggcaaaggacggcaaaaggaagaaggatggccttttggattctcaagaggatctcctaattaaggaaaacaagaaacatgttaaggttaaaaatgcttatgctctagaaattgagaaatgtgaaaaattatcgagtgagctaagcacttgtcgtgagatgattgacaaccttaggaatgaaaatgctagtttaaatgctaaggttgattcacatgtttgtaatgtttcaattccccatcctagagataataatgatgatttgcttgctaggattgaagaattaaacatttctcttgctagccttaggagtgaaaatgagaaattaattactaaggcaaaagattttgatgtttgcaaagttacaatttccgatcttagagataagaatgatatactacatgctaagattgttgaacttaattcttgcaaaccctctacatctaccattgagcatgtcactatttgtactagatgtagagatattgatgttgatgctattcatgatcacatgattttaattaagcaacaaaatgatcatatagctaaactagatgctaaaattgccgagcacaacttagagaatgagaaatttaaatttgctcgtagcatgctttataatgggagacgccctggcattaaggatggcattggcttccaaaggggagacaatgtcaaaattagtgcccctcctaaaagattgtcaaattttgttaagggcaaggctcccatgcctcaggataacgagggttacattttataccctgccggttatcccgaggacaaaattaggaaaattcattctaggaagtctcactctggttctaaccatgcttttatgtataagagtgagacatctagttctaggcaaccaacccgtgctaagttgcctaagaagaaaattcctattgcatcaaatgatcataatatttcttttaaaacttttgatgcatcttatgttttgactaacaaatccggcaaggtttatgcatccgggggctcaagttggatactcgacagcgggtgcacaaaccacatgacaggggagaagaagatgttctcctcatatgagaaaaaccaagatccccaacgagcgatcacattcggggatggaaatcaagattctttagattacaacttgctttccgtttcacaattatgtcaaatgggctacaactgtctattcactgatgtaggtgtcactgatagtcgcctagagggggggtga

SEQ ID NO: 4772 - DNA, 1923 bp, Zea mays
  Clone ID: TF_ZM5107.C1.o2.fg
atgtcgggagatcacgccaagaaggagatagagaccggcgaaaagcccactacaagccacgagagcacttcatcggaaaagtcccgcaccaagaggaaggagaagaagaaggactcctccaaagggaaggagaagagatcttcttcacaccacaaagagaaaaaggagaaatcctcttctcacaagccgcatcggagtggggacaagaaaaagaggatgaggaaagtggtctactacgagaccgattcttcatcggcatccacctccggctccgacgcggcgtccgtcacttctaagcgccaagagcgcaagaagtatagtaagattcccctacgctaccctcgcatttctaaacatacacctttactttccgtcccattaggcaaaccaccaacttttgatggtgaagattacgctaggtggagtgatttaatgcaatttcatctaacctcgctccacaaaagtatatgggatgttgttgagtttggtgcacaggtaccattcgtaggggatgaaaactatgatgaagatgaagtagcccaaatcgagcacttcaactcccaagccacaaccatactcctcgcctctctaagtagagaggaatataacaaggtgcaagggttgaagaatgcgaaggagatttgggatctactcaagaccgcgcacgagggtgatgaactcaccaagatcaccaagcgggaaacgatcgagggggagctcggtcgcttccgtcttcgccaaggggaggagccacaagatatgtacaaccggctcaaaaccttggtgaaccaagtgcgcaacctcgggagcaagaaatgggatgaccacgaggtggttaaggttattcttagatcactcatcttccttaaccccactcaagttcaattaattcgtggtaatcctagatacactctaatgactcccgaggaagttatcgggaattttgtgagctttgaatgtatgatcaagggctcaaagaagatcaacgagcttgatgatccctccacatccgaagcacaaccggtggcattcaaggcgacggaggagaagaaggaggagtctacactaagtagacaaccaatcgacgcttcaaagctcgacaacgaggagatggctttaatcattaaaagctttcgccaaatcctcaagcaacggaaggggaaggattacaaatcccgttccaagaaggtttgctacaagtgtggtaagcccggtcactttattgctaaatgtccattatcaagtgacagtgacagggataacgacaagaagggcaagaggagagaaaagaagaggtaccacaagaagaggggcggcgatgcccacgtgtgccgcgagtgggactccgacgagagctccatcgactcctccgacgacgaggacgccgccaacatcgccgtcaccaagggactcctcttccccaacgtcggccacaagtgcctcatggcaaaggacggcaagaggaagaaggttaaatccaaatcatccactaaatatgagtcttctagtgatgataatgctagtgatgaggaggataacttgcgtaccctttttgccaaccttaacatagaacaaaaggaaaaattaaataaattaattagtgctattcatgaaaaggatgaccttttggattcccaagaggacttcctaattaaggaaaataagaaacatgttaaggttaaaaatgcttatgctctagaaatagaaaaatgtgagaaattatctagtgagctaagcacatgccatgacactattaccaaccttagaaatgaaaatgccaaattaattgctaaggttgattctcatatttgtaatgtttcaacttccaatcctagagatgataatgttgatttacttgctaggattgatgagttaaatgtttctattgctagccttagaattgagaatgaaaaattgcaatga

SEQ ID NO: 4773 - DNA, 761 bp, Zea mays
  Clone ID: TF_LIB4699-002-R1-K1-D10
gcaacgcggcaagccgcgcaaggcgcgcggaggcgcttttgccgaggcgcgaggacaagctcagggtggtgcccgcggaggcgcccaaggcggtgccgtcggcaacaagaagccgacacgagatgacggctgtcacaactgtggcaagcttggccactgggccagggaatgttgacagccacgacgcggccagggcaacgttgcataggcggaggcggagtaggaagctctgctcctagcacacgcaagcatcaagataccttcagcgtcaccggccgcagcggcactcctccaccttgatgagtcgaaagcacacgctttccttggcgacggctacaacaacgacatgatcgaaggatggtgttgtttgtcacttgttctcaaatgctgtgaatcaagaataaggcaacacaattgttaagtattaaggaccttcgtctgccgaaacattatctccccaaggacataatgttcattatacgaaggttatgaaggacatgtcttcatcaccttatagataaatcaaaatacaaagagatagaaatggcaagtataacttatcgatccattcatgtttgcattccgtaaagcatgcatgagtattaacagattgtatattacattgataccttcggcttgctcgaaggcgttgacgtgagggcgaatacaattcagcgtgtacagtatggtgctactgttcatttatttataagcgcgggaagaccacgggtaaaattacatttatgtccccttttttgctg

SEQ ID NO: 4774 - DNA, 2530 bp, Zea mays
  Clone ID: TF_ZmC1028_2
ggcgtaccagagctggcgctggcagccgcggggctgctcgctgcccagcttcaacgcgacgctgacgctggagtccctgcgggggaagcggatgctgttcgtgggtgactcgctgaaccgggggcagtacgtgtccctcctctgcctcctgcaccgggccatccccgacggcgccaagtcgttcgagacggtggactcgctgagcgtcttccgggcgaagaactacgacgccaccatcgagttctactgggcgccgatgctggccgagtccaactccgacgacgccgtggtgcactccgccgacgaccgcctcatccgcggcgcgcccatggacaggcactacagcttctggaagggcgccgacgtcctcgtcttcaactcctacctctggtgggtcgccggggacaaaatccagatcctgaggggcgccgacaacgacccgagcaaggacatcgtggagatgaagtcggaggaggcctaccggctggtgctgcaccaggtggtccggtggctggagcgcaacgtggaccccggcaagtcgcgggtgttcttcgtcaccgcttcgccgacgcacacggacggaagggcgtggggcgacgacgacgcggagggcagcggcaactgctacaaccagacgtcgccgatcagcgccgcctcgtcctaccgtggcggcacgagccaggagatgctgcgcgcgacggaggaggtgctggccacgtcgcgggtgcccgtcgggctggtcaatatcacgcggctgtccgagtaccgccgggacgcgcacacgcagacctacaagaagcagtgggtggaaccgacggccgagcagcgcgccgaccccaggagctacgccgactgcacgcactggtgcctccccggcgtgccggacacgtggaatgagctgctctactggaagctcttcttccccagcaacgatcaggtcctctgatggtgcctgcatacatacgcctggaaaccaactgctaggggctagcccaaagaaaattgtgtctagatgaagaacaaagccatggtgttcaaatgttttgttttgatttcggatatggacgctgtcgatgctcttgttctctgtggaattcttcttaccaaccaaacctacaaccggctcaagacccttgtcaacaagataagaagctacggaagcacgcgatggacggaccacgacatcgtccgcctaatgctaaggtcttttactgtccttgatcctcatcttgtaaacaatattcgtgagaatcctaggtacaccaagatgacgcccgaggagatacttggaaagttcgtgagcgagcgaatgattatcaaggaagcaacatacgtggacggcgcattgaatggtccaatcaatgagcctcaacctcttactctcaaggcaacaagaagcaaggagacgctacctagcaaggtggcacaaattgaggcggccggacttaatgatgaagagatggctctcatcatcaagagattcaagactagagatggcaatgggtacccgcgacccgatacccgatgggtatttactccattaggatggttaaatgatgctagaaattttacaatgacggcgctaaaaggtcgcaaggggcagccaagcaagaccaagacaaaggggaagcgctcatgcttcaaatgtggtaagcttggtcattttattgctaactgtcccgacaatgatagtgatcaggatcaagggaacaagagggagaagaagaagaactataagaaggcaaagggcgaggcgcatctaggcaaggagtgggattcggattgctcctcttccgactccgacaatgaaggactcgccgccaccgccttcaacaagtcatccctcttccccaacgagcgtcacacatgccttatggcaagggagaagaaggtatgtactcgaaactctacttatgcttcttcaagtgaggacgaatctagtgatgaggatgaaatagattattcatgtttatttaagggcctagatagaaccaaggtagataaaattaatgaattgattgatgccttgaatgataagaataggcttttagaaaagcaagaggatttgttgtatgaagaacatgacaaatttgtagaagcacaaaaatctcatgctctagaagttaaaagaaatgaaatgctttcttgtgaattatcttcttgccacgagacaatttctaacttaaggagcattaatgatgatttgaatgctaagttagaaatagctagtaaatcaacatcttgtgtagaaattgttgcaacttgtaataggtgtaaagattttgacattgatgcttgtagtgaatacctagtttcaatttccaaacttaatgatgaattggctagtcttaatgctcaacttaagactagcaagagcgaatttgataagctaaaatttgcgagggatgcctacacgattggtagacacccctcaattaaggatggacttggcttcaagagggaagccaagaacttaacaagccataaggttcccattcccgccaatgagaaagggaaggctcctaggcaa

SEQ ID NO: 4775 - DNA, 2588 bp, Zea mays
  Clone ID: TF_ZmC119_1385
cattctcttgattttcaaatctaattttgaatttttgttatgagtcacaccatggatcaaaatgtaccagattcaaatattagtgtaaaaaatatattcttattaatctattttattttacctcattggtttgatatttccttttcttttcttaaattctaaaattgtacctttagattaaatcccaattctcaatactccagtataatttgagatatctgaatttgctattttatttcttcatatatttattatattttttccttatacaaattttgggccttacaaaatgcaagttttatctcccttgcattttgcccctaatttcctagcaatcactttcttatcatttctacaaattgcaaaggaagtattgcaagcatgataaattgtagaaggttcattacttgctttcctaggtacatgaacaacatttctcctaggcatgtgatgaataacatttttcctaggcatatcatgcacaatagaagaactagaagcagtcatacatatgaatcataagaataattcctataagcatttctagagaattttctatcactataaatgaaagcatggttctttttagcactactagccataggagccttccctttctccttgacgaagatgggagccttatggcttgttaagttcttggcctctctcttgaagccaagaccatccttaattgaggggtgtctaccaaccgtataggcatcccttgcaaattttattttatcaacttcattcttgctagtcttaagttgggcattaagactagccacttccttatttaatttggaaattaaaactagatgttcactacaggcatcaacatcgaaatccttacacctagtgcaaatcttaacatgttctacacaagaattagatttatttgctatttctaacttagcatttaaatcattgttaacaccttgtaaagtagaaatggtttcatgacaagtagatagttcataagaaagcatttcatttctttttacttctaaagcatatgatttttgtgcctctacaaatttatcatgttcatcatacaataaatcctcctgcttttctaaaagcctatccttttcattcaatgcatcaatcaattcattgattttatctatcttagatctatctaagcccttgaacaagcatgaataatctatgtcatcatcactagactcactatcactagaagaagcataagtggagtcttgagtactcaccttcttctcccttgccataagacatgtgagacgctcgtttgggaagagagccgatttgttgaaggcagtggcggcgagtccttcgttgtcggagtcggaggaggagcaatccgagtcccactcctttcctagatgcgcctcgccctttgccttcttgtattgcttcttcttttctcttttgttccccttttcctggtcactttcattatcgggacagttagcgataaaatgaccaagcttaccgcatttgaagcatgagcgcttccccttggtcttagtcttgctcggctgtccattgcgaccctttagcaccgtcttgaatctcttgataatgagggccatttcttcatcgttgagtccagccgcctcaatttgtgccaccttgctaggtagcgcctccttgcttcgtgttgccttgagagtgagaggttgcggctcgttgatcggaccattcaaggcgtcgtccacatatctcgcctccttgatcatcattcgcccgctaacaaatttcccaagaacttcttcgggcgacatcttggtgtacctgggattttcacgtatattgttcaccaagtgaggatcaagaacggtaaatgaccttagcattaggcggacgacgtcgtggtccgtccatcgtgtgctcccgtagcttcttatcttgttgataagggtcttgagccgattgtatgtttgcgttggctcctcgccccttatcattgcgaaccgtccaagctcgccctccaccaactccatcttggtgagtaaggtgacgtcgttcccctcatgagaaatcttgagggtgtcccagatttgcttggcgttatccaagccgctcaccttatggtattcattcttgcacaaggaagctagaagaacagtagtagcttgtgcattcttatgaatttgttcattaatgaacatgggactatccgaactatcaaaatgcattccactctctacaatctcccatatactaggatggagagagaataggtgactacgcattttgtggctccaaaatccgtagtcctctccatcaaagtgtgggggcttgccgagtggaatggagagcaaatgagaatgtgaactttgcggaatacgagagtaatcaaaagaaaagtttgaattaaccggttttcttctctcgtagtcgttgtggtcctcgtccttttgggaagaagtagactcgtcgctgtcgtagtagacgatctccttgatgcgcctggtcttcttcttcttcccttccttccgtctttggcccgagccggagtcggtaggcttatcgtccttcggctcgttgacgaaggattccttctctttgtcgttgatcactatacccttccccttaggatccat

SEQ ID NO: 4776 - DNA, 2551 bp, Zea mays
  Clone ID: TF_ZmC119_1489
ctagatttgcactttgttcatccatgggcattgattcacatttaagcacttgtgttgacactcaatcaccaaaatatttagaaatggcccaagggcacatttccctttcagtgcctcgcccttggccttcttgtaatgcttcttcttttccctcttgctcccgtgttcctggtcactatcattgtcgggacagttagcaataaaatgaccaagcttaccgcatttgaagcatgatcgctttcccttggtcttagtcttgcttggctgtcccttgcgaccctttagtgccgtcttgaatcttttgatgatgagggccatctcttcatcattaagaccggccgcctcaatttgcgccaccttgctgggtagcgcctccttgctccttgttgccttgagagcaatgggttgaggctcatggattgggccattcaacgcgtcgtccacgtacctcgcctccttgatcatcattcgcccgcttacaaattttccatgaatttcttcgggcgacatcttgatgtacctaggattttcacgaatattgttcaccaagtgaggatcaagaacggtaaatgaccttagcattaggcggacgacgtcgtgatccgtccatcgcgtgcttccgtagctccttattttgttgataaggatcttgagccggttgtatgtttgtgtcggctcctcgccccttatcatcgcgaatcgtccgagctcgccctccaccaattccatcttggtgagtaaggtgacatcattcccctcatgagagatcttgagggtgtcccaaatctgcttggcattgtccaagccgctcaccttgtgatactcgtccctgcacaaagaggctagcaacacagtagtagcttgtgcatttttatggatctgttcattaataaatgaagggctatccgagctatcaaatttcattccactttccacaatctcccaaatgcttggatggagagaaaataggtgagtacgcattttgtgactccaaaatccgtagtcctctccatcaaagtgaggaggcttgccaagtggaatggggagcaaatgagcatttgagctatgcggaatgcgcgaataatcaaaagaaaagtttgagttaaccgtcttttgtttgtcatagtcgttgtcgtcgttgtccttttgggaagaggaagattcgtcgctgtcgtcgtagtagacgatctccttgatgcgccttgtcttcttcttcttcccttccttccgtctatggcccgagccggagtcggtaggcttgtcatctttgggctcgttgacgaaggactccttctccttatcgttgatcacgattcccttccccttaggatccatctcttcgggcggttagtccttttgtgaagagaacggctccgataccaattgagagcacctagagggggggtgaataggtgatcctgtaaaacttgaaaacttaagccacaaaaacttggttaagcgttagcacagtaaatgccaaatggctagagagaagatcttgcacaatacgataaccacaaagagtacaacacagagatgacacagtagtttatcccgtggttcggccaagtacaaaacttgcctactccacattgtggcgtcccaacggacgagagttgcactcaactcctctcaagtgatccaatgatcaacttgaataccacggtgttatgcttttcttttcttatcccgttcgcgaggaatctccacaacttggagcctctcgcccttacacttttgatgttcacaaagaatcacggagtaaagggggggatgagcaactcacacaagacacaaagatcacagcaaatacgcacacacaagacctagacttgagctcaaaaagactagcacactagaacagggctcaaatcactagaatgtcgaacaagtgcgcaagaatggagtgtgagtgatcaagagtgctcaaggaatgcttggtgttctcctccatgcgcctaggggtcccttttatagccccaaggcagctaggagccgttgagagcattccaggaaggcaattcttgccttctgtcgcctggcgcaccggactgtccggtgcagatttctttccttctgtggcgtagccgaccgttggcgcctgggagccgttggtgcaccggacactgtccggtgcacaccggacagtccggtgccccctcccgaccgttcgctcggccacgtgtctcgcgcagatcgcgcagccgaccgttggcccggccgaccgttggctcaccggacagtccggtgaattatagccgtacgccgttaatttattcccgagagcgccaagttcgcctgagcccgcctggcacaccggacactgtccggtgccccaccggacagtccggtgcacccagacagtgctggctttggctgaaacaaagctatctctctccaatttgttttctcctatttccagcacttttgacattatttgcactttgtccaccacattgcatagatcaacgcaaaagcacttgcgttggcagtcaatcaccaaaatacttagaaatggcccaagggcacatttctctttcaatctccccat

SEQ ID NO: 4777 - DNA, 5124 bp, Zea mays
  Clone ID: TF_ZmC29741_13
tcaatccaagttccgcgaatctaagatattgagctcactacgcagcctgcaaaaggtcttctcatctagaggcttggtaaagatatcggctagctggttctcggtgctaacatgaaacactttgatatcccccttttgctggtggtctctcaaaaagtgatgccggatgtcaatgtgctttgtgcggctgtgctcaacaggattttccgctattcggatagcactctcattatcacataggagtgggactttgctcagattgtagccaaagtcccggagggtttgcctcatccaaagtagttgcgcgcaacactgtcctgcggcaacgtactcggcctcagcggtggatagggcaacggaagtttgtttcttagaattccatgacaccagggaccttcctaagaattggcacgtccccgatgtactcttcctatcgaccttacatccagcatagtcggaatctgagtacccaatcaagtcaaagttagacccctttggataccagatcccgaagcaaggcgtagcgactcctttgttgaggtcggtgtgtctgtcagttcccatcggcgtctttgcgggcttggcatccttcatcccaaaccgctttagaaagtcttgcgtgtacttcgtttgggagatgaaagtgtcgtccttgagttgcttcacttggaacccaaggaagtagttcaactcgcccatcatcgacatctcgaatttctgcgtcatcaccctgctaaactcttcacaagacttttgattagtagaaccaaatattatgtcatcgacataaacttggcatacaaaaagatcaccatcgcaagtcttagtaaaaagagttggatcggctttcccgaccttgaaagcattagcaattaaaaagtctctaaggcattcataccatgctcttggggcttgcttaagtccatagagcgccttagagagcttacacacgtggtcggggtaccgttcatcctcgaagccagggggttgctccacgtacacctcctctgcgacttgggcataaccttttgccacaagccgagccttgttccttgtcaccaccccgtgctcgtcttgtttgttgcggaacacccacttggttcccacaacattttgcttggggcgaggcaccagtgtccaaacttcattgtgcttgaaattgttgagttcctcctgcatggccaacacccagtccagatctagcaaggcctcttctaccctaaaaggctcaatagaagagacaaaagagtaatgctcacaaaaattaactaatcttgaacgagtagttactcccttgctaatatcacccagtatttggtcgacgtgatgatccctttggatcgtcgctcgaacttgggttggaggtgcctgaggtgcttcttcctcttcaacttgaacatcctgtgctcccccttgatcatgtgcctccacttgaggtacctgtttgtcatcttgggttgggggatgcaccatagttgaggaagacggttgatcttgctccaaatgttcctgaggccgtacatctccaatcgccatggtgcgtattgcggctgttggaacgtcttcttcatctacatcatcaagatcaacaacttgctctcttggagagccattagtctcatcaaatacaacgtcgctagaaacttcaaccaaacccgatgatttgttgaagaccctatacgcctttgtatttgaatcataacctaatagaaacccttctacagctttgggagcaaatttggaattcctacccttcttcacagtcagcagctcatatgaagtcttcttgaggaggcggtgaaggtagaccctgttgatggtgtggcaagccgtgttcacggcttccgaccaaaagcactcgggggtcttgaactctccaagcatagtcctcgccatatctatgagtgtcctgttcttcctctctaccacaccattttgctgaggtgtgtagggagcggagaactcgtgcttgatcccctcctcctcaaggaactcctccacttgaagattcttgaattcggacccgttgtcgctccttatcttctttaccttgagctcaaactcattttgagctctcctgaggaagcgcttgagggtcccttgggtttcagacttatcctgcaaaaagaacacccaagtgaagcgggaaaagtcatcaacaataactagaccatacttacttcctcctatgctcagataggcgacgggtccgaagaggtccatatgcagcagctccagaggtcttgacgtggtcatcacattcttgctgtgatgtgctcctctcacttgtttacctgcttgacaagctgcacaaggtctatctttttcgaaatgaacattggttagacctatcacgtgttctccctttagaagcttgtggaggttcttcatccccacatgtgctaagcggcgatgccacaaccagcccatgcaagtcttagccattaagcatgcatctagaccgacctcttcttttgcaaaatcaactaagtaaagtttgccatctagtacacccttaaaagctaatgaaccatcacatcttctaaagacagacacatctacatttgtaaataaacagttatatcccatattacataattgactaacagatagtaaattatatccaagactctccactaaaaacacattagagatagaatgctcatttgatattgcaatcttgcctaaacctttcaccttgccttggttcccatcaccgaatatgattgaatcttgggaatccttattcttgacgtaggaggtgaacatcttcttctcccccgtcatatggtttgtgcatccgctgtcgataatccagcttgaacccccggatgcataaacccaactcttgttgggtcctacaaggttagtcacaatttccttagggacccaaatgcaagttttatcacccttgcattttgcccctaatttcctagcaactatcttcctatcctttctacaaatagcaaaggaagcattcaaggcatgataaattgtagagggaccattcataactttcctaggagcatgagcaaaattctttctaggcacatgatgaatatttttcctaggcatatctctacaatgcatataggaagaactagaagcatacatagcataagaatcataggcatgtgaatcaagagcattacaactcctatgagactgtcttctattattgtacataaaagcatggttctttttagtactacttgccataggggccttccctttctccttggcggagatgggagccttatggcttgttaagtccttggcttccctcttgaagccaagtccatccttaattgaggggtgtctaccaatcgtgtaggcatcccttgcaaattttagcttatcgaaatcacttttgctagtcttaagttgggcattaagactagctacttcatcatttaatctcgaaattgaaactaggtgtccattacaggcatcaatatcaaaattcttacacctagtgcaaatcataacatgttctacacaagaattagatttatttgctacttctaatttagcatttaaatcattgttaacactttgtaaagtagaaatggtttcatgacacgtagatagttcataagaaagcatttcatttcttttaacttctaaagcatatgatttttgtgcctctacaaatttgtcatgttcatcatacaacaaatcctcttgcttttctaaaagcctatccttttcattcaaggcatcaatcaattcattgattttatcaattttatttctatccaatcccttgaacaagctagagtaatctatttcctcatcactagattcgtcttcacttgaagaagcataagtagagtctcgagtacataccttcttctcccttgccatgaggcatgtgtgacgctcgttggggaagagggatgacttgttgaaggcggtggcggcgagtccttcattgtcggagtcggacgaggagcagtctgaatcccattccttgccaagatgagcctcgccctttgccttcttataattcttcttcttctccctcttgttcccttggtcctgatcactatcattgtcgggacagttagcaataaaatgaccaagcttaccgcatttgaagcatgagcgcttccccttggctttagtcttgcttggttgtcccttgcgacccttaagcgccgtcttgaatcttttgatgatgagggccatctcttcatcattaagtccggctgcctcaatttgtgccaccttactaggtagcgcctccttgcttcttgttgccttgagagcaaggggttgcggctcgttgatcggaccattcaaggcgtcgtccacgtacctcgcctccttgatcatcatccgcccgctaacgaattttccaaggacttcttcgggcgacattttggtgtacctgggattctcacgaatattatttaccaaatgaggatcaagaacggtaaaggaccttagcatcagtcggacgacgtcgtggtccgtccatcgcgtgcttccgtagctccttattttgttgataagggtcttgagtcggttgtatgtttgtgtcggctcctcgccccttatcatcgcgaaccgtccaagctcgccctccaccaactccattttgtggtattcatccctacacaatgaagctagaagaacagtagtagcttgtgcattcttatgaatttgttcattaatgaacatgggactatccgaactatcaaagtgcattccactctctacaatctcccatatactaggatggagagagaacaagtgactacgcattttgtgactccaaaatccgtagtcctctccatcaaaatgaggaggtttaccaagtggaatagataataaatgagcatttgcactttgaggaatacgcgaataatcgaaagaaaagttcgagttaaccgtctttcgtttgtcgtagtcgttgtcgtcgttgtccttgtgggaagaagtggactcatcactatcgtcgtagtagacgatctccttaatgcgccttgtcttcttcttcttcccatcttttcgtctatgacccgagcccgagtcggtaggcttgtcatcctttggctcgttgacgaaagactccttctctttatcgttgatcacgatacccttccccttaggatccat

SEQ ID NO: 4778 - DNA, 4036 bp, Zea mays
  Clone ID: TF_ZmC29741_17
tcattttgagctctcctgaggaagcgtttgagagtcccttgggtttcggacttttcttcctcctatgctcagataggcgacgggtccgaagaggtccatatgtagcatctccaagggtcttgatgtcgtcatcacatttttggtgtgatgagagcctcccacctgtttccctgcttgacaagctgcacaaggtctatctttttcgaattgaacattagttagacctatcacgtgttctccctttagaagcttgtgaaggttcttcatccccacatgtgctaagcggcgatgccacagccagcccatgctagtcttagctattaagcatgcatctagaccggcctcttcttttgcaaaatcaactaaataaagtttgctgtctaatacacccttaaaagctagtgaaccatcacttcttctaaagacagacacatctaacccttttaccttgccttgattcccatcaccgaatataattgaatcttgggaatctttattcttgacgtaggaggtgaacatcttcttctcccccgtcatatggtttgtgcatccgctgtcgataatccagcttgaacctccggatgcataaacctttttatgaacatttgcaacatttcttttaggaacaacatttctcctagtaatatttctatcatacacataagaagaactaggagcaaacatggcatgagaatcataaacatatgaatcaaaagcatcataacttctatttctagtttgtcttttatcatgatacaaaaaggcatggttccttttagcactagtagccataggggccttccctttctccttggcggaaatgggagccttatggcttgttaagttcttggcttccctcttgaagccaagtccatccttaattgaggggtgtctaccaaccgtgtaggcatccctagcaaattttagtttttcaaaatcacttttgctagtcttaagttgggcattaagactagccacttcattatttaactttgcaatagaagctatgtgttcactacaggcatcaatatcaaagtctttacatctattgcaaataacaacattttctacacaagttgttgatttactagctatttctatcttagcattcaactcatcgttaatgctctttaattttgaaattgtctcatggcatgaagataattcacaagtaagcatttcatttcttttaacttctagagcatgagatttttgagcttctaaaaatttatcatgctcttcatacaataaatcctcttgtttctctaagagtttatccttctcattcaatgcatcaattaattcattaattttgccaatcgtaattctatctagacctttaaataaactagaatagtctatttcatcatcgtcactagaatcatcaccactagaagaagcatgagtagagtttcgagtacttactttcttctccttagccatgagacacgtgtgacgctcgttggggaagagggccgatttgttgaaggcggtggcggcgagtccttcattgtcggagtcggaagaggagcaatccgagtcccactccttgcctagatgcgcctcgccctttgccttcttgtaatgcttcttcttttcccttttgttccccttttcctggtcactctcattatcaggacagttagcaataaaatgaccaagcttaccgcatttgaagcatgatcgcttccccttggtcttagtcttgctcggctgtccattgcgaccctttagcaccgtcttgaatctcttgatgatgagggccatttcttcatcattaagaccgactgcctcaatttgcgccaccttgctaggtagtgcctccttgctccttgtggcgttgagagcaaaaggttgcggctcgttgatcggtccattcaatgcgtcgtccacataccttgcctccttgatcatcattcgcccgctgacgaattttcctaggacttcttcgggcgacattttggtgtacctgggattctcacgaatattattcaccaaatgaggatcaagaacggtaaaggacctgagcattagtcggacgacgtcgtggtccgtccatcgcgtgcttccgtagctccttattttgttgataagggtcttgagccggttgtatgtctgagttggctcctcgccccttatcatcgcgaaccgtccaagctcgccttccaccaactccgttttggtgagcaaggtaacgtcatttccttcatgagagatcttgagagtgtcccagatctgcttggcgttatccaagccgctcactttgttatattcatccctgcacaatgaagctagaagaacagtggtagcttgtgcattcttatggatttgctcattaatgaatgaagggctatccgagctatcaaatttcattccattttccacaatctcccaaatgcttggatggagagaaaataggtgagtacgcattttgtgactccaaaatccgtagtcctctccatcaaagtgaggaggcttgccaagtggaatggggagcaaatgagcatttgagctatatggaatgcgcgaataatcaaaagaaaagtttgagttaaccgtcttttgtttgtcgtggtcgtcgtccttttgggaagaagaggactcatcgctgtcgtagtagacgatctccttgatgcgtcttgtcttcttcttcttcccatcttttcgcttgtggcccgagcccgagtcatttgacttgtcatcccttggctcgttgacgaaggactccttctccttgtcgttgatcacaattcccttccccttaggatccattcttatcccccgtcatatggtttgtgcatccgctgtcgataatccagcttgaacccccggatgcataaacctgcaaggcaaatttaggcttgggtcttaggtacccaactcatgttgggtcctacaaggttagtgcaaatatccttagggacccaaatgcaagttttgtctcccttgcattttgcccctaacttcctagcaacaattttcttatcctttctacaaatagcaaaggaagcatttaaagcacagtaaattgtagaaggttcattcactactttcctaggagcattataaacaacatttctcctaggcatttgatgaacaacatttcttctaagcacatttctaccaggcataacatgagaactagaagcagtcatagcataagagtcataagcatgtgaaccaaaaacatcatgacctctaaaagcatttctagaatatctcctatcatgatataaaaaggcatggttccttttagcactagtagccataggagccttccctttctccttagtgggagtgggagtgaccgtcgcggcgcgccgggccccccatgtactcgtagatgaagatgacgacgttgtaccagacgcagaactgcatgacgacgatctgcttcatgaggtctttggacatggcgccgtacatgccgccgaggagcggcacgcccatgatgatggtgttgggcagcgacgccacggagaaggcggtcaccacccactgcagcggagaggccgccgcagccgaagccgaagccttgccgcctccgattgagggacggcggcggcgcgaacgggactcccaggcggcccacgcgacgaggccgagcagcatgacggccttctgcagcgtgtcggcggcgacgaggcggccgttcatggcgtaggggttgttggtggagaccatgttgaagatgagcacgggcacggcgtagatggcgacgaagtggttgatccccgcgcactgctcctcggagaaggccttgagccaccgcacggacgcgtacccgagcaccgccgccgtgtacagcggcgccatcgcctccacgacatggtacacggccagccacgtgatcatggcgccctagaaagtagcacaccctatatatgatccaactttcgaccgatcagggacgaccacgcctctctataaatcgacggcgtggattcggtttcgtacagctagctgtgcgctaagcttcctcttgtggtactagaagtgtctgggtaagggttcccggccccgccctgtccggccg

SEQ ID NO: 4779 - DNA, 3489 bp, Zea mays
  Clone ID: TF_ZmC29741_18
gattgattctatcagttttattactatccaatcccttgaacaaactagagttatctatttgatcatcactagattcatcgtcactagaagaatcataagtgacatcattacgagtgattaccttcttctctcttgccatgaggcaagtgtgacgctcgttggggaagagggatgacttgctgaatgcaggggcggcgattccctcattgtcggagtcagacgaggagcagtacgattgccactccttgccaacatgcttgtctccttttgcctctttagtcttctactctattgcacttaacaacattttctacacaagttgttgatttactagacatttctatcttagcattcaactcatcgttaatgctctttaattttgaaattgtctcatggcatgaagataattcacaagtaagcatttcatttcttttaacttctagagcatgagatttttgagcttctaaaaatttatcatgctcttcatacaataaatcctcttgattctctaagagtttatccttgtcattcaatgcatcaattaattcattaattttgccaatcgtaattgtatctagacctttaaataaactaagatagactatttcatcattaggactagaatcatcaccactaggagaagcgtaagtagagctgccagtactgactagagtctgcttagccatgatacatccctcctatgctcagataggcgacgggtccgaagaggtccatatgcagcagctccaggggtcttgaagtggtcatcacattcttgttgtgatgtgctcctcccacttgtttacctgcttgacaagctgcacaaggtctatctttttcgaattgaacgttagtcaaacctatcacgtgttctccctttagaagcttgtgtaggttcttcatccccacatgtgctaagcggcgatgccacagccaacccatgctagtcttagctattaagcatgcatctagaccggcctcttcttttgcaaaatcaactaaataaagtttgccgtctaatacacccttaaaagctagtgaaccatcacttcttctaaagacagacacatctacatttgtaaataggcagttataccccatattgcataattgactaacagatagcaaattatatcccagagactcaactaacccttttaccttgccttgattcccatcaccgaatataattgaatcttgggaatccttattcttgacgtaggaggtgaacatcttcttctcccccgtcatatggtttgtgcatccgctgtcgataatccagcttgaacccccggatgcataaacattaacaacatttttcctaggcgtattgtgaacaacatttctcctaccaacatttctatcatgcacatagaaagaactagaagcaaacatgtcatgagaatcaaaatcatcataagcattgtaactcctataagcatttctaatttgtctcttatcatggtacataaacgcatggttctttttagcactactggacataggggccttccctttctccttggcggagatgggagccttatgacttgttaagttcttgacttccctcttgaagccaagcccatccttaattgaggggtgtctaccaaccgtgtaggcatccctagcaaattttagtttctcaaattcattcttgctagtcttaagttgggcattaagactagccaattcctcagttaatttagaaattgaaactaaatgatcactacaagcatcaacatcgaaatctttacacctagtgcaaatctcaacatgttctacacaagaattagatttactagctacttctagtttagcttttaagtcatcattaacactctttaaagtagcaatggtttcatgacaagaagatagttcactagaaagcacttcatttcttttaacttctaaagcataagatttttgtgcctctacaaatttgtcatgctcttcatacaaaaggtcctcttgtttttctaagagtctatctttttcattcaaggcatcaatcaattcattaattttatctactttagttctatccaatcccttgaacaaactagagtaatctatttcatcatcactagactcgtcatcactggaagaatcataagtgacattgttttgattacataccttcttctcccttgccataaggcatgtgtgacgctcgttggggaagagggatgacttgttgaaggcagtggcggcgagtccttcattgtcggagtcggaggaggagcaatccgaatcccactcctttccgatatgtgcctcgcccttggccttcttgtaatgcttcttcttttccctcttgctcccgtgttcctggtcactatcattgtcgggacagttagcaataaaatgaccaagcttaccgcatttgaagcatgatcgctttcccttggtcttagtcttgcttggctgtcccttgcgaccctttagtgtcgtcttgaatcttttgatgatgagggccatctcttcatcgttaagaccggccgcctcaatttgcgccaccttgctgggtagtgcctccttgctccttgttgccttgagagcaatgggttgaggctcatggattgggccattcaacgcgtcgtccacgtacctcgccttcttgatcatcattcgcccgcttacaaattttccaagaatttcttcgggcgacatcttgatgtacctaggattttcacgaatattgttcaccaagtgaggatcaagaactgtaaatgaccttagcattaggcggacgacgtcgtgatccgtccatcgcgtgcttccgtagctccttattttgttgataaggatcttgagccggttgtatgtttgtgtcggctcctctccccttatcatcgcgaatcgtccgagctcgccttccaccaactccatcttggtgagtaaggtgacatcattcccctcatgagagatcttgagggtgtcccaaatctgcttggcattgtccaagccgctcaccttgtgatactcgtccctgcacaaagaggctagcaacacagtagtagcttgtgcatttttatggatctgttcattaataaacgaagggctatccgagctatcaaatttcattccactttccacaatctcccaaatgcttggatggagagaaaataggtgagtacgcattttgtgactccaaaatccgtagtcctctccatcaaagtgaggaggcttgccaagtggaatggggagcaaatgagcatttgagctatgcggaatgcgcgaataatcaaaagaaaagtttgagttaaccgtcttttgtttatcatagtcgttgttgtccttttgggaagaggaagattcgtcgctgtcgtcgtagtagacgatctccttgatgcgccttgtcttcttcttcttcccttccttccgtctatggcccgagccggagtcggtaggcttgtcatctttgggctcgttgacgaaggactccttctccttatcgttgatcacgattcccttccccttaggatccat

SEQ ID NO: 4780 - DNA, 2340 bp, Zea mays
  Clone ID: TF_ZmC29741_34
cttgccttgattcccatcaccgaatattattgaatcttgggaatctttgtttttgacgtaggaggtgaacatcttcttctcccccgtcatatggtttgtgcatccgctgtcaataatccagcttgaacccccggatgcataaactttcctaggaacattaacaacatttctcctaggcaaattatgaacagcatttctcctaccaacatttctatcatgcacataagaagaactagaagcaaacatggcatgagaatcaatggcattatatgcattacaactcctataagaatttctagattgtctcctatcatggtacataaaagcatggttcttttgcacactactagccataggggcctttcctttctccttggtggagatgggggccttatggcttgtcaagttcttggcttccctcttgtagccaagtccatccttaattgaggggtgtctaccaatcgtgtaggcatcccttgcaaattttagcttgtcaaattcattcttgctagtcttaagttgggcattaagactagctaattcctcatttaatttagagattgaaactaaatgatcactacaagcatcaatgtcaaaatctttacacctattacaagtttcaacaatttctacacaagaattagatttactagctacttttagtttagcatttaaatcatcattaaaactttttaacttagcaatagtttcatgacaagaagataattcactagagagcatttcattcctcttaatttctagagcaagagatttctgagcttctacaaatttatcatgttcttcatacaacaaatcctcttgcttttctaacagtatattccttccttccacggctcctctcgcttctctaactgtgtcttccttagttctatctaatcccttgaataagcatgagtaatctatctcatcatcatcactagactcatcctcacttgaagaagcataagtactagtattaggagtgcttactttcttctcccttgccatgaggcaagtgtgacgctcgttggggaagagggatgacttgttgaaggcagtggcggcgagtccttcattgtctgagtcggacgaggagcagtccgaatcccactccttgccaagatgagcctcgccctttgccttcttatagttcttctttttctccctcttgttcccttgatcctgatcactatcattgtcgggacagttagcaataaaatgaccaagcttaccgcatttgaagcatgagcgcttccccttggctttggtcttgcttggttgtcccttgcgatctttaagcaccgtcttgaatcttttgatgatgagagccatctcttcatcattaagtccggccgcctcaatctgtgccaccttgctaggtagcgcctccttgcttcgtgttgccttgagagcaagaggttgcggctcgttgatcggaccattcaaggcgtcgtccacgtatctcgcctcctcgatcatcattcgcccgctaacgaatttcccaagaacttcttcgggcgacatcttggtgtacctgggattttcacgaatattgttcactaaatgaggatcaagaacggtaaatgaccttagcattaggcggacgacgtcgtggtccgtccatcgcgtgctcccgtagctccttattttgttgataagggtcttgagccggttgtatgtttgtgtcggctcctcgccccttatcatcgcgaaccgtccaagctcgccttccaccaactccattttggtgagcaaggtgacgtcgtttccctcatgagagatcttgagggtgtcccagatctgcttggcattgtccaggccgctcaccttgtgatactcgtccctgcacaaagaggctagcaacacagtagtagcttgtgcatttttatgaatctgttcattaataaacacagggctatccgagctatcaaatttcattccactttccacaatctcccaaatgcttggatggagagaaaacaggtgagtacgcattttgtggctccaaaatccgtagtcctctccatcaaagtgagggggcttgccaagtggaatggggagcaattgagcatttgaactatgcgggatgcgcgaataatcgaaagaaaagtttgagttaaccgtctttcgtctatcgtggtcgtcgtcgtccttttgggaggaggaagattcgtcgctgtcgtagtagacaatttccttgatgcgccttgtcttcttcttcctcccgtcttttcttttgtggcccgagcctgagtcggtgggcttgtcatcattgggctcgttgacgaaggtctccttctccttgtcgttgatcaccatccccttgcccttaggatccat

SEQ ID NO: 4781 - DNA, 2597 bp, Zea mays
  Clone ID: TF_ZmC29741_40
ctaaaaacacattagatatagagtgctcggatgaaatagcaattttacctaacccttttaccttgccttgattcccatcaccgaatattattgaatcttgggaatccttgtttttgacgtaggaggtgaacatcttcttctcccccgtcatattgtttgtgcatccgctgtcgataatccagcttgaaccctcggatgcataaacctgcaaggcaaatttaggcttgggtcttaggtacccaactcatgttgggtcctacaaggttagtacaaatatccttagggaccgaaatgcaagttttgtctcccttgcattttgcccctaattttctagcaactatctttctatcctttctacaaatagcaaaggaagcatttaaagcatgatatattgtagaaggtccattcacaactttcctgggaacatgaacaatattctttctaggcacatggtgaatatttttcctaggcatatctctaccatgcatataggaagaaccagaagcaaacatggcatgagagtcaaaggcatcataagcattacaactcctataagactgtcttctatcatggtacataaaagcatggttcttttgcacactactagccataggggcctttcctttctccttggcggagatgggagccttatggcttgtcaagttcttggcttccctcttgtagccaagtccatccttaattgaggggtgtctaccaatcgtgtaggcatcccttgcaaattttagcttgtcaaattcattcttgctagtcttaagttgggcattaagactagctaattcctcatttaatttagaaattgaaactaaatgatcactacaagcatcaatgtcaaaatctttacacctattacaagtttcaacaatttctacacaagaattagatttactagctacttctagtttagcatttaaatcatcattaaaaccttttaacttagcaatagtttcatgacaagaagataattcactagagagcatttcattcctcttaatttctagagcaagagatttctgagcttctacaaatttatcatgttcttcatacaacaaatcctcttgcttttctaacagtatattcctatcattcaaggcatcaatcaattcattaattttgtctaccttagttctatctaatcccttgaataagcatgagtaatctatctcatcatcatcactagactcatcctcacttgaagaagcataagtactagtattaggagtgcttactttcttctcccttgccatgaggcaagtgtgacgctcgttggggaagagggatgacttgttgaaggcagtggcggcgagtccctcattgtcggagtcggacgaggagcagtctgaatcccactccttgccaagatgagcctcgccctttgccttcttatagttcttctttttctccctcttgttcccttgatcctgatcactatcattgtcgggacagttagcaataaaatgaccaagcttaccgcatttgaagcatgagcgcttccccttggctttggtcttgcttggctgtcccttgcgacctttaagcaccgtcttgaatcttttgatgatgagagccatctcttcatcattaagtccggccgcctcaatctgtgccaccttgctaggtagcgcctccttgcttcgtgttgccttgagagcaaggggttgcggctcgttgatcggaccattcaaggcgtcgtccacgtacctcgcctccttgatcatcattcgcccgctaacgaattccccaagaacttcttcgggcgacatcttggtgtacctgggattttcacgaatattgttcaccaaatgaggatcaagaacggtaaatgaccttagcattaggcggacgacgtcgtggtccgtccatcgcgtgctcccgtagctccttattttgttgataagggtcttgagccggttgtatgtttgtgtcggctcctcgccccttatcatcgcgaaccgtccaagctcgccttccaccaactccattttggtgagcaaggtgacatcgtttccctcatgagagatcttgagggtgtcccagatctgcttggcattgtccaagccgctcaccttgtgatactcgtccctgcacaaggaggctagcaacacagtagtagcttgtgcatttttatggatctgttcattaataaacacagggctatccgagctatcaaatttcattccactttccacaatctcccaaatgcttggatggagagaaaacaggtgagtacgcattttgtggctccaaaatccgtagtcctctccatcaaagtgagggggcttgccaagtggaatggggagcaattgagcatttgaactatgcgggatgcgcgaataatcgaaagaaaagtttgagttaaccgtctttcgtctatcgtggtcgtcgtcgtccttttgggaggaggaagattcgtcgctgtcgtagtagacaatttccttgatgcgccttgtcttcttcttcctcccgtcttttcttttgtggcccgagcctgagtcggtgggcttgtcatcattgggctcgttgacgaaggtctccttctccttgtcgttgatcaccatccccttgcccttaggatccat

SEQ ID NO: 4782 - DNA, 2002 bp, Zea mays
  Clone ID: TF_ZmC29741_48
tagtagccataggggccttccctttctccttagcgggaatgggagccttatggcttgttaagttcttggcttccctcttgaagccaagtccatccttaattgaggggtgtctaccgatcgtgtaggcatcccttgcaaattttagtttatcaaattcattcttgctagtcttaagttgggcattaagactagccaattcctcatttaatttagaaattgaaactaaatgatcactacaagcatcaacatcaaaatctttacacctagtgcaaatctcaacatgttctacacaagaattagatttactagctacttctagtttagcatttaagtcatcattaacactctttaaagtagcaatggtttcatgacaagaagatagttcactagaaagcacttcatttcttttaacttctaaagcataagatttttgtgcctctacaaatttgtcatgctcttcatacaaaaggtcctcttgtttttctaagagtctatccttttcattcaaggcatcaatcaattcattaattgtatctactttagttctatccaatcccttgaacaaactagagtaatctatttcatcatcactagactcatcatcactggaagaatcataagtgacattgttttgattacataccttcttctcccttgccataaggcatgtgtgacgctcgttggggaagagggatgacttgttgaaggcagtggcggcgagtccttcattgtcggagtcggaggaggagcaatccgaatcccactcctttccaatatgtgcctcgcccttggccttcttgtaatgcttcttcttttccctcttgctcccgtgttcttggtcactatcattgtcgggacagttagcaataaaatgaccaagcttaccgcatttgaagcatgatcgctttcccttggtcttagtcttgcttggctgtcccttgcgaccctttagtgccgtcttgaatcttttgatgatgagagccatctcttcatcattaagaccggccgcctcaatttgcgccaccttgctgggtagcgcctccttgctccttgttgccttgagagcaatgggttgaggctcatggattgggccattcaacgcgtcgtccacatacctcgcctccttgatcatcattcgcccgcttacaaattttccaagaatttcttcgggcgacatcttgatgtacctaggattttcacgaatattgttcaccaagtgaggatcaagaacggtaaatgaccttagcattaggcggacgacgtcgtgatccgtccatcgcgtgcttccatagctccttattttgttgataaggatcttgagccggttgtatgtttgtgtcggctcctcgccccttatcatcgcgaatcgtccgagctcgccctccaccaactccatcttggtgagtaaggtgacatcattcccctcatgagagatcttgagggtgtcccaaatctgcttggcattgtccaagccgctcaccttgtgatactcatccctgcacaaagaggctagcaacacagtagtagcttgtgcatttttatgaatctgttcattaataaacgaagggctatccgagctatcaaatttcattccactttccacaatctcccaaatgcttggatggagagaaaataggtgagtacgcattttgtgactccaaaatccgtagtcctctccatcaaagtgaggaggcttgccaagtggaatggggagcaaatgagcatttgagctatgcggaatgcgcgaataatcaaaagaaaagtttgagttaaccgtcttttgtttgtcatagtcgttgtcgtcgttgtccttttgggaagaggaagattcgtcgctgtcgtcgtagtagacgatctccttgatgcgccttgtcttcttcttcttcccttccttccgtctatggcccgagccggagtcggtaggcttgtcatctttgggctcgttgacgaaggactccttctccttatcgttgatcacgattcccttccccttaggatccat

SEQ ID NO: 4783 - DNA, 2257 bp, Zea mays
  unsure (1)..(2257): unsure at all n locations
  Clone ID: TF_ZmC29741_49
ccgggnaaaaatttaaagcacaataaattgtagaaggttcatttgcaattttcctaggagcatgaataacattcctcctaggcacatgatgaatagcatttcttttaggaacaacatttatcctagtagcatttctatcatacacataagaggaactaggagcaaacatggcatgagaatcataaacatatgaatcaaaagcatcatgacttacatttctagtttgtcttctatcatgatacaaaaatgcatggttccttttagcactagtatccataggggccttccctttctccttggcgggaatgggatccttatggcttattaagttcttggcttccctcttgaagccaagcccatccttaattgagggatgtcttcctattgtgtaggcatcccttgcaaattttaacttatcaaattcacttttgctagtcttaagttggacattaagactagccacttcattatttagctttgcaatagaggctatgtgttcactacaagcatcaatatcaaattctttacatctattgcaaatagcaacattttctacacaagttgttgatttgctagctatttctatcttaacattcaactcatcgttaatgctctttaattttgaaattgtttcatggcatgaggataattcacaagtaagcatctcatttcttttaacttctagagcatgagatttttgagcttctaaaaatttatcatgctcttcatacaataaatcctcttgtttctctaagagtttatccttctcattcaatgcatcaattaattcattaattttgccaattgtaattctatctagacctttaaatacactagaatagtctatttcatcatcgtcactagaatcattatcactagaagaagcataagtagagtttcgagtacttactttcttctccttagccatgagacacgtgtgacgctcgttggggaagagggccgatttgttgaaggcggtggcggcgagtccctcattgtcggagtcggaggaggagcaatccgaatcccactccttgcctagatgcgcctcgcccttggctttcttgtagtgcttcttcttctcccttttgttccccttttcctggtcactttcattatcaggacagttagcaataaaatgaccaagcttaccgcatttgaagcatgatcgcttccccttggtcttagtcttgctcggctgtccattgcgaccctttagcaccgtcttgaatctcttgatgatgagggccatttcttcatcattaagaccggctgcctcaatttgcgccaccttgctgggtagtgcctccttgctccttgtggctttgagagcaaaaggttgcggctcgttgatcggtccattcaaggcgtcgtccacataccttgcctccttgatcatcattcgcccgctgacgaattttcctaggacttcttcgggcgacattttggtgtacctgggattctcacgaatattattcaccaaatgaggatcaagaacggtaaaggacctgagcattagtcggacgacgtcgtggtccgtccatcgcgtgcttccgtagctccttattttgttgataagggtcttgagccggttgtatgtctgagttggctcctcgccccttatcatcgcgaatcgtccaagctcgccttccaccaactccattttggtgagcaaggtaacgtcattcccctcatgagaaatcttgagggtgtcccagatctgcttggcgttatccaagccgctcactttgttatattcatccctgcacaatgaagctagaagaacagtggtagcttgtgcattcttatggatttgctcattaatgaatgaagggctatccgagctatcaaatttcattccactttccacaatctcccaaatgcttggatggagagaaaataggtgagtacgcattatgtgactccaaaatccgtagtcctctccatcaaagtgaggaggcttgccaagtggaatggggagcaaatgagcatttgagctatatggaatgcgcgaataatcaaaagaaaagtttgagttaaccgtcttttgtttgtcgtggtcgtcgtccttttgggaagaagaggactcatcgctgtcgtagtagacgatctccttgatgtgtcttgtcttcttcttcttcccatcttttcgcttgtggcccgagcccgagtcattggacttgtcatcccttggctcgttgacgaaggactccttctccttgtcgttgatcacaattcccttccccttaggatccat

SEQ ID NO: 4784 - DNA, 1314 bp, Zea mays
  Clone ID: TF_ZmC29741_72
tcaggatgacttgttgaaggcagtggcggtgagtccttcattgtcggagtcggaggaggagcaatccgaatcccactcctttccgatatgtgcctcgcccttggccttcttgtaatgcttcttcttttccctcttgctcccgtgttcctggtcactatcattgtcgggacagttagcaataaaatgaccaagcttaccgcatttgaagcatgatcgctttcccttggtcttagtcttgcttggttgtcccttgcgaccctttagtgccgtcttgaatcttttgatgatgagggccatctcttcatcattaagaccggccgcctcaatttgcgccaccttgctgggtagcacctccttgctccttgttgccttgagagcaatgggttgaggctcatggattgggccattcaacgcgtcgtccacgtacctcgcctccttgatcatcattcgcccgcttacaaattttccaagaatttcttcgggcgacatcttgatgtacctaggattttcacgaatattgttcaccaaatgaggatcaagaacagtaaatgaccttagcattaggcggacgacgtcatgatccgtccatcgcgtgcttccgtagctccttattttgttgataaggatcttgagccggttgtatgtttgtgtcggctcctcgccccttatcatcgcaaatcgtccgagctcgccctccaccaactctatcttggtgagtaaggtgacatcattcccctcatgagaaatcttgagggtgtcccaaatctgcttggcattatccaagccgctcaccttgtgatactcgtccctgcacaaagaggctagcaacacagtagtagcttgtgcatttttatgaatctgttcattaataaacgaagggctatccgagctatcaaatttcattccactttccacaatttcccaaatgcttggatggagagaaaataggtgagtacgcattttgtgactccaaaatctgtagtcctctccatcaaagtgaggaggcttgccaagtggaatggggagcaaatgagcatttgagctatgcggaatgcgcgaataatcaaaagaaaagtttgagttaaccgtcttttgtttgtcatagtcgttgtcgttgttgtccttttgggaagaggaagattcgtcgctgtcgtcgtagtagacgatctccttgatgcgccttgtcttcttcttcttcccttccttccgtctatggcccgagccggagtcagtaggcttgtcatctttgggctcgttgacgaaggactccttctccttatcgttgatcacgattcccttccccttaggatccat

SEQ ID NO: 4785 - DNA, 1161 bp, Zea mays
  Clone ID: TF_ZmC29741_78
tcatacaacaaatcctcttgcttttctaacagtatattccttcttctcccttgccatgaggcaagtgtgacgctcgttggggaagagggatgacttgttgaaggcggtggcggcgagtccctcattgtcggagtcggacgaggagcagtccgaatcccactccttgccaagatgagcctcgccctttgccttcttatagttcttctttttctccctcttgttcccttgatcctgatcactatcattgtcgggacagttagcaataaaatgaccaagcttaccgcatttgaagcatgagcgcttccccttggctttggtcttgcttggctgtcccttgcgacctttaagcaccgtcttgaatcttttgatgatgagagccatctcttcatcattaagtccggccgcctcaatctgtgccaccttgctaggtagcgcctccttgcttcgtgttgccttgagagcaaggggttgcggctcgttgatcggaccattcaaggcgtcgtccacgtacctcgcctccttgatcatcattcgcccgctaacgaattccccaagaacttcttcgggcgacatcttggtgtacctgggattttcacgaatattgttcaccaaatgaggatcaagaacggtaaatgaccttagcattaggcggtcgacgtcgtggtccgtccatcgcgtgctcccgtagctccttattttgttgataagggtcttgagccggttgtatgtttgtgtcggctcctcgccccttatcatcgcgaaccgtccaagctcgccctccaccaactccattttggtgagcaaggtgacgtcgtttccctcatgagagatcttgagggtgtcccagatctgcttggcattgtccaagccgctcaccttgtgatactcgtccctgcacaaagaggctagcaacacagtagtagcttgtgcatttttatggatcgtctttcgtctatcgtggtcgtcgtcgtccttttgggaggaggaagattcgtcgctgtcgtagtagacaatttccttgatgcgccttgtcttcttcttcctcccgtcttttcttttgtggcccgagcctgagtcggtgggcttgtcatcattgggctcgttgacgaaggtctccttctccttgtcgttgatcaccatccccttgcccttaggatccat

SEQ ID NO: 4786 - DNA, 540 bp, Zea mays
  Clone ID: TF_ZmC29741_90
ttacaccttcttctcccttgccatgaggcaagtgtgacgctcgttggggaagagggatgacttgttgaaggcggtggcggcgagtccctcattgtcggagtcggaggaggagcaatccgaatcccactccttgccgagatgtgcctcgcccttggccttcttgtagtgcttcttcttctccctcttgtccccttgttcctggtcactttcattgtcgggacagttagcaatgaaatgaccaagcttaccgcatttgaagcacgagcgcttccccttggccttggtcttgcttggctgtcccttgcgacctttaagcgccgtcttgaagcgcttgatgatgagggccatctcttcatcatttagcccggccgcctcgacttgcgccaccttgcttggtagcgcctccttgctccttgttgccttgagagcaaggggttgcggctcgtggatcggaccgttcaacgcgtcgtccacgtacctcgcctccttgatcatcattcgcccgctcacgaacttcccaaggacttcttcgggcgacat

SEQ ID NO: 4787 - DNA, 1257 bp, Zea mays
  Clone ID: TF_ZmC4916_360
atggatcctaaggggaagggaatcgtgatcaacgacaaagagaaggaatccttcgtcaacaagccgaaggacgacaagcctaccgactccggctctggccatagacggaaggaagggaagaagaagaagacgaggcacatcaaggagatcgtctactacgacgacagcgatgagtctacttcttcccaaaaggacgatgaccacaacgactacgagagaaggaaaccggtaaattcgaacttttcttttgactactctcgtattccgcaaagttcaaattcacatttgctctccattccactcggcaagcctccacactttgatggggaggactacggattttggagccacaaaatgcgtagtcacctattctctctccatcctagtatatgggagattgtagagagtggaatgaactttgatagttcggatagtcccatgttcattaatgaacaaattcataagaatgcacaagctactactgttcttctagcttcattgtgcagggatgaataccataaagtgagcggcttggataacgccaagcagatctgggacaccctcaagatttctcatgaggggaacgacgtcaccttgctcaccaagatggagttggtggagggcgagcttggacggttcgcgatgataaggggcgaggagccaacacaaacatacaaccggctcaagacccttattaacaaaataaggagctatggaagcacgcgatggacggaccacgacgtcgtccgactgatgctaaggtcctttaccgttcttgatcctcatttggtaaataatattcgtgagaatcccaggtacaccaaaatgtcgcccgaagaagtccttggaaaattcgttagcgggcggatgatgatcaaggaggcgaggtacgtggacgacgccttgaatggtccgatcaacgagccgcaaccccttgctctcaaggcaacaagaagcaaggaggcgctacctagtaaggtggcacaaattgaggcagccggacttaatgatgaagaaatggccctcatcatcaaaagattcaagacggcgcttaaaggtcgcaagggacagccaagcaagaccaaagccaaggggaagcgctcatgcttcaaatgcggtaagcttggtcattttattgctaactgtcccgacaatgatagtgatcaggaccaagggaacaagagggagaagaagaagaattataagaaggcaaagggcgaggctagggatggcaacgggtacatacccgtcgggtag
